United States Patent Application Publication US 2025/0297208 A1 - sequence listing, part 11

SEQ ID NO: 1993 - DNA, 67273 bp, Xanthophyllomyces dendrorhous
atacataacttaccagccattatctctgcgagaggaaaagaggaagttgtttggtcatcatgcgctactagtatcaagtgagatcgatcaagaaccagatgtatcttgtcttacttgaaactcttccagcctaacccgtatatacggatcacaatatcaatagcatacaagacggacaaggccaagaacaggcagtctacaaatggtgagacacgagtcgagcgaaaagagacatcatcagtaacgttcttgatcaagatagattagcaaagttatgcactgacttcgtataagcgctcctgtactgcctttcttgctcgagtcataggtgttagtcctacaggattcccgacacagcacaaagaaggcatataagacagacgaaggtcaaatcgaaagacgacaaaagaagtttgttacagctttaaaaaaagaaacttacgccatgattatcgtgtgaagaatatagcttgcaaacatcatgttcgcccaccagccatgtttagataccgctcgatcaaagcaccaagatcgtagggctagatatatgtatgtatgagaaacagtcaacacacatctgcgaataacaaagattgtctaattcaacctacctgatttgggtcgacgatgcggccttttagcctgtacaagtagccaaagaaaattatgaggacaaagccagataaccaacaattgagtttgaaaaggtcgaaccagacatgagacgagataaatgacttaccggtccttgcctggctatcgtcttcttgagattgatccattgcctgttcgatgtagaactgactgtcaatatacaacaaacatttacacacaaaagatatgaaaagcgcttgcctttggtcattcaagagaagagcggacccagaacgctttccatacgcctcaataatgatagtaacgaaaacttgaagcaagatgttcagcaggatgtcagttatacacaagggctatgagcttgatagactgaacctacgcgttagaataatgacagcgccaaactgaacatatggcgtcgaaaattgtttgcaaatggtggccagtcagtccaagctatttcggtcgacaggtcagagagtgacgaacaagattgtagaataagaagaatagcgcattccactgagaagcgttgatgttaggttgttggttaattttcgtgatgttcatgaccgaggccatcacgtcggtccagccttccaacgaaacaatctcgaagagaatcaagatggactgtcatttcgaatagatattcattttgcgtgcacatcataaaagttagtcttgtactgatagttctgtgctgttgttccttcacgtaccttttgaaagtcatcaaacgaccaaacgctatagaacaatgcaggttaggaaacaattacagacaatgatggagtcatgcggtttatcttaccttgcatcaacagtaggattcgtccagattctaggagtaagaaatcctgaaccaacgccatcgacaggagtcgcgagatactcgccaatacattcgcctcgagaacttatgctcgaatcattgcagctatagagcaggccagagaaacagttcacaccccagactgcataagggaccatgtagaggaggaccagcatcgacgcatctctgtgatgatatgagtattttgatgtcagatcgcatcgagtatgagcacattcaacgataacagacaaacacacatgattttccctcccccagcaaatacgacggagtaaagaatttcacgtgctcgtacggataacgtaatcaaacgcaaagaccgaacggctttgagagctcgagtgaatctggataaccctccataggtcatcaaacctggaaagtagcaggacaacatcattattgagaaagatgaattgtaaaggtaatttatgtcttgtcgactcactcgtcgtcgtgtttgccaataaacatatcaagatcacaaaatcgatacagttccaagtagaacgtaggtatgcgttcggacagaacatgactaataaacaagagttaaatcagctgatgtagatcgtatgaaaagcactgattgactgtacttacagccatcggctatcactttgatcatgaattctagaatgaacacccatgctagagcaatctctgtcaggtcgaaccagctttgcctgtcagcgatatgtgtggtataatatactcgtcctatgcgtaattatagatggatcagttaacaaagtttgaaactgcgagaatgacttgctagatgctcacgatagatgggagtggctactgccgcaacaacaattccagagaccacagttaatatcatcacaattttaagagcaaatgtcctactaggtcgagcagatctgccgaacaaacgatcacctagatgatgagagagctagcggttagattacaataacttctaatccgagcaaaatattaaatcaggttgactgaccatcagcagggggaaccatgctctgacagaactgccggataggattactctgagagaaaagccacaagctgacatcgaatccaggataggccgcgatgaactctacttggtaggcacgtttctcgcgaatagcttgtgcggcttcgtcagtcgtttcaattgatcgagcaaaatcactgtcgagaggattgtccaacaacatgttgaagacaagttttgagtaaggggtattaaatcaggtgtaagatcgaatgaaagcgcgcacaggtacctattcaaccccgtcggttgagctgaaggcgtgatgttgtctactcgacctttggaaagatctttgagagctatttcctcggctttggacttctcagcagctcttccaaacatgtttctgacaaaactgcgcattccttcttgtttcatctatacaagccgaaagtgaaatcaatgtgagtcagtaagagatcaaacatcaactcgtacagatgtaaacatacaccggcatctgttggaccaaaatctccatcggtgaggcttctcttgacaggaatgccagggttccgttgaacgattgtttgctttggtttgaaaaggaggtagggattgaatttgtccaagaaagtatcttgcggtcgtctgggctcggtcctccgcagaaatgcctcgatctgatggttcttctttgtttcttcggcaacggcgaagttcttgggaaagaaaaagaaaaaaggaggaaagaaagacgtcagcttcgtttgggcaaaagcagacaagaatgttctaacctcttgaatgaccgcgataaaaagctgaagcctatatatgagatgagttaagaatgaatcagcaactcatgctgctagcacgatatatatacagccatcagaatggaagagaacatacatgatgaaattcgaaaacatgaaccatagacacaagaaaattccagaaactactccttgtttgtatccgaattcagcatccagctattcaaatcgagttcaaattacaatgagttctgggcatgcagaaaatccatagctagaactttggtaatataatcttgatgaagacctactactgtatacaagggctctgtccagttttctgatgagaagatttgatacattcctataaaactgttgtaaatctgatcgaaagtgatcatggtttgcccatcttgttcgatatcattctgtaaaggaacaatcagaattatgttaggcttactgtggtatgtgcttatggtttgagcgcagggtcacttacttgaaacagttgcaaggcaaacatagcggcaatcaagatcgtcaaaactaaaaagagcgtcatattgagaagaccggatacgtgtccgaacacggcgatctggggagacgataatgaaaccggcaataaaatcaacgttgaaagcaagcaattcaccatgatcaagaacttaccaaaagaggtttcattcttggaacagctcttatagccaaagaatggacccacacaagttgtatgtaagcgggatttttggaatgacaacaagacaagaaatcaagggaatcaggagatgcttacaagatcactcggtaccatctagccaaaggaaatatcgtcaaccatccatgcgccaacgtcttctgaatgcccggcatttcgatgatagttgaaaccaaggcgagcaccaggtcaaagtcgttgacagcgtttgtgaagaaggacttcaaatcagggtagtggcctgcgatccggataaggatttccacgtcgaatgcaatggcagacacaagaaggacgatatctatcgtcaccatcaaattgccataaaatgcgtgatgagtttcgataaattagttcaaagtattcaaagataacaaacacagcgtactcatgcgattgtcgtatgatgtcggatcaacttctgtcttggtagcctgagctgcaagagtcagaatgataccaacgacccaaacgaaggacgttcggttgtaccatttcataatcgggttgttcttctgacgtcttttgttctcgttcgcgttccaatcatcggccgggtttccggtcatattcgaactgttcaaccaagtttgcgagatcagaacaaatatacaattgggaaattggaaggaatatatcaagtcaggccgtactctgttgcaccaaaagcgctgcgtttcgtttctgaacggatgtctgagaaggcgtttgcgatgacagcgacaaacaactgcgaaaaccacaagttgatgatgatgattctgaatcgagagacagtgattttagcgataaactaaagtatctaaaggaattcggatgaggtcatacataccctaggataaagtatacacaggcgaaccaatagtccgtttccatgatttggtactatcgccattgaaacagacatgaacgtggtcagaaaagttatgcatggtaatcaaaagcaactatgccatggtcgaggttgaagatgagaaactcaccatgacacttgaccacgagttagcactagcaatgataacgacttgcatcattgatcccaatatattatcaaatgtctgtccaacttcgacgctgtcatattgctcaatgcacctctggcccctgggacagatgtatccttttgcgaaattgacaatgggcaagtcgatatcatctatatagacaggccctttgttggaattcgagcttgcatcgtaccaaccaccacaagcatgacttaaagtcgttaaatcagacgagtttgtaggatctattcagagagtaagatcgtcgatttgagcgagaatacggatgaacgtccgttcatgacaacgtaacacgaagagttgaaaagagaggtattcaaacttactgacggtgtagcatgatcttctcatggaaccttggaagcactgcacacctatgatcgagaatatgccgattgagaacatcacaaagaaagcaacgttcaccaggagaggccctgctcttttcaatgaatggaggatagtctgtcaatccgtttatatgcatagaaaagagcaatcagtacgagtaacagctttcagagagcctcgtaaataagaagctcaccgctgttcccctcgtgatgactagcagtctgcctgtcctcagcacactcaaagctctgaaaatgaagaggtgcaacgtcggctgagcctccttacccgatgcgctcaggccaaacatgatccagaatgatatgatggcgagtaaatcgattcgatgccatgagtgtctcaaataaggtctcccgaacgaagctagttccctttgcttcttgagtgaatcttgaaatgggagttcaagagttgaagctcgggatttgattgatttgtgaaggaaaagagtatcacttgtggaaccagaagccgaacgggaaccgaattgatgagactgcgaggatgtagttgaacccagactaggtaagattgatggtaaagactcgatgtcgaacgtcggagtgatgggcaacggttcttcagtgatcgtccccggtgatcgtcgatttctcagcccaaaagaaccaatttctccgtctgtgcgttgcagactctgttgatctaggccgatctccggcatgatactaaacatgaactcatcgtcgtcgctatcttcaacctgttcgtaggtgtctgctctctcctgctcctgctccgcgcgctgtttccgctcccccatagccttctcctctcgagctttccaagcttcagaagttgttcccgtcagagccaacacggcccggaccttgatgactccgctcttgaatcttacgtttcgaggagtttctttggcgggggaagccagagggagggtgtttgaaatattgttactgtgaggagcgtcatttggatgacgggtatcggaagaaacggctgcaagagggattatggaagatggtgtggtttccttgggcgcaagagacttagattcagcaagcgaatgagcggtgaacgggtcgaaaatcaggccggagacaatgatgcgagcaaacatctcgagagtaaaaatgagaaagagagcaagcagacaccaatcttcccactgcatcccgatcgcttgagcagaagtcaatgctccctgaagaacgacaactacagcattggtgatgatcaacacgatgatgatgggttccgtcattctgattgacagatagaaacaacgtcaagttgaatatgagtgccattatcagaaattcttgaaacaagagagaacaaagaagggtagaggcaaatgatcgacagacttgttgctcatcaccttccagcacgcctttcttaacgggtgatccggccgaaagattcccaagctctttccaaccaaaggcccggatccgattaactttggaacagccttattcgtcatccccgccgggttcgagttgttactagcggagcttgcgaaactgggtcttcttgtcgaatttgctgtcccgtccccaattcctggagatgcgagtctaccgtccttgttcgacctccagggtctcttttggctcttgtcaacctcatccgatgtgtctcttatcctacgtctgatagattcgtcgtcctcgtcttcatcctcgcatggatcgttctcgtcccgaagctgcacggctccgtccgaagccgatatatagtctgctttattccttccgtccaaattgactaccttggaagaagcccttcggaaacctcgactgaccgctctcagcgtcgagctcgtctggaacgatgaactcggtatcgacaatgaaggtttctgtgctcttttcggtgaacggtcaggcgtgaagggatggtgatgttgagatccagaagggagattccggcgaggtgagattgtaaacctggaggcatgactcgagtgagtacgaggagaaagcggtatgcgagcttcatccacaacagatgtttctcctgatgaaccagattcatcctgtgatgagtggtgaccatcctgatgaaacggtgagaacagttccgaaggcagccgaggggataccggaggcgaatcgcgtggttgactttcggttgaaggagaagagggacgttcagccgagaatgatcccatgggagagtcatgactggacggtctgacggaaacaaagacacgttgtgaatacagactttctcgaggagattaggtacaagactagctcactctacagatgcaatctgcgccgaagtcgagatcgcgtgccgagggctcgttgaggaaccaagtaacgttggtattgaggctgaagctgaagccgaatagtgatctgaaaccagagacagaggtgagtctactgagggtgattcgatacgaccgatgtctaaattccgggtaggctgttctgatgaaggaggcagtgctgtttcgtctctaagatccgacgaaggtgagcctggggaagagtctagccctgttggtagctctgcaggctcagaaactgacatgacagtttactgtttcgtaggagatgacgggaagcaagaacaagatgagaagaaaaggtatcatgagaaaattaaattcaaaagacctcttgatctttcggacgcgacgttcaacccgagttgtcactcaccttgtctgggctttacgggcctgtaaggtatgtcgagcccgaccgatggagcttccgaacagatatcaaattcagtcgttgaatgcgatcctgacagaatagctctgaggagctatctaatgtctctcttttatgagcaatgatattatacgtgtagatgaattgtcgatctgtgaggatcaaaggatgaaatgaaacaggatgggatgttgagctggcttaagcaggatgtttctatatagaaacgtcatgtgtggcacgttcattgatatggtcattgctgtgctcttcaagtccttcttatacgtttaagcatcatgctattacactttgttcgttcgccaacgctctgtcttctgaacaagagtgtctttgctgtcagagagtatttcgtatcaaagtgtagcggccgagtagtttgttcgaaacttctcgtgttgacgtcgatatcatgaatttagtagaaaaatagatcgagatgatcgtgcagacgtggagaacgtatcttctcttcccctttgcacttctcgaaaagatagctttccacttatgcggagcctacattgtactccagtcagaaatctaaccggatgatataccttgtatgtacttgtatacaaccttgactatatgtgtctcttacgtttcccactttcagtacctgtgtgcatccttactgtcttgcttccaagcccgagcggccaagtacttgtatctcttcatcgctttccttctcttcgtagtcttttttttcttctctcttttctcttttcccttaagtttggattttgtcaccctcgttcggtatgccttcgtttgttatccttacaatgcctctatctctggcgcgcccatgatctgtcaagaacctaagcttcgaaacaactcctaacaacaaaacccatcattcaacaaagttgcaacataacagttgccgggctatttcgcccttccactatctcctctgaatacactggcccagctgctcggacccaactagttgagcgccgagagatctcaagctcccctttatttcactcccattcccctataaactctgcccatgattgccagaatggagggtcgtattctttggcatggcgtattaattgtatttggtatacctgtaggcaggaggaatgcatggagatgagaagaagcaagagcgagggaaccatgcaatgctgatcaaggaagttgtgcctacttctccacacaccgcggcagtacttggccgcgctgaacgccaggccgagacgtccttcgtgcttcttctataaagcctaggatctcagcctctatcgactcgtcttcttcttttctgaactggattcttatcagacgaccacaccggaacacacaaagaatctgtcatgactcaaccatctaaaacagtcgttgtccttggtggaggtggtcagtaatcattctgacgtcagatttcattgattcaaagtcttgatcgacatccatcattcaatcgatgatctggtcggttgcgcgagactcgacgaactctttgatccaactctctctttcatttctctttgtacaaacagtcatcgggtgcacgacggctctcattctggcagaaaagggatatgatgttgcaatcgttgcccgagatctcccaacggatgccctcagtcaatctttcgcaagcccttgggctgggtgcgcttcgcctatactttctttatggtcgtctcatcatcaatggaccaagtctaacaaaccattcatcgatttgaattcatagcgcaaactggcaccccttcaatggaagtactgatcaggtcaaacgatgggaaaccatgtcgtacccaaagctcaaagagctgggaaagcttggcctgacaagtcctcttaaatggatcgattacagtcttgacccagaatcggacaacagctgggtcaacgacgccttctacaacagcttgtgagctatcatgtttactgctgttatgttccagaatggtttcctcgatctacaaacgctcacccggttctacccgctcgatcagtatccctgacgtaagttcgcgtcaggccatacgctgaaaatgtgaggaaattaacctttgagcggtttatcatccttcagcacaagatcactccaaagaatcaactaccaaagtatgtgattatctaaatcccatactgaaatattggtgactctatacttacccatatcctgattctgcatgactcgaacaggcaatacttttctggctcctcgctcactgtacgttcgtctttcaattttcctcaaaaagcgcgtcctactcggcaaagcttatcttgaaagtatcaatactcgtattggaatgattcaactatcccaatagacattgtcactggctcctcccgtctacctcaagtatctttacgatcaactaaaggccaagaacgtaagattcattcgaaagaaagttgagtcaatcgatgaggccgccagggtcctaggcgagaaggccggctgtgttgtaaatgcgactggacttggtatgtgacttgccacgatgataagcgctgaagaagatcctcacttacccaagcttgttctcttccaggcgctctttctttgggaggcgttttcgaccaaaacgttgttcccatcagagggcaaacagtgcttgtaaaagccccttggctgtgagatcttctacaacttatgaacattttccatctatcgacaagtacacatcgtcttattgtttcgttattctttcccttctctgtgcagaaaaaacggtcttggagtggatggttcgtttgctcttctgtcatcccgatgcaatctcgtttgactcgaggttggttgtcttttttgcgccctacaggttttgaagatggtactttcacttacatcattcctcgaccggatggaaacgccattctcggtggtacaatgactgtatggccctctttccttcttctctggatttttatctcaaacttggccggatgataaccaaaaattcttccaacttgatacttgaacgggtgttgatagtacaacagctgggacacctcggtcgacccagagatcgcggatcggatcttgagaaatgcgttcaaagtgatgccagagctttccaagacaggcaaatttgatgggattcaggtcgtttctcacaatggtttgtaccatcactcaatcatgtttacgcaaatttcctactcttacgtttctggacaccatatgcgcaacacagtgggtctgcgacccggaaggaacggaggtccgaggttagagctcgagacgttaaggcttcctcgacaaggatctttgggaatgtcagatcctacctgggtcccgggagggaatgatgtcgaaactgttggagttgtacatgcctgtatgtctacccgccttttatgtttttacctagaataagggaattgacgggaagcttgtttggttattcggcattcaagacggtatcggaccggtacgtaataacaaacgcatcctctctctgaacagatgagacggacaagtttttttctgaattggccttcccgttgcatttgtgcgatctaaaggctggctaccaagcatcttggggaatggcccaagatgcatctgatctgtaagtcagccatcaccgatcacatatcgtccaattgtgtcaggttcttctcgacattgcctgatgagagcttgtgaatttgaattggaacagtgtggataaatatttcaggacgttgaaagaacagaacggaaagagccttcgaagggagagcaaactctgaagtgtccttgtgcttgcggattctttcatcgtccattgtctgttcttctgactcccatcttcttgatggtgatctcctctgcgcgagcgcgtcgatattctcttcttccgaaaatagatcatatagacagtcagggctcagtctcacgaatcgggttttcatttcttttttatttgtgactatcttgtatcagtgtcgttccctattttccatttccgatgaatagttgtttgtttatctattaacctattggccgagcatgccggacgccgccgagatgaccgtggtcgatctttaacattagatatgatgaaaccccccaaacgaagggaaaatcagcataatcgtttgaggcgagagtgaagaagagaagagaacggagaacgaaccgtttagcatctaggaaaagttcattcatctcgttgatatcctcaacttcgatttgcgttcgacctgccaactttgccaagatcgctgctggtgccaatagttgaagagcatatctgcgttcaaaacatggttcgtcgtggatgtcagacacgagccctgatctacagagatgaaagtgataacaggcagacagaaaaaaaaagaaagaaaagagacggacctcatcgagcttctctcgccttcatcggccaatcggcttaacgcgtcctcagccacgaccaaaccctcgacctctgctctgatacctagaacaagtttaacttcatccctatctaatgggaacgttctgacgatcatgcatctatccaatagatcgagcggtactccgtgaggagcttggatgccgactcctgatcctccaggctcggactcggttcctcgaatggtagacagtcctcggttggtggcgagaatgacgtgcggggaaataggtgattcaagagctcggttgagatatgtgaaacattcgatgtctaacatatgaacctggatggattgtgttgcgttcaagatgtcaaaaaggccgaggagtgaatttttgaaaagtctagtgataaagagaacggcaaaaaagagaagatagacatacctcatcgatgaacaagactcctggaaccaactctgcgataccctgctcgatgtatttattcacgaccttgttgatttctgctctcaacttatctgtaacctctgtcctgcctcctttgacgagctgacccatcacggacatgatgtcttgtccaccttgaggtcgagcgttggccatgtcgagatcgtgcaaggtgatgtcttgtacaagttccttgcgcttgtgaacttcgcccttaggaagcggaacataagactcagcctcgaggtcgtattccgatgagtatgcgtccgaccggccaactctctatttatcgggtgttcatagacgaataagtcaatttgagaacttaagcatagaccgcaaagataaaggcggaaatgatgattgcaaaccttgacggcgccagtgttggcctcgatatagataacatctccgacaacaaccttctccttctggatggcttcatagatgctagggtctaagcggagctgctttgttcctttagttgttttgagtccgatgacaacttgggagatcgtctttccgtaaccagacaatggattctcggcctctgtcggcgtcaactcggtcaactctccttcgtatacctccttagtttccttgactcgcaggcctgacgatagtgtcaagggaacagagacaaggtgatgtcagttcgtcaaaatctctgaaggtaggaaagaagggaagctgaaacgaaccgatagctcgcctgaagctctcgccaaggacctcggtcttcttcacctcacttgagtagacctcactaccaacgatcgggcagaacgggactttgcttccaagctcctgagcaacagccagcgccaacgcagtttttcctgttcctggtccaccggctaagagaagggctcttccggagaactttttcatctgaatgagagaggtgacgagtccacatgcctttagtcatatgttgagatgaaggagggatggaaaaagagggagatgagtacggttgtacatgcaagatacaaaaaagtgatcatgagattaaaacaaacctctcgggcctggacttgaccgataaaacctgccgagtttgagggtgcagttccatcttccaatagaccaagacccttactggattagagaaatgatggatattgatttagaagaaccagccataaggtgaacggtgaacgcgtttgagtagatcagtatgcagtcattcattacgcgactggagacttcgaaacagtctggagaacttacatgtgagagtgagtggcgattcgagagctcctatctgaagttcctggcgtgaccttcattgtgagatatagtcaacagagagagagaaggggatgagtgttggacggatgagtgctgaagagagtgtgtgcttttgggaaggtggaaattcctaggggcactctttagcggtgaaatcattacgtaatacactttccaatttccagatcgtttcaacttcctattgcgttctcccttctgcccacaccaccaccaccactactacatacatactcgtcttctttccctctttctagtcggattctgttcgttagcatcttgtatcgtatacattccttcctgtttctgtttgtaatctcaagatgggtgagtttctttgttcccatctttcctgctttctttctcgtgtgtgctgtgatcgaacggttcctgccagagaagcaccctgcccatcaccgccactaccgtctgtgcacatactgatcgtccatttgaacatacatttcatctatcttataggtattcccaaggtctgtcagcctctattttgccatagtacaccaattcaatcgaccagatagaatggtcgtgtatctcaatccttgctggttgggatcgacgatgtctgaagttctcgatctgacataagtgtcttgatcgttggctttccttgttgatcgtgctttcagtttttccgatatatctcgttcgtcgatatctctatctttccctttgaatcatgtctccggtatgatgatgaacgaggttcttatgtcgtattgcccttttacaattcagagagagatatcctctcacgtccgaactgatcgatgacaagtcaatcccgatgtttgacaacctttagttcgtccatctgccctgtttcgcttaatcgattctacgagcagctagactcattgaaactcgacatgatagtcttgatatgaatggtatcattcataactgtacccaccctccttcatctgaaggtgacgcttcgttcaggttaacagaggagcagatggttgtcgctatctttgcatacatcgagcatctcttttcaaaaattaagcctcaaaaggtcagtatagctcaattacttttccaaagacatctgcaagagactcttaccaatctctgtatgcatctttccacgcaggtttttttcatggccgttgatggagtggcccctcgagccaagatgaaccagcagcgatccagacggttcagaactgcccaagaagcgaaggagttggaagagaaggcgctcaggaagggagaggagatgcctaaagagcctgctttcgacagtaactgtattacccctggttcgttttctctcagtaccctctttccataatcgttcctgtcttcagtccaacctgacgctttcgatccgtctttgcatgcccattaggaaccccatttatgactcgactttcaaagcacttgcagtactttgtaaataagaagattgctgaggatactgaatggagaggagttgaagttatcctcagtggtcatgatgtaagtttctatcatgcgcccctgtcaggtttaaaatcggaattctgacccggcttttcttactgtgaattgaacaggtccctggagagggagaacataaaattcaggagtacattcgattaagcaaagctcaacccaaatagtcagtttttttaatcgcgctcgagttctgcttcacgtacaaacatcaagtttgactgatattcactttttgtcattgtagcaaccctaatactcggcattgtctgtacgggttggatgctgatctgataatgctgggactcttgagtcatgatccccacttttgtttgcttcgtgaagaagtgacatttggtagaaagtccaagaagagtggagggtaagtcaatgtgtatcatcgtcctcagcggaatactgaacaagcaacctctaacgtccttctttgctgaaataactagacttgaaacccagaatttctacttgatgcatttgtcactattgcgagagtacctcgatctagagttttcatctcttcgcctaacagatggcaattctactaatggaaacgcctcacatccgagccttcccttcgagtacgacctcgaaaagatcattgatgatttcattttgatggccgtgttcgttggaaacgatttccttccccatctgccagatttgcacatcaaccagggagcgatggaattgatttggggaatttataagaaggttttgcctcatgcaggtttgttttcgcccttatcgtcgttgtacacatcgatcaagatgattgatgagtagaccaatactacacttaatttcaataggaggttacatgaacgaatctggaaaaatcaacgttcagcggctacagcttgtcttagatgagctcgccaaattcgagatcgacactttcgagaagcattacgcggacgcaagctggaagagcggacgacacccagcgccaaaggcaaagaaggagattgttgcgttcgagatggctcgcaacagaggtggtctaggttcgtcttcccgttcattagagaactttgtttggatcatcaactaatcaacatcgatgctttttgcaacagttctgacaaaatctcaaaagacactctttgatcagatcaaggaattcattcgatcccatcctcagccttcatcagcagatcaactcaccctcgtcctccccttcttttcaatctccgatcgacaagtccttcaggacattgccgactctcttcatctttctcttgactgggatccttccgaggttgagctcagtggcgagcctagtgttgtgctttcattccaggatgcagcggacgagggagagtctgagatcgaattggacgcggatgaggaaggcagagaggcaatagagagggtgctcaagaaatgggaggctgctgaggtgatcgatcctgaaggaggacccaactcattcgagaacggaagtgggaaggacgcaaagaaatctaagaagaaggcgaagaaggagcccgaacaacctgatgaggaagaatacgacaagctgttactagaccagatggacgaatggaagctagcttattacagggtccgtctcgtttctgtacttgattgtaaagattacaagctctctaacaggggtttccgttcggtattatcatcgtggctctaggacaagctcgagttctcgctaaaggatgaccaccatcagatcgacgatttagtctacaattatgtggagggtcttcagtgggtcatgtattactattatgccggtgtagctagttggggttggtactacaaatatcactatgcgcctaggatctctggttagtccttcgatgtgtcctatcttacctccttagcctggtaggtcaatcccatgtctaatcttcttgagactttcccatccgggtgatccatttgtctccttagatctcaaaaatgtcgacaagatgtcattcaaattcgattatggaaagcccttcaagcctttcgagcagctcatgggagttttaccgtatgctagtagatctcatcttccagaagcctatagagtatgtatactacctttcttttctcaagcttgacattataaaactatcagaacctcttactcgtttgcttgtttcggtgattcctataataggatttgatgtccgaccccaattcccctatcttagatttttacccaacagagtttgaggctgatatgaacggaaagaaacaagagtgggaggctgtcgtcaaaatccctttcatcgatgagacgaggttgctgaaggccatggcctgtgagtttgttgattggctttgcgtctgcttcgctgcaacctaactctaagatatcgacattaatgacttgattgcttggtttcgttgtttcatcagcccgcgagcaccggcttaccccagatgaggcggctagaaacactcatggatcaagcttcaggttcatccatgacgactcaatcgatgctccctacccttcctccctctccggcttcttcccaatcatcgcccgagcacgatctcgcacagagacattcaccatgcctagcctagacggactggagctcatcgaaggacttttgaaaggagtccagctcggagcttccgcattggctggctttccttccgtcaacacccttcctcagcatgcccaacttgggttccatggtgtcaacgttcacaattcggatagtaagaaccagtcaatggtgatctcgatcgagaatgtctgggaaggacagaagattgaagacgtcgccagaaagatgatcggcaaacggacattcaccggttggccgttccttagggaggggctggttgtagcggtatctgacgagttattcaggtacactttagcctcggttggaggaaagaagaaagtggtttcatccccgcaagatggcgcagcaagaatgtcgtggaagaggaaggcggatggtattgagcaccggtattcaaaacgattcggaattttgacaggagatatcgacgtattattgcatgtcaggcccctaaaaggtgcgtggtttgcgtccatcattccgcattctctttcgtgttgacgtaatcacttctaacacctggatgatgtaaataggtctcaagcggacggaagacggcgcttttgtcaaagagtatcaagacaacgagattgagacggcccttcaactttctgttcctgaggttgagtgtgaagatgagcgatacaccgtgcgtacaattgtataagttgagttttttggtatcatacgcctgactcataccgctttcctcttctcgtctctgtcgtttcttttaggaaaaaccacccgtaagaattcaggatgaattccctcttggagaacgagtatttttcttgggcgagcacttctacggatccccggctcaagtcagccagaccacagacacgaccgtttctctgaagctagcctacttcccctccgagacccgtgatgtggcattgttccgggatgctgtcgctcgtcgtcacagtgggaactattacccgagtcatcacgtatctcgacagcttcgtatcagcggacttgccctgtccagaatcacttccagcttatttgttgtaaattcgcagggtaacaaggccaacttgggattaaatctcaagtttgagggtaaatcaatgaaggttcttggctactctaggaagagtgccaacggatgggaatatagtgatcaagccattaagttgattcaagagtacatggttcgtatgttttactggacgcttatcgtgtcggttgtgaagtatcaggtgttcgatgctaaccactgctcgactatccaaaacgtgatttcataggaggctttcccccaagtttttgccaacttggaaactaggcatgatggtggtacgttcatgaggttacatatatgctcttgcgttcgcctaattcttttcaataaccttcttctaatcatttgtattttctgttataggattcccgaccgcatcgcaatttttccctcgagagagagaacccgatcagcttgtggctgacatcaagaagtggtttgcaaccaagaagataaataacttggagccagtctcattgttggctgaacaaatggagtcggtatgttagattttctgcttctcttttccgtccgtcactacatatgattgacaacaatgtcaattattctttttcctaaaggaaactatcaaagttgtcgagaatttggccgacgagctaaacaagaagcgagtgaacgagcccatcaagcccgctattcttcagggtcttccgagacagtcaattcttaaacctgatcactctaggttcagactacaggaacagaagttcgctcttggagatcgagttgtgatggttgacgtcgctggaacgggtggagtgccgttaggattgaaaggaatcattgtcagtgtgaatacggctacggttgacgttgtctgggattccggtttcctgggtggatccaatttgggccacagatgctccgagttcaaaggatccaacatacccttctatgcctgcctcaacttgacgactccccagttcgtcgtgtccaagaatcctaagccagctgtcgcccctcaagtcccatttgcagttcctcatcacatggcaaggcccaacagcttcttcaagccggctcctcctcgaagcgcaaaggctcctgtgacaattctcggtcgaccaaacaaggaggcagctcgtgtagcccctgatgtgccctacaccaacgtcgctcaagggctaagaccatctcaggtgcctgagacccccatgtcgcacaaacagttcgtcctttcattttcgttccttcagatgacttgcatactaattttccatcttttcttctgctttcatctgtctcgtatcattcaggaacatgcaagctaccttgaactctttctcaggagcttcaagaggtggtcggggtcgaccttcacctcatgtcaatcagtctcatcagggccaacaggacaacgtctcccgaccacctgtggcatcatcatactcgcatgtaccccctccctcggtctcgacaaggccatccgggcaacaagggaacaggggccgaggtggcggaaggggcggaaggggtggaagaggacgaccccactctgaggccgcgcctgctcaagtctaaaggatctctctcagatcgaaaagaagataggaaatggaggaaagaggatgatggcctgaatcgttgcttgaagagtcaagaaaaggtgttgcaatcttttgggttatcggaattgtttgtgttttagacggatatgtacaaatattgttacaactcttgaaaagctaaatgtttaccactcgtttggaagaacataaatctatgaactttctagacctaacattctgataagaaagagctctttggactatctaaaagaaagtcgagtcggaccgatcttgtcttggcctgtaaacttttggactcatcgtaggatgatctctcactttgtaccaaagttttctccattctaacgggtcaccctattggaatgcaacaatcgagactctagtcagctctcacttctcgcaacttgtagagatagaaaaactccttgataacgacttactcgagctcgtttcatgatgatcgacgatccaaccgcgcccgacgtctggtctttcaaagcagtgatcactaacgctccatctaacaactgttttctagagtccctcaatagaaacttgatcctgccgccttcttctgatgtctctcctccgttcatcggtgaattaacatatgtttgtgttggttggagatgaacgattgccggatcctgcgttgtttcaagagagccggaagaagatgatggaggagggttcaagtactggacagtagggtttgaatctggaattgaccgaatgatttcgagtaagatcggaaggatattagaaggtggatacgttgaataacatcttgtcaactctggcacaagaatcttttgaccattaggcgcccattgagagatcatccctattgtttgggtgaactgcccggctggcatcgtagcgggcattcgaatggctggactaccgtcagagtcttcttcgtcgtcgtccattcggacgtcggcgttttgagaggaagggactggtcgactaggaccgctttgttgagatagtgccacactagtgaatgtatcgtgtgtcacagaatagcgtaaaccaattagtattcttttgttttctttatcgttgcctgatagagaacaggatgtttgcaagacaatcagaaagagcgaagaatgagagagcaagaaggcttacccaacaggaacagcaggctctgtgatctccatctcgcctgcgtcagttagacccttgagaagtctctgagcgagctctgcgcgacccatcatctgactcggtctacattagccgaacgacatgacgaaagtcaaggcccaaaaacacaagaaccatctgttagaagagcgattcatgtagatagaagctgaggaagaaccaccgaccgttgttggcaccacggatgaacccaaagttcttgcatggtgatccgtctcttgggatccacagcgagaagcctagagatcaaatctgtagggcatttcggataaaactcacggtcaacccacgtgtcaagagaaagagaagaagtcgtagaagatcaacctttcgcgtctccatgtagggtattccacggctcgaccctccagagctctccggtaagataagcgctgtactctggagaatgacgagtcggttcatcccatggagtgtcttttacatcaaacagagaacaacggataaagtcgatcagggcgagactcaaattgacaaagccgacagaaagatgattaagtgaacggccccgtacttccgcatagaagagtgaagagaacaacgcctgctccccatatatcaacaggctctgctcggtagtttcccggttcgttaagctgtccgattgtatcaaccactcaggtcagtaccgaaacggcaagtgtcttcccagtatcataccaaacaagaaaagttttttgatggacatacctcgggagcaatgtagggcagactgccgcatcttcctgagagcgttcgttcttgtccgttcaggcgaaagactgaacatagtccaaaatcagatatcttgacgtttccttgatcaaaatccaaagagtatatgacaaaatgtcatagtctcgcaagttagtaagatacatagttaaactgttgacgaggaaaccaaagagtgaacggacgtaccgaaactatccagaaggatattctctggtttgagatctcggtgtgcgactcctttcgaatggataaagttctagatagatgaaagaaacgcacgacgatattgaaagaaggatcaggttgtgagatttggtcaattaatggaagctggcaacacaaggagaattatttgatgcgtacaagcccttgaagaacttgataaaagaagaaatgtgcaagattgtcttccactccatagtttggtgcttttcaataatgtcaacttatgttccgttagagatcacgtatgtatcgcgaacaagtctctctacctgggctcattaaaactaaccaattttatcgaatagatctcctccagctgccagctcgagcaagacgaataatcccgggatatatctgtcgttttgctctactagcactgcatccatgaactccaggatattctcatgtttcatcatccgatgaactttgacctccttctcgagttccttcctcgacggtcttggttgaccggggaaatctccagaagatccagaagcaaagatgtttatgactttgcaggcagcagaagtttctgtctttgggttgatagctaggtatactctgtttgtcgtcagcggtccaacaatcgacaattcagccctgaggaaacatgacacttcatctacagaaagatgggctggacatactttgaaaatccacctccaccgatgacctgacggatttggaaccctctgacatccttgaacttgagcgaatacgcttgggatgagtggctagacatatcttcactccgagctgcttaaagaacaagtagaaaagagaaaaaaaagaaaaaagaatgtaagaaactatgagaagagagaaggaggtgacagagggaaaatagttttcggtgtatgtacgtgtagtgatttaatgacagacgcgtcattcattaaaccacgcgtcgacgcgttcgcgttaaccctaacatcgactgctgttctccctacgatgatctagtgtttagtaaagagattctcatgaatgccctccttctcattcgatggtcttaatttttttttctcgtttttccttgacaaagtagacgacatgtgatctggtgatcatgctttcaccatgattctggtagtttttgaggagaatacaatagaatacaagtggtccttccagtcctccacctttgatcgtccatccatctccaccatattcgactgcgggagtcgaatagttttcctgatgggattacatgagtcttctagatatcgagtgctaagattgagtagtttaggattgcacaaaaggagagagacaaatcgcgattagctaaaaagcgagacgaggatgaagatcgataacgagcaagagaaagccaacgagtagaagaagagcgaacctctcttcataagttgccaggtagtaaatgatatactgtttcacccccccaggaaaaaagaaaagaaagaaaaaggaagaaaaggaataaaaaggtggtaaaaagaagaatggataagtataccacagtgagccttttccgaatctaaaccggacaaagcaaggaagagacgacataaagaagagatagagtagaggcactgacctcgtcattggtacaaccttcaaccagccaataccaagcccaacatagaaccccttccagccaccttcccgccacaccattctgacagtctctttccagccaaagagtccgccaggtctcgagactccaccgacctgcatccgtcttctgacgacttcgaacggataactagccgtttgactggcgagacctgctactgctccgcacgtcaggtcgactgatgtccggtacgattcgcggagccaagtaggtacagcagactttagacgaccataggtgagaaaggagatcccagcatagggtaccatgccgaggacggtgatggtgaatcctctatagaacggagcgagcgggtggtagacgaatagtttattcatgccggctgaaaatcgatggccgactgatgcactagggttggcggatgatgaaaggctcccggctgtaagtgtcgatttggggtatggattcgaattgggagtgggatgttcgttatatatcgttcggatgacttttgttaatgaactcggctctagtgatcgcgtctggtaagccattcgaacacggatgagttctagagggtatgtacaaaacacggctgctacacctgtggaagggtttgatatcatatcgaagaataaaacatttttaggagagagaagaaaaactaagacgattgaacacgatgaatgagcaacaaaccagaagtggcgcctgctgcgaataaaagtgcgctcgtttcttgcgcttttgtgggcatgagaaactattagtgatgagagaggatcgagaagaggaaaaaacgaggtcggttagcctgttaggcgtctttcacggatgcgttaagcgaacgtgtaaactgacatgatgaacccggtcatacaacataaacttgacgcctgcataaggaaaaactctgagtaatgtggcaaggtgaccctgaagaagacccctgactccgtgccctcgatagatatcttgtattgaaagaccgagccctctgaaagagcctatgtccgccaagaaagttggataggtgagtaattgactaggcgcgaaaagagacagagacatctgagcaagtgataagtacccttatatttctcgaaatcctggtttgacgtttgaaagagaatcttcacccgatcaagaggagcaatggcggttttagcctgtacgtcagaagaagcagatcaaaaggttgatcaatgagcgtatgaagcgaaagatggtggaatggacctttgcgaggctgtatactcgaacggtggtgcaaataccaaaggagacacactcactacacatcctgcaattccaccagcaattccgcttctaacggctgaggttataaagagttggagagaaagtcaaatagttcgttcaaaacaactgatttggtagaaagaagaggcgaggaggaatactgagcgaatgagcacagataggatgaacccaccaaaatcccagctgtttttatctgcttttgcgcgtgaatgggatcgttgtagccaagtgagggatacttcgtctggaattccaaccggagggctcatctagcggaaggagtgggaggaaggggatgggacaagaagagagagaggaaggaagagaaagaagaacgttgagtatagacaagatagagtcgacagtgcggcaaagacgatgaaaatgagcgaaggatttcgattagacggaatcggccgggagcgggtaagcgaggaaggctcgtgcgtggcgaggtcacgtgtgttgttgcgtttgacacgtaaccatgatctggccgacaccccaaaagcagtccaaacgaggcccaaggcttgtggttgatgatgtcagaacctctgagattagattagattggcatcgaacaaatcattcgtcagctcatcgaactctatcgatggacgattcggatgacatcatttggccagagcctacacaaagggaagcgtcgacggatggcgcgtccagcctgcggacccacaggagggaccgatgggacgagatgggtgcgggagagatccaggcagcgcaggcacgaaagcaggcatagtcagaggcacgagcacagccagggcgcccagaaacaggcaccgagagcggtgagatcatcaggaacagaaaaagatgtcatgcgatccggcagccgtcgacaccgggaggcctgtgcgtgtgatgcaatcgcctggtcggattctaaactacaccagtctattctcgtctggaaggaaaaaaaaagatacttaaaccaagcctccatctcgtttgccatctcgctcttgctttctttcccccaccttctctgcacactcttgtatccacaaagcagctcatcacatattccatatccatacctccaacctatcgttttttgtttgaaccatgtcctctaccaactagtttgttacatttgtgttcttctagtcctcgctcatctgaaagctatgactgacactcctttctacttgccatctcacaaccacatagcaccactactcccgggcccgacagacctattgaaacctcggactctactaagacgtcgtccggaggggagactaactacggtgatcgaaacgtctatggatctgccggtcaaggtatccaacatcagcctcacaactctggacttggccagggtgctgggtactccaccggatctactgccggctactctactggttccactaccggatactctaccggatccaccgtcggatctacgactggccaccacacccacgaacaccacgcaactggcgttcctcgtgaggctaacacctctttgactggcggcgtctctgaccagcacactcaccactaccacgctggatctgctggtaccggtctgggagctggtgccgccgcgggatcccttggtagtggcgttgggtctgacacttaccgaagtgaacagaagcatgttccctaccaaaacgctaccggacacggcactgagggagcccagtatgcttctggccaagctaccggtccagagatcacggctggacatgctcacgtacgttcaacggccagctttgcaacaagctctcagatagcttagcttaaatggtttccttttgtcattgctttttagactggctccgaggcgcccgagagaaccgcctatgggcgaggatctggattgcccctggccgagagtggagccggaaaggacaacagtaagcgttgtttagagacgcgtgcagtgttgtatcgggaacgtagctcatttgttcatctttcttcacctactcagccggcgcgggctacggccaccgggtgaacgacgccatccacgacgacaactcgatcgacaggcgaacccagaacacgaacgacttgatcgacagcaagaccaagagtgttccttctatgaacactcatgacaatgtgaccggatctgggacctccagcgccggacctaccggagcgactggtacaaccggagccgtcgctggtgctcaccatggagaggccggtggacttcacaagacttcagcgaccgacaccactgaccacaagcccagtacgtgaaaccaagactcgttccaagaacacttcaatctgcgtactaaacatcagttctcttttgacccacagccttgatggagaagatcaagaacatcatttaagtatctacctatatgcttagttgcctgtctttcccgctgcctctactattactgcttgtagccctattcatctgtacacgaatgttatgaaacacaagatcccttatatacatgtattttcgaggttcattgaagctaagttgtggtcattgcaaaaccttgagatgcaggtagatgaatgatcagatctcagggagtgcagacaatgaggactgcataacagccggctgcttgacgcgagctgggcggcagatggagaagacatcttaactaccaccattgccatcatcacctcttcaaccgggacaccgacatattaatccaacccagcccaacctaggtctttcaactcatcgctcacaatccagatctcgaaggaaattcatcgttccctgtagtgtctgtgacacacacacacacacaacctgactatgctttctatcccggcagatacatatatccacaatctagcaacattcatccagtcaaactccacccgtctagccgcttcgtcctcatcttcccgtcgtccaccttcttcatcttcattttttccgtcactttcattctcttcaactaagccactcgtactccgtatcacccctcagaacctgttctatgtgctacttcgttttcaagccatcggattggatgttggagaactcgatcagctactagaggccggcgttcgagatgctgttgtctttggcgaaacatcgttcaaaccatcgggtcgagacggcaacagaaacggtaaaggctcaggtgatgcgaatagaaagggagggaaaggatcatcggactggatggaaaccggcagcttcatgagcgctgtcagcgccgtgagtacgctaagcctgggaggttggtggagtgttggaaaagttcgggatccaggtacgtttctctccttcttgtctctccttcaaatctacttcttctttgtttcgattttgtgtctctttgttgagagaacataaaatcgaaggaagctacgacaatatgaatcgtcctgaagttcttggtcggagtctttcgatgatgaaccatccatcaactcaaggtgaacaagaagacggagctgaccaacgtgtttgagatcgatttgcgcattgggcatccaaatacagacaccgacttgaagctcatctactcggctttcacaaagttgccctctttggttgtctattcatctggttgggaggacgatgtgattgaggagatggcaggaagcgggccgttggacacggcagttcctttgaaagtattcaagaacctacaatcgtgcgtccgctcggtcttgttttatcgtcattctcgttcagtattttctccaggataacatgtttctctcggaaatctatttgcttcatccggctgtcgaatgatcttcatgtgatacagattggagattcactctataccaccctcgatcttgctcatacctccttcacccatccttcgatcacttactgttaaatccctcaattcatcctccatggatgacgaggggctgtggatcttgcctcttctgtttgggcccgaacaagaaggaggcacttcgcactctaggaaaaggatagatcaagatgtggttttggaggaagaagaggatgaagctgaaggcgaaggacacgcggagggaagcagcaaggtcggcgccatcgaaccaacagcatcgtcttccgcaaaatccagccctcttaaattcccatatctctcccatcttggactttcttcaacaaacctactcacgttccccactcttccggccgacctgccatcgatcgtctctctagatttatcctcaaatcttctgatagaggtccctgcgtcgttgaaaggattgacaaggttgacgagtctcaatctaggaggaaatatgatcgactcgcttcgcggaattgacaaaattctacctggctcttcccaaatacctaaatcgagcgtatcatacgctggcaggccgcgcccttctcttcattctcaccactcgtactctggactgagagtgatcagtctagataacaatcggcttgccaaccttcacggcctatccctcatcctgactcttgaacggatatctctccgtggcaaccaactcactgagtctcttgagctcactcggctcgtcacccttcctgtgctcaaagatttatacgtgctcccacagccattcttaagtaatccggcggaggacgattggaaagttggggtgtgggaagcattcatcaaggagggtagaggtgaggacgacatcatgttggacggtgttgggtgcgggtgggtcgaaaagaaaaagatgagggcttcggtagggacggtcgtttcgacgaataacaggcgggtgtcagcgccggtcgttgttggtgatggtggtgagaccggatattcactgaaccctgaggttcttaacgtcagtagcacagaagggctacgaaaccaaaagtctctgaacgatctgaaaccatctaatcccaagactgtatcctcagcgcctcccacaccccgttcatcggctcgaccgaatcatcataccggaacgatccgaaactcatcatcctttcctgcaagacgggatgctctggcttcgatgtctcgttcgaatgcgcacgcgcacgcacattcgatcgcccggacgaagagacgacgtcaaagaatcgtcaatttatccggtgaacccgaatctggtgtcggaacaggtttagaaagaatcataggggacgatagcgagaactcgacagggacagaccaaattaagagtgaggacgaactccggcaaggtggaaaaggagggagaggtcgatctaaaactggtgatccttcgtcaacctcggctggctcttcatctatatcagctcttcatgcttcattatcttcaccttcatctccttatcggtcgtctcaacctacccgccagccaggtatctcgaccacaatcgacgcatccccacgtcgtcacactcattcaccaccacaaccgactcagctgaacactggttctttagccgagttggagtcaggcgaggctttcaggaagaagctcgaagcgatgcgatccgaagtaggggatagctggctgagagttttgacagcaggagttgggcccaaaggttccgccagctcaagtgacggtggaagtggaagcggaggcggaggtagaagtccgagcggagagaaatacacacgggttgatgaacttcctactgctcctgcagttatacccgctgctgctgctgctactagtagtgctgaaatcgcgccttcctctttggaagaaattctggaaagccctgcgcgtagagagcaaaaagaagaaacaagaactccgactgatttaattccggtggaagaagaagaggaggagacgaaggaggaggacaacaagaaggctgatgaggatgaggtcgtcgtgaagagggttgtcaagaagaagaaaaagaaaaaggggaaagtgacgtgaacgacggtgggagattgtccttcgacggagaaagaatagcactgttgatcatgaggttcgatgccatgaagatcgtctttctcatcagttcctgtgaatctgacggtgtatcgttctttttgcgcgaaaagtgagatcaaatagttataaatcttccatcaacaaaatggatagcacaagataaagcataagatcaagatacaatggcattaagtcgaagaatcatctggctctcggaacttcaagattttcatctaatacggcataagcctttctctctccttttgagcttcgatcaaccgtctctcatcctctccaatctcatatctctgctctcgttgaccactacctatccgagcgtgtttatactctctttcctctctctcccagtgcatttcttcacttccaaaccgttcttcgacacgcggtagaggcccctcctccatcttcacatcatcctcgtttcctccatcactatcactactctgatcatgttggaaatccgaaggaacgaggaaaggctcgataggtattcgaagccggattttacgagaatgaagaagatcgtacgtttcttcgagttctcttgtcgtaaaatgggatcgaaggggaccgaagggtaaaatgtaaagttctgttatatcggtttgttcggagaatgcaacaaagtagagtagaacaccgtttctgatgatcagttttgtgaacaattcaagacacaggaagaaacatgagaaataagacaaacctttcgaccaaggacaggcgttgattgctctaaagaacaatgccttccccctagatccttgtccaaggagaatttcatgattgattgcgagcctccatagagtgacagatgaatttatcctgttaactcaaagcagaaggaaaccaaagacgatataagtcatcaaccaacgagcacagagtgaagtgggagtgaagatgaggacaggaaagagagaagcgcgtacccaggcttgtcgaacgctctttcaaacaatcgtctcacagcatgctcattatgccttcctttagtcatcgacagttccaaccagatggcgaacaaccacccatttacatcccctcctccatcttcgacacgtccactcaaaacagtagtttccaacatctttctagctcgattataaaacttgagcctcatctcggttagagcataaaggcttaggaaagaagtattatgtgggaatatggtgatcgcccgttcgaggacggatcgaattagagctgggcgatagggagagggagtcagtgtgtgtttgtatagtagatcggtataaagctattatgtccagaaatcggagagatatcagccctgtgtcggttgaaaaggtccaggatgcaatagaaagacagaaaagaactgaccaagtagatctcttccttctccaaagcagacatcatgagggaggaatccagatgtcgttcaaaaacatctgctgcggcttccaaacctatggtcaagtactcgaaaagcgcggagaggaagatcagatgggtcgtgttttgggtaagtgatgtaggtgcctctggggacaaggatgatgagatcactccgctaaaaaactgtagagagaggggttgaagaggtcaggtgagttctttatcaatcagagccaagagagacaaagaaagaaatctctacttgacgggtcttgaggatctcgatagaagtcaagtcaagagcagcagtaggtggtgtagacaaccgttctgatggttcgatgccatcataagaatatcatatgtacgtttagaaatatattgcacgattatgttcatgaagaagagggatggaacagacctaaagatatagcattggtagctgaagcaatcacctcaatcaatctcttccctcccacaccccactcccattccaactccgcccatcctctccatagaacccaactctgccctcttcccgctttgtggagattaaccacttctttggacatcatcgacaaagctgtcaggtagacttttcgagattcatcaggtttagaccgttgacgttctaggcgggcatacccgtcccatagtggtagggaatctcggttctcggccaagattggtttcgccaatttgatcgctctgaatggttgttattcgaattgaagtgtagagcgcatcagatgttatgagatataggtttgagtgtttataagtaaacttacgatttgacgttgtgagcagcttcaaatgagaatgcatatagagaaaagatcggatcgggattcaatgttcgaacttggaataggatattactaaaaacgcacgatcacaaagaggatcgagtcaacaaaaaagcctagtgatagggaaggcactatcaacaacggtcgggaataagattcagacgaacctgatgagcgtcctttggctgctattaaactcggccttttcaaagatcggaaaaccgccttgtccgctttctcttctgaacagatcagccactccaactggtctgactttaaccggacacccccaaggggactttactccaccttcgacttccaactcgactccaccatcgcccaacagttttctctttttcgtctctttatcgactgtcagatgctccggccagaacctcgacgaccctgccttgcctgttgtactagcagccaagaaaggatccgagaagaacgcagccgaggtagacgcgtcgggtggtgtaaatggtagatctaggtatgcaaataacgcatagattagatccacttgcctatcaaccgaacaagcctctcggtagataggtacaagaaacgatcgaatgtcttggaacaacaccggcttgaaagggtcagcttcgtccgttgtgtcttgcgtgatttgccacggtgggtcttcgagtcgggcggagatataagaggatgaagacgcgagattttcagcagtagaccatcggatgaaagagtcctgtgaggagtcgaatgccggaagaggagaaggtggacttggtgacggaggaggaaggggaggggaagagggcgtatgagcccacccaacagacgaggattcgccaaagcggggtgcttcagaatcccaaaaggtagccaaagcatctaacttttgttggaaagtctgagtttgaaggtgagatggcgtgaaaaaggtgctatagttcgaagaacaacctccgcaagatgattagaatgcgggagagaagaacaccaaaacaagtgacggaaacacaagggtgaaacgtacagctccatctgcgcttgaaaaactgcagtagcttgttcgatatatcctattaagcaataagataaacaacatcaagatgttcaatagttgacaaatgtaagagaaacaaaaagagcatatgacataccagcctccttcatagctaaacagcctctaagaacgagatagaccatgattccttctaagtcttccttctcattgaaccctttactttgagtactttctcttcgatgagttttctcccaagcgattctaaccctcctcagtccttcctccgcccaaccgccacctagatcctcctcttctcctcgtcctcccaaacctctcatccgccaatcaccccatcttctccagacttcgaccctccttgccaaaggcccttccagtattctgtcccacctattatctactctacgagcgctttcgacctcttcggcagcctccatcaaagctagtgtgaagccgaggtcgtctcccaagacaggatattgatcaagagcttttgtcaaatgggagaggatgacagtctgtctagagtggtgggtggtagttgattgaatcggaagggaaggatcaagtttgttcttatcggctagtgcggctgatgacgaagacagaaatgaggaagatggaggcgttatctctgcttcggacgagaatctggcgaattcgagccagagggaagggaccagtggagtttctttcagccttttggcgaatgagatgttcttctctctataaagagcctcccgggacgacattgatggatcggattcactgtcttcatcttcgtcaccagagggctggtcatcagatcgcgcgtcgtccagttttccgaacactccatgttggagggcgtcttcaacgttttctttctgatcgttttctgactcatcctcggagcttgtccttgaatcctctgcactaggagaaagaatagatctataatgctttgacgaatcgtcttgatttttctccttcggcgcggaccgtttggagggtttttttgagaacggtaggtaggctgggagctgggttggaatggattgattggtgtccgttgacggcttgactatcaggtgggagggaagagaaaggagtgatctcgctgtcttgtcagagtatctcatcgactgaatgaattgaagaaaagttggtcaggttgacgaccaaaggcaagagcacgccatcagttggagatcaagatgtcaaagtcataccaatctgtttgctcctcctcgatgccactcgacctctattcgattggttccattccgagcagacgattgggtgatcttgaacccttttggaaacccaacgatctctccagctgaagacataaagaatagtgcatatagttagtctgatttcagtctgcgcatcatacgacgagaaaagacaaaagggagaatagagagtacaaaccaccagatcgtctataccgggctagtttgttctggtccatcgatccatactgaatgtttcctctatcgcccctcctgtctatgtagaatggctcgttgtccgagtgagctgggcgcgaggaagataaagacaggacgtctgatttctgtttgtctcttgttgttttggagaaggaggataacgccgaagtatcatggtactttgaactcgacgatgttgaagcgatgatatgacggtgttcagaagtcgatcctagaggtgatcctgaccgacgacgatccctgtgtgatctgcgttccttcacctctcgttcatcctctcttcgcccatccctctttctgtctctcttatgatccctacgcctgctgtcctcatgatgtttgcgagagcgcgaatgctggtcggaacgttcggatctatctccactgatagatctgtcccgtttacgatctcgttcagacttgtctttccgatccctggatgaaatctctctgaatggagaacctcggtcagacgcgtaccgggaggagccggcaggctgacttgtttgacgtgatacggaaggctgtaggaaatccaagtctgggaacgactcaaacgacggtggagggttagccatgaccaaggctgaatagatgagctatgtgtatctgctctcttggatggaggtctctataaaatgatgtagagtaccgagaagaaagcgaggtgatctcatcgatggttacaccaggttactttcgagttgtcagggatgtgacctgagtgtcacaccccggtaaccttcttttggttctgttgtttctcctgcctcggtattccttatgctctctcattatatcaaaatgcaggtatatgaccttccagcgcaggtgattctaacaccttctatgatctgttctattatgcataatcattggagtctaaggatgatatataagacgggtccccctttgccacccatagcatagtctaccaaacctgaatcctttgtcattcctttgttcccgagtaatctggttccattgttgtatcaaccttattcatacgatttccctgccttgcgctctcgtcacagtcaccaagctagagagcctgaacttccttcttgccagccctattccctgcctggttacattcttgcaacctccccgttaccctctgaacccggatcctgacacgagttgtgatacatcacgtgacttgagccatcagatctactggcgatcatttaagttttcatcaaggagatccttcactttctatccgaattcgcgcgcgcttgtttgcttttgattagactcggtgttcgtttttggcattcgagggccaagactgcttcggcatcctatggtcacgagatgtagagggtgtgtatgagtgtgcgtatgggtgtgtatcacttttcaatgagtatatgggagagtgtagatgggcgtgtatatgatatacgcgcttgtatgaatcgaacgagcaaaagaagcaagagacaggacgaagagtacaacacccagtaagtcgatactctggcaaagacacaattctactggcatctttttttgtctttccttcgcctaaaccatcaattttttattttattttatttgcaatttcttctgctctgatgattttcttccctctagactccttttctcagcgcttccttttccgttccttataatgcagttcccaacgcgtttaagagcgactctgcttgaccgtcggtgctttccttctctccttttcttttcggttccctctttctttcctaacatcacccacgtatacacatagtcacccatacctacattatctagtcaccatcaaatacacacatatacgcatacatacccaaatttagttttcaaccagatatggaaaaggcaacattcaaagacttccctctggttatcgagactcctatcgtatacaccaccaacagcgacgacggctcggtcccgcctacacctttgaagaccgcaaagggggatacagaaaaaaacactgcatacatgcgcactcacgacgtcttcgaagtcagtgaatctggacccgatttccggtaagtcacctgtcaaaagcccagacgattcaaacacgtctcatcctgtgtcgtgttccctcttgtttctgttccgcctcccacagtggcgtgaattggtttggggctgtcgttcttctcaccaagcaacagataggacttggtgtactttcgttgctaaaagtgttgaatacattgtaagtgttgcgcgtactagtatcatattgagtgtagcgctaaatcaacacgattgctgttttcatttctcctactctaggggcatggttgtgagtttgtttacgtatttgtttatgtccatagttcttcagcctattggaatggttactaaccggatccattctccccttcgctctcttgacacacattcctctctgtctagcctggcatgattcttattctctttatcgccgctgtagctacctacggaagtgttgtcatcggaaagtttgctcaaactcatcctggtgttcacacgtatgttcattcctcatgtttgctacggaaaggcacaacaaagctcatcttatttttggttcctcctgtcccttatagcatgggagatgttggtttcatcatcgccggagtcgctggccgtgagctttttggttggggtttctggcttcttgagttcgtctctattattatattcccgcgcgcaagatcagtactcgagactgcttctcacctctctttcgccgctctgctcgccttaatagatgtttctgcgctgcttccggtatcctcgccacctctatcgccctcaacaccgtcagtgaccacggaacatgcaccatcgttttcgtcgttgtcgccgccatcgccattgctctgggagccagcccgaggacgttcaaacagatctcttggtttggatacatcggagtttgctctcttttgcctgccatcttcatcgccaccatttctatcggtgtgtctgatcgaccgccgaatgcccctgccggtccttacgacaagcgactccgggctttcggagactgcaccttggtcgaaggccttggagcgattgtcaacatcctctttgcctacgctggttccgctggtttccttcccgtcatctccgagatgcgaaaccccaaaggttacacctccgccgtgctcacctgccaggcgttctctaccgcgctctacgtctccatcgcctgcgtgttatggtactactgtggacaatacattgcttctcccgcccttggttcagctggtcctctcatcaagaagatcgcttacggtattgccatccctgggttgctcgccggacccatcatctacgctcgtaagtaagctgtctgctctgtggaactaggcaaagcatgtgagaactaattttgtgctgatttcctgccctactcacctattaacacagacctttccacaaagttctgcttcgttcgaatccttagaggcacccgacatctccaggagcctactgctgtccattggtttacctggcttgggttggtgacctccatcgtcattttctgctttgtcatcgctgaggttgttccgttctttgacgaactcatcggcctcgtcggtgccgtcttctcctccatgttcaccatccttgtcccgggactgatgtggctgtacgataaccgcgacgagaagcaaaacggagcccgaactctcaagaacaagcttttatacttgaacgccgttatgatgatgatcgccggggtctcccttctcgttctcggactctatgcctcggttgagaacatcaagagcgcctttgctgagggttccatcggaagtcccttctcctgcgccgacaacagtgtaaccaccacgtcttacaccaatgacacttctacatagaatcatatagagaaataaaacgcctcgtagagtgcaactccgagggtacacataatctttctatcagtttcttttatcattccctctcgttttcttctttacaagtcttcttcctgtttcatcttcggtttttctttctttcccagccttctcttagacctttccttccgtcttcttgctctgcgtacaggaaggataggggggaaggcagaattttctgttaaagtcttcacgataacttgttcccttttatcccctgatatctccacgtgttctgtctgattgcatcgtttgtatcatcactgtattcatcaactttgccgtttatcttgaaagtttgtctgtcttttcgacgtatacgggtggtagatgaagcagtgacatagagggctaggtaaagccggaaaatgtatacagatcacttgtgccttccttggctagctggttacgtcatcaaattagtgccgtaatcaagcttgtctttctcttggcattcttcttccggcctctctcatccttggcccgaagaagcaggttctcaagcttagatggaccctaagggagagtctcgagatacaaccacgccctcgatgagataatctccatcgtcatccttgttcaacaaagacggaaacgatagtatgctaaacaggaaggagaagaaagatgggcagcagaacacataccggaggaaggccagaacgaactcaatgggaagcaatgtcaccgatggggttcttgttgactgaaacttctctttttctgccaagccaacgaaagcgtcagcgcaagtgccgagcgtggtgacagagagacgcatacagccataacccagaccgcatatagccataaccaaacgtaaggcgcttctttccctttgcgtcggcctttgtctgaactcggctgttcttgtctcgtttgacggactctcgtttggatatcgatcatcatcggttgaggttacattctagttgccaaggccatgctagatgttctttatatatcaacccatcgagcccaatctctcttttatcttcttccatcatcctcatcttgctcttcttgaaaagtgtctgccagccagctctcgtttctcccatccctctctctttcccaagcttttcttccagagtatctgtgatatctcgcctttctacttgctttgatagcagagaaaaagaaaagaaccctgtctcgttatatcgtccacaaagaacaaaacaaaaaccacactttccaaacacacactccaaacctctcgcctgaattagcactttcgcaaacactgcaatgcatcttgccaacgtccttcttacccttcttcccgtgtcattattggctacagaatccttggctggttctagttcccactcggcacacgcgcttcccgccagacgtcgtcacaacaaaggcagagcgctttcccccatcaaggcttcaaattcttcctccgagcacgagacgaaccgaatcgctagcgctggcgctagtgcagatgacttttcaccagtcaccggtagacgggtcagtaaacgggctcagtgcggagtctcttcaccggcgacatcatccaaaacatcatctaccatcactgtcgaagcagccgttgtcccaactgcagccgcgacctccagctcgaaatggaagcttgatctcgaagcaaaaggaaattccttcttcgacaccttcaacttctgggcctatgacgaccccacacatgggaccgtcacttatgtcagtcaagatgaggctacaaagtccaacctagccacggtcaacggaaaaggaaatgctggtatgtcttttgaaagccttcgcctgtgcgctctgtcctcgcagtttactaatctcggcatctcgggcactttgcatagtcttggcggtcgacaccactcagaatgtccagaaaggccgaaaggctgttcgacttcattcgtcttacatcttcaacggaggactcatccttgccgatatcgttcacatgcccaccggttgtggaacatggcctgcttggtggtccaacggacctgactggcccaacaaaggtgagatcgacatcctcgagggtacccatagttgggacagaaatcaggtttctgttcacactagtgatggatgtacgatcccttccaactacggagcctcggccgtgttgacgaccggaagctttgtgaacaccaattgcgccagttacgcaacgagcaaccaagggtgtggccaacgagagtcagccagccaccaggcttacggcgagccgttcaatcagaacggcggcggtgtgtacgccatgaagtgggatacatccgggatctctgtctacttcttccctagaaacgccatcccggccgatatcacccagggtgtgcccttgccggaaacttggggaactcctatgggtaacttcccatcgacgtcttgcgaaccattcaagttcttcaaagatcaccacaccatcatcaacaccacgttctgtggagactgggccaattcagattggtggacggctgggtcggccggaaacggtcaatcttgcgccgcaaagactggatacaactcatgctcggattacgtcctcaacaatggagacaagtttcacgaagcatattgggagtttgcgtctgtcaagtattatcagccgaaatagagggttaattgtgttctgtaccggcttgtatgatgttctttcttccatcggaaaagagagacaaaggatcactcccaaggccgaggaagctggctcttcctcgacctttcatgcttctttgtaccttggtcgatcatctattgaatcttttcttcaattatctagatatatatatgtgtgtatgtgttttacgtgtatcatacttacaagacttggcaaaattgagatagcgagtcagactgaagaagagaaaagtttagcaagtcaagcatcctagtatatgttgagcttagcctatacacatcagaggctgaaaacgatcgcaagaccgttggctagttcgactactttgatgatctctttgtatacctaacaccgggaacctggatgaatactgatgatgttaacttactgtggcccggttgaacacatcttctttgcatctgtctcttcgtctgtctgttgctttctttttgtctctttgtcacctcgtgtctttgtctgtggactgtacgaccttcactaagtcgttcatcataaccgacggcaagtcgaatcgatcaagggaggtttcttgcaaacaaggagacatcaatctcaacgactgacaagacacaaaggaagtcgggggtgatctaaatactcatcagcgacgctgatgtttgtcactgctacttctgctactcttgccactgaagctgcgccatcaaagaggacaaactagactcacgaatcatgtaattttaacggctttcggtctgagcacattcaagttcaaaggggccatgtatcgactaccatcggttgaggtgactctcaccaaacctaaggctcacaatcctttttcgtatggtcgacaaagtgatgcgagaagattaaccaatcgatcaagctttatgagtactgtaatcatagaatcccttcccagactctacataaaagaggaaggttaccatcaaccaaccgaactcccaaattttcacagcagaaaagaagagaaaaagataagacatactctttccgtaccaaccggcatctaccatcctgctcaataggatggaaggtctatacttgctatcacccgtttcggtgtacattgtcttttggatagccagacaggtatctagacctatgaaatctgctagtgtctgtttgtgtatgtattccatcattgtcataatgatcagctcttgttcagctctataaaatcggtctcgtaattctctcggatcgcctgactggaaacgaggacacaaagatactcacaaggggacccatcttgtgacccattcccaggataaaggtcttgtcgatatcctctttcgtggccacaccctggtcaaacatacatacatgtcaaagattcgccatagcaaacggtaagaaaagagctttaaaaacaaagaaacaaaagaagaggctcagctctttcagaagtcactcaccctttcaagggtcatgatggcttcgttgagaaaagggatcaacaccctgtgaagcaggatgacagatcaaaaagagcgtcaaggttgaatgtcaaaaacgcaaatgcttggagaaggccactctggtaagatacgcacgcattgccgacgactgattaaactccaagaaggtgagcttcaaattgggctgtttcatgcaagactcgatctttggtgcttacatccaggaacatcttttgataccgtcacctctgcagaaaccaaagagaacataaacctggccaatcagatacgaaacgttttccgtctagctctagaaaaagatgaactttgtgagagaacgagaaacatatcaagacttacctttgccacaagcctcggcaaactgtctggagatttggacgacctgttcgcttgtctgtagagccggaattagctcaacaagcggcatgaccggtaccggattgaaccaatggatacctgtatcgcgccgtaagagatatcaacaaggaagcatatgattcctgaccacaaagcagaactagccagaaatacaaaccgacgactcgctccgggttgcttgccatcgatgcaatcttagaaatactgatggaagacgtgttggtcgccaaaatcgtctcttttggtagtatcgaagaaagcgacgcaaatatctcggatttcaatttcagagactccggtgcagcctacgaaataaaactagtcagatttaccagagacctgttcaagttggatagattgaaggtgacgtcgtacctccatcaccaagcctacatcatcaaacgacttcatgttatcgattactgagatcctggctctcgcttgagttgccaactcattcgtaagccgacctttgttcacatccttttctaatagactatcaatgaacttgaggcctgacgttacatgcgcatagatgttgggtcgaaatcaaggtttaatggacagagaacgattagaagaaaacttaaggacaaccgatctttgactcgagatatgcgtacctttttgcagctgaggggaagatgggtcatatagagtcacatccgctttggctttcaaagcagagaccaacgcgatgccctagatggttgaatagtacaagtcagcaacagctgaaccatgggcaagactctttcctgtcgggcagacacctaaaagaacttcaacggaccatgcccatctgaccacctcctacgattcctactctacggattatggaagtcattctgtcctgctttcgaagtatctatatcgactcttgtgcgtcttgagctgtgttgaacacgagaaatgttggcaatggcaacgatggtggttgagtagatgtatgtatgttgtgtagacaatgttcgctacttgctcgttcccgggtataacgcagaagccgaaagccgagtaaccatgctttgcatattaagatcttatatctcaatccgacaactaccgttcttcactttttcacacagctcacaagaagataaacagaaccattagatacagcattcctccatggtcttgaccatcgattctagcttgctagcctcaaacaacatcattcctccgcgttggtcaagaccaaactctaacggatcatcctgctttcggtttgcagcgttgtcaaatgggtatgtcacagatgcaagcgcatgctgttcatttcgtgtttgaatagattgtcagaacatttggacgaaggtcatcagaacggacaaacggaggcagtgaaattgatcagccattatacagggcgcgtatgtcaagaagtcggaaatgaaacatacacgcagtataaagctatcttcaggatggaacggcagcaaaccggcctgactaagaccggccaactcatcgacatccatgtcgtctgcatctcttgaagcagcgctctttccgttctttttcttcttcttcgatcccttcgggttggacgagatagaaggcgcgacatagagttttgagagcaggaggaggtgagtaaatttgtacggtttgccctagaataatgacacagtgatgagtcaaccagaaggtctattcagtaaattggccgagaaatccgaatagcaacagaaatgcaaggagcgtacctgtgaaacagcttgctgcatctcttctccgagcattcgatacataggtgcttgagtctgcacaggcatgttcaggagccgttcggaaacaaccagtccgacttgtgggccggaggtgattgagccagaaggaatagatgacagaatggaatgcaggtccgagttggatttggattttttgataaagtattgtagtagcggtttcaacgtgggtgagtcctaatagtatggagatgacaatagagacggcgggagggcgggcgcaacgatgtttaacattcaggtgtccatcaaaggcttccaagattatatgacttgaaagatctcctcgtctatgacatagtagctcaccttgtgaagattgagattgagaaccgcgatgatactgtacgggtcgctctcctctccatcgaccttgatacaactaccaacaccgtcagccttggagctatcaagcactagctcagccaccgggtgaagatcgaacagatcggcatcggaatacagaagctgacggagaagacgtttgagagcaatcaaatcgacatccggtgaaggagcaaaaaagtcaaagtctacgttgatgagggaaggagtcgaatcgtcggattcgtttccggaagatgcaccggagtcgtccgaaagctcggttgacgcgttggcattagattttctttttgccatattgaagtagatatcgaattagcactgatcgtccgcgaatactaggctgaagagagaacgtgagacgaaacacagccagatgctatgaagtaatctgatggtcgacaccaacgaaacgaaagagcaagagaacaaagttgttcaaaaaatgtttctatgctgactaatcaagaagtgactctttttttcccgttcgccttgttttatctattccataccattctcgtccatcatcaccatcattgccatcggtctcgttcagctgtagctctctttccaatctatcttacttcatctgtcggtcaaggatactgtcacagctcgcttctgtcattggcttcaaaaatgagaaatccgctgcatatcgggtcttcgacctctctcaccatagttatcaaactcggcacatcctctatcgtcgacgcagagactcaccaaccgctgctgtctctactttcgagcatcgtggagaccatttgcaaacttcgagcactaggtcacagagttgtcttggtgagtcttttttttacattcgagccatatacccgtcgagattggaacaacaggaaaccaatcgaatcctacagagacattgagaacgattttcatacagtcaccagattgacaatttcatcctaatctcattcaggtcagctccggagctattggtgtagggctcaaaaggatgggcatgaaagagagagggaaaagtctgagcaccaagcaggtgtgttcttccccaaccttctttagttgtccctcgttgcgttgttcaaccatattccctctcattttggctttctaggctctcgccgctatcggccaaggccggttgatcgccctctacgataatcttttctctcagcttgaacaacctattgctcaggtcctcctcacaagaggagacatttctgacgtgagttcttggtctcatatatataaacgtctgataggaagatccgcgccgatacgaaaacagatagagtacttacctatcttcaattcacgctcggaaagcgtactcgatatctcaatgcagtcaatactttcaccgagctcttatcaatgggcgttgttccaattgtgaacgagaatgatactgtatctgtctcggtacgtatgctattgtctgattatgtctgttcgatcaaagtaatctgatttctcgtctcgggtggcttcttgcaaacttgaaggaaattagatttggtgacaacgacaccctttcagccattgctagtaacatggtatgctacttctgagtcctccgtttccgatcttcgcgaaaaactttttgtcatcttcccctctatctcaatcttacgataatcttacacgcttgataggtccacgccgactatctgttcctaatgaccgatgtagattgcctgtacaccgacaaccctaggaaaaacccggatgcaaagcctgtccgagtagtcgatgacattgagtctatccgacagaaaggtcagtattcttgttcacgataggctgaaacgtgcatgcgcgcatagattttgatcaaacctatccttaacagtcagcacagccacgctaggaacatctttgggtacgggtgggatggaaaccaagctgattgccgcagagctagcgatgggcgcaggagtgacgactgttatcctaaactcccaaaagatctcgtccatcttcccgattatcgctgccgcagatactgcggtgatcgatgagaacaccttgccacaacacactaggtttttgaggaaagatcagcctctgggagagtcagttgttcatgttgcggtactttctgttgttttcttctagctagactaatttcagcctctgtgtatcttatcagccgcaaatggtggatccttcacggcttgcacacctctggagagatcgtcatcgacgaaggagcttaccgagcgctcactaggaagcattccgggggtcgacttctcgctgccggtgttgttcaagtgaaaggcgtctttgcatcacaacaagctgtcaagatcgttgttcgactttctcgctcgtctctgtcgtcgtatcatcctgagcctgatagcaacaacaatactcaaccttcttcccgttcacatacaccctcttcttcgcaccggaatccccttgcgagcggtctcacccacggatcggattctatttctgcctctacatcgaattcgacagtaaactcccctgaagtggctcccatcaccccaagcttactcccgtcgatgtctttgagttcatctatcgcctcgttggatcctctttctacgtcggtgtctatctctcccattccgcattcagtctcaccatcactagcatcgccggctcttgtccctgcagttgtggctgcaacatcagaggaggacgaatgggaatacgtcgaggtcggaaaaggccaagcgaactacaactccagtgagatcgatcgaatcaaaggaatgaagaggtttgtcttctccagttcttctctcttttctccattcttttcattccagatacctgatcgcatgtatcaaaccccaaacaaaaattgacgaactatttccatactttcgtcttgcctttggatcaccctgtttctaatcatacatgaacgtcctgtctttcgttttgaaccggatagttcaagaatttcagaaattctgggttacgcagatacagaacacgtcgtagattccattacgctcaagattagcgctattgcttaataacctctgtggcattgatatatattcgatatggggtttctctttcttgcctgcgggaaggacgcgaactagaccgtatcaataagagacatttcatatcttgaagaagaagggaaccaatcaagcaatcgagcagatctacacagaacagagacaggatgggtatgaacagtcacaatgggtatatgtaggcaagaaaaacggagaacgtatagagaaagaactgagagaagactaaagaaataaaaggagcttgaagatacgaatgagcaatgcgaataaatcaattgggtaaaaggagaacaattttggattgttgttatcgtcaggatataaagcagaagtaatcaagtgaaacagactgagagtgactttcaagaaggactccatttgaacgatgacggtggtgattttggtttaggattcatccgtcgtggcaatttagaagtggacggaacttttccagctatcgggatgcgactatttaaattcggaaccacaaccttcgaagacagtaaagctttgctcgcagttgataattctggagacctggcaaatactgtgttcgaatgaggtgagattcttggaggtgatgaaatcgaagtccccccgtttattgtcgcttcgggagttatgttttgctttgtaggaagggaggacaggaatggagaatccatagggcgaacgggcgttttgagaagagtattcgaaggtactgtacgaatcaatgaggactcgatcctccggccaggatgatttggggatgcatccgaccgcatcttgaccgaatggctctgatgtgcaaggcctgtttccgaggcagcttcttgagtcagactagttatttccgtcgacgaggccattatattattagtttccttgaatttggaataaggtagctcgtcattcctcgaaaaaacgtcctcctccgaaaaagatgactggactggactagtggccatttttggctgttgtggtgtacgaaacgcgacctcgacttctccccatactgactcatcctcatccgacatgcgcattgggggtggaagaacctgcatgccaacggttggcgtagatccgcctccagtgaaagataacgggctcaggcgagagacatcagaacgcgtcgtgggtgacccaaacgtcacatcagccgctagagatccatcagaaataggctcatcacttaaaagttggccggtaatcgtcatctgggcgtcgtgaggaagatacagttctgagcgtggacctgccaagagagaccgtggaccaagacgtgttccgcgagttttatcagcgggagtgactgacgtcgagtgggacagactctcaggccgaacgaaggtgggaacaggcacctctgatgcttggaaagaagctgaaggttttgcaggtggagaaggaaaagacaggatcaaatccattgctggcattcgctttttgacagccggtccaggcccattaagcgtcaggctatctcttttattcggctcctgagtttttgaggatgaattgaatattggcataacttcctcctcactatcgctggccatccagccgtcctcatatgaaagaatttcggccgatgtagagatcgaggaagccctttgcttctgtatggaaggtttaggatgtagaaaaggcagtgagggtcttcgggggaagtttgaggtggattcggtggactgagacgaccgtagtttcttgatgaggagacgtgaactgggtgagataatgcgcgatctcatagcaaacgtcgagagcgaagtattgagatcgatgtcggactacgaaagataaagagtgagcatatgaccagaagatactcgatttaggcggaacctacctctgagcctgactcgtaggatttgtggatttcctccttgtcacatgaattatcatctgattcggtcgaagacatagctctagatgtctcgtcgagtgcatctcgcgtcttctctgaagagtgcgctagattagtaacgacgcttcgtccagaatatctttgtctcgagaacgagcacgttgacatcgaagaagatacgagaccgtctgacgacggtagagacgtcgtggaggactgaaatgaaagtgtggataggcggaaagttgatgatactaagcttgcagtggacgacggacgacgtaggggcaatgcggaagggaggtttgcattattggacggaaagggaagaccggcagggtcacaggaaagcgcattcggctcagaagaggtatagctttttgaacgtatagctgaatccaaaggggagattggaataggtggtagcggagcggaaggtgaaggacccggcagcgatcgcttcaaaaaatcaagattttcaatcatatgtgaactgggtgaagctatcgagctgaagtcaaaagattccttaggtgtactaggagacaaaggagtgggaggtagaggtatggttggcggatgggacggtgaaaatgtccgtaggtattttgaggaagggggctcaagttgcggttggctatttaaatagggtaggattgaaccttcgcggttcgagcgagtcatatgcaacccctctgctggattctccgacgaaagatgtagatatacaggtctcctcaatttgaaccggtcgaacatcgaacgttgagtgggctttgaggtttcttcggaagagggcgttgtagtactgatcaaagaaagtgttgaactagtatacgcgggttcctctagacgtgaacccgaatctttaaaatgtcgagcgacgctcggatcatgtgtttgtttcgtcggcattgccaggaaattgcgctgagggcacagcctgagatgataggacgctaaaagatccacaaggacgaaccacggggcggctgtgatagaggccaagaaggattacaaccaggatagatccgcaagctggtactagaatagagaaacagtgaggtcgaaacgtggctgtattgagtggagagtgactgaatggatgtgatccttgggcagcagaagaaagagtgtttgtttttgtttttcttgttattaaaaatgagtaaatacagagaacaggacagaataggatctgatgttgggaggatattgggctgatccaggtactggtcaaaccgcaagaagaggacgaggaagagaacgagaatcgaaaaaaagagcagataatagacagaaagagcgttgattctatcgtcggcttggacgtgtttgaagagacatagctagactgagtcaagctcagacacagtcgcagcgaaataatatggattagattgatgatggttgtcgttggatggataaagacaactctgatgtctgaaaggagaagagaagagagaaggagtgagggattgtttgtttacgtaagcgatcaacaaaactgaaacatctagttctgaaacagacatctaaatacgccatataataaccccttctatggacgccatcccttccgtgtttgacatagcttagatcctgctgttttgatcatatggaggagggtgctctgatctagcctgatgagcggcatcagccatctcttgaagcgtcgcgagctgtccaaaacgggtatcgattagcttatcgtcctgatctgcggtacatcaacgcgtgagactaacctctccacttttctcacacagctgtctgaaactgcctccttccttggccaacaactcaacgggggatccgaattcctgaagattgaaaacagagatatttgagagatcatcagtgactgtaactcatgttcgatcgaaagaattaactgcaaaggttcatgtttcccacctctacgttccctgcatcgagcactaggatcttgtcgcaatcgataaccgttcgaagccgatgctgaatacggaaagcaaggaggaaagaagcaaattcagtttaagagcaattatccgcaagaatccaacaagatattagaagaaaacatacagcaatgatcaacatcgttacaccaacaaaagactctctcatcgtctgttggatcaagttgtctgtcgcgtggtccaagttagccgttccttcatcgatcagaaggatgttcgactgttttagcttgagaagacctcgagcaagcgcgaggagttgacgttgaccagcagaaaagtttttcccttcacgatcacggatacagcagatatttgccaagaaactgtcaatcagatggcgcacgaaaagtataaaattgaaatgcgcggcacgtacctccagcagctacaggcgtctccagactggtgatttgactgatgccttcttcctcgaccgctattgctgaagcagaaccttcctcgttgtttcccatgttggcaagactcgtagtcgatggcactcggcttggagctctgcttgcgatccgtgacgcagctggcgtggaccaagatgccatttgaacagcgacaagggcttcccagagctcggcgtcctcgtagagcgagaacggatcaagattcgatctcaaagagccactgaagagaagagcttcctgagggatgattgtcagacttctcctcagcgcagcgagcgaaatcttgctgatgtccattccatcgataaagatcgcccctccagatgcttccataaaccggaagaacgtaagggccaacgtagactttccagatccagtacgctgttcaacaaacccaaacatagactcctgacctgatcagcatcttggataccatctgggattttcgacagatgtaaagagagaaaatggctcacaccgcaaatcccgactcgctcatggggcaagacctcgaacgatacgtccttcaagaccgggttcaactctggggagtatttgatttcgagggacttgacttctatctttccctccttactaggccagtaagcaggaggctcgattcctttagcgtcttcttcctcttcactctcgagtgtgaggtattctcggattctctcctgaaacaggaacggagtcccagtaaatacttcgatcaacacctactatacttggataaccatgtggaacagatgcagaacttacaacactgttcagatttatctcaagagcggaatataacctgactacccacagaacctgctcggtgaaagtgatcgagtatgataaactcaaactggcaactcccgcatccaacgaaggattaagcagaattagtaccgccgcgaacaaggcgactaatgcgcctgtgcaatcacagcatacggaaagccatcggttcgcttgccaaagcagtaagaatggagcactgcaaagaaacaatgagcagatcagcctctatcgaccgagaagaaatgggttcggaagagagaaaagagagaagcaacaaacttgttgttgtcgatcaggtccagagcctgtttcgtgaaccttgcagtgtctccatacgaccggatggatgtcatcccgttcagagcctcggagaaacagaccagaatgggagacttcgagatactctcaattcttttgagctctctcgacaatgccaaatagacagcgccaataatccagtagagtccaacgatgaacgcggcaccaaagagaaacggtggagtagataccgtgacgacaagaagaacggcgaaggaggactagcaagagcatccaaacacatgatcaacatatgaaacaaacctcaagtagaggaagaaaattataaaggaaattaccatgatggagaccaacagataaaggaaaacaggcgcggcctctctgtagatgcgcaacagttctggctcagtgtcgaacaaagtaattcaaccgacagtataaaaaaatggagaaacgaactgatcaaggctctcaacgtccttcgacaatcgattaatgattcgaccagaaggcgtagagtcaaagaaccttactcgagcatgtagcctggttgacagaaagatattcgaaggtagatatataagcacacaaacgaagaggttcaccaacaagagcttgaaagcacgtacactcgtttcagcagattttcatacaatgttttacttgctcgcaaagatcccgcaaataggagagccattctgatggcaatagcaacaagataaagcactgtgattgctgcatatacagccagatagtaatttgttgtgtcttcagctggtgctctcgctccagtgatagcgaatcggtctataggctgagtaggcgccgctgagaaggtcgtttgactcgatagactacgatgaggaacagcgttgacaggaccaacaaagaaggcaacaaggctgaggctcgagaagtcgacttccgaggagttgtattgagccgcccactttcgaagccacaagttggtccagatttgaacaccttgagagccgaggtaagccaggataagcataatccagaaaactgtagcaatgcaggagacaggattagagttgtgaagactaatcgagatatgacaggtctgttagggaggaaagtccactcacttgcagctcccatagcagccatatatagtttatagacctctttggaaactgcacaactcgccagataagaaacttgatccatgagcatcgctaccacctaccgcacaggatagggacagataagataataggtttagaaatacttacctcctccttcagaacttgtttcctcctttactaatttctttttcaatctcgtctcatcaaggattttcttcgttgcttccagatcaaccttcacagtttcgtcatctgttaaatcttgctcgatcgtcgcctcggtctttccgattccggattcgccaatcggcatctttgaactgctggcaatggggtggtgagcattgtcatgcgcatcgtctgctaaggcatcttcagggaaagcattgagtgatttcaggtgggcagctgttccttgggcaatgacacagccttgatcaaggacaatctggtgataagagtggagaagaaacgagcaaagatgaaacgtcaaggccagaaagtgtacagattataagaataagcataaggatacttacgccgtatgctgctcccgtcaagcaaagtccaacagcgtgctacgatatcgttcccaacagcaaccacaagacagcagaaggttcagtttattggtatggcaggtaaaaataaagaataaagagatgacatgatgaacataccgtgacgaggataaccgtccttcctcttaataaaggccctttgaggcagttttgatacaggaacctagccgtgtgtgcgtccacagccgataaaacgtcatctgaagtaccccggagattcagttgaatagcgggaagatcatcagacatgggtttgtgaaaaggtcattacatcggaagacatttggaacttaccaagaataacaatagatgagcgcgagtaacaggccctggcaagtgcaatcctcgctttctggccaccactgcaagttgtacctttctcaccaacctcggtctcatctccgagttcgaagatgtcaagatctctttcaagttggcatgcggcaatagtctcgagataccgtgcttcgtccctttgaaacgatgaccaggagaagaggatgcagttaagaaggaaggacaagaagaccagatcatttaatccataatggacttaccagggcgacccaaacaggatgttttctctgattgagtctccaatcaaccaaggctgctgaggacaataggccacagtctcagagaatccggtcaacggatcgataggtgcggtgtgtctcgaaaaatgatcgggcatgaagactttgccttcgatcaaagtcgtttctccaagaagcgagagcagtaccgtagtctgatagccgcagagatatacattgatcagtcagcacaatccaaagtacggacaacgggtaggaaaggattcacttttccagatccgacagaaccagcgatgagagacaactctcccgtagggaacttgatactcaagtccttcagaccaaagtttgaaggattcttgttgaactcttctttcgtagcgtatgtaagcgtagcgttcttgaaaccaatctttggctcgtcttcgttgcccgaggtagtgctagtagaggaaggaacactaagattcgaatatttatctgtatctggttgagtcaagaaatcctcctgatcaacgttgcgcgagacagaagtccctctggtcagcatattctttttcaagtatatcagaacaaccgataacgacaaagattgacgtacaactcgtttacaactgacatgggcggctaggacatgagccaccatatctgtcattccctccaacggagatctgcatatcgtttgaatcaaaaaagaaaccccgttgtgtacgagttcagctacaaaatagcaatcgcaaggaaaaaaatataaggaaacataccgaagcatgttgaaaagagccaaagcagtaaacgccgtctcggtcggcagaggtgccttgaagaccttggtgtgaaccgcgaatgtcaccaatgtcaccgccgatggagcgagaatggctccgactccctggagcatccaaacgatgaatcgctgacggataagcttgagctcggcttgtcgcgtgtctttcatacgggcgaagaaccggtcttcctgtttttggtatatacaattcacacagaacatggacccatgagttgtgtttcgggaagcaaatctaggggcaataaatacagttacacgtacccaaccattgaacttgacaagtcggatagatgacaagacctcagtagccaaatccaatcgcgcatccgttgcgagtaaaagctacatcggccataaaatcctccaagcatcgttcagtgttgcttccctcaaaagaatacatcgtatcagagaagataaaatggtgggttctgtaagaaaagccttaccttgtcctgaaccttgacatacaacctggccaggaaaatctgaagcggcgtgactgctgccaaggcggctacaccgaagagagaagaatagcctagtaagcggtacaagaagacgatcgataggatctgagatcatgtaccgtgcattgaggtgttggtgtatatgaaagatagaatgtcaaaactagtctagagacgggtctggaggaactaaacagaaacgaactatactcaatgggccttcgggaaagaggactgtgagaagcaagtcgatatgaggacagtgagtaaagcttattcgccttggcaatatatgggacgagaatgcatgaaggagccttacaaagaagataggcagcaatctctgagatgctgaatgcatcaactgagatcaaatttatgatctttccttctgatgcctcttcctgttgaccctcagtctcctttccgtccttgttctcatctccacttatatcagtgacatcgttggtgttgacggatccaggctcggttgtagtctcgtcgagcttctcatcaaatattttggcaatcttggccgagtcacttcgtcggagggcctatgcaatgagattaagagagatgagcagcatgagtccagacgtttcaattgtacattgaaggggagaaagagaagagtattgtgatatcgacctttgtgaaaacttcagtgattatgatcgaccttaacctcacgcagattcttcttccgatccaaagtgcatagccctgagatgttacagaaacaacctgaccgaaaaacatggcgacaacatacaacacggccaaatgcatcggtcgaggggggtacgtgtctggatctaagcttgagagttttcggtaggcaacgaattctagaataagcttgagagtccaaggagcgatgaatgatgccaacacgtaaactaccgcccaaagctgcgtttcaagaaacataaggataaaggaacagagaaagggggtcagaatacatgcaagtatggactggataagcatatcaaaactcaccatctgaagtaacaggtagctcttgaagtataccaccaagttccaagtgagtccacctttgccaaactccttctcgctatctgtatgctcacttctctgtctctgtctaaagtctcgccagccgctgacaacgactgcggtccgatcatcctccctcagctgggggacattcgacatcttaatcggggtatagaaatgccgaaagattggcttgttgacatacgaaaagaacgtcctagcaaacaatgagcttggctcctcgatcatctctgccttggtttcaatctttgacgagatgtttgcgctcgatgaagacaaggaggaccgtcctctagaccgatgaccttctaggactccgtccagattggatcgatatggggtaaagatatcaagaaggacgagaacaaggacgagggacgaagtgatagcctgaaggacgatccatcgactaccggtatattgatcgataagcgcatgtcgaaagttgacaagtttgagtaagagatacgcaaacagaagggtcgttcggtggatctctgctgatgctccatatggagtcaacccgtacttgcgaccggtactagactctgcaaacaaggcgatagcagagagaagggtcaaatagccggcaagagcgaccattccccatccgcagatggcccatacggtgtgatctaggacagccataagtccgttgaagatctcgagtccaagaagggaggagagaaagagcagaagaacccagtctttgatacgctcaagcacagactttccgagttctggttcgacaccatagacatccagcgcagacgactttaagacttcgttttcaagtgcaaccggggacggtgtcactgaatgaccatccgtcaggggcagctggatagctgggctgccagttttttcttttaggtattgatttgtgatggatgttaacaggaacaatcctgatatgattgccaatgaggaaggaaggactaggttcaggaacctgtgtagatgtaaggggaaagacagattcggatcagcatgacaagaacgggatcggagatgaaaaacgactgatctggcagagagggtgaaactctgacctatctaggaaacaaaggttgatatccaacccggtccatatcggttgactgctatcgcagcccaggatctccattgagaaggacgttcggatatctcttatcgagtctagtgagtagcggagaagagatagaagagagaagaatcaactgaagattgatgatcgttgagagtcggaagagtaggtgagaggaaaatgaagacttggccggttgataacttctttttttaatcgatgactacaaagatccaccgtcaaacgccacaggccggtgtaagccgagaggccatatgggggagccgattagataacgaggtgagtcactcttccgagattttctttctcgcctgactatgtctcttgagtgtgagtgtaggtatgatcctgtagatcgcattgagacggtgtatgtatttgtgttcatgtatggttttcatcactttcaaaagattctatgggcatggaagaatggaaactcggttggaggtgtatgttcatgggttgtgtccaatggtactcattctaaatcacacaacaaagtagataagtatgtggactttgactgctcatacagcacatcatcgaccattcccgttgatgatgactcaggattgcgaaggaagggaagaaaatcgacacaggcatacaagtcatccttcgataagactgaacgaatatatggagtcatgttcaatcggttcgagggatcttcctgctcctgtattaaaagagagacactcggatcccatctttgaaggactcatttacacatcatcttcctcgcttctcaccaccattacacaatatgacggctcagaagaaacttccgttcgatattatcaacgtttttaccacgtcggaagacgaaccctatagtggaaaccctctggccgtcattcatgagtcacatggcctcaccactgcccagctccaaacgatcgctacacgttggtttcgttttgctttccgttctgttttttcttctttccctcttgctctctcaattatctcacttgatttcgcccctcatctacttagagttcaatctttcagagacctcgtttccagtgattccttcagaagaagatgccgccaaaggagtttcgtacaatactcggatctttactcctggagaagtgagctcgtgtctgtttatctcgttcggatcgttcaaatctgattgaccatcttttcaatcaaaacaccataggagctccctttcgcaggccatccgaccttaggcacatgtttctcacttgttcaacgatctatcatctcctcagatgcccagaaggccgttcagtcgtgccctaagggcctcgttccccttcagatccactcgcctactcagatctcgctatcatccgctccgatgtatatctcttcaccagttgagctgccggagaacttgctcgtggaaggacttggtttgagcacagataccgctgttgtgggcaaggctggttatctttctagtgccggactcctattctattacgtctgtttggaaaacgagtccgatgtcgaacgagctgttccctcaacttcggtaatcatccagattctttcccagctaggtgaagagaacaaagaagctgtagagaaagccaatcagccactcggagtttacctcttctatgtagagaagttacaagggtctcaagatctcagggttcatgccaggatgttttcgacagatactgctgaggatccagcgacgggaagtgcttgtgtcgggtacatgttcctctctctctgactcgcttgttcaaattgaacgacttcttactcctctgatcttttcattctctcatcagtctcgcccctgctctccaagcacacggccttttgccatctactacaagttcgacaacgtacaacgtttctcaaggcgtcgagatgggccgcccttcaaagttgactgggagggccatcgttaaagacggagaactagtcaattgtgaggtcatgggttcgagcgctaaagtggccgaaggttggatcttggcccctttcaagaagtaggaatgagttcgaattgagtgtctatgcactgtctttcgactagatgaaactgttgataactctcgggtggacataacggcatacctcttgctggactactaaaacaaagcatgttgatattcaaagaaaacactggctagatgattgatcaatgatgatacgagtttcatctttctcgcccataagatctacaggttcagcgtcattttgctcttcaaaattccagccgagagctgatgttgtatactgggtggtcaagatgtggagttcaaacggcctgttgggacagatggaccgatagattaggcagaggagtaaacttctcttagactcagtcgacatttgatcaatcccatgctctaaaagagagccaaagcggtataaacccagacccggttaaataaaaagttgtgcagagagaataaactcggagtttggtgagaacaaaggaaagagacagaaactcacgaaagatcaccacctccagtccagcccaatgccatcttttcaactttctcggcctctcgcgtgtccgactgttctatgggattggatatcggatctgaaagtgaaactgagcggaagatatccaagagggacgttccaggacgggagttgcaatcggtcatcaagccaggaagtggtgtaaagtttcgacaaattatgaaggcctctgatattgttgcgcatgaacagacaagcagaccgtatggatgtcgttagttgatctctcttcgaaatccttttgagaatgaagagcggagcgtggaatgatgagaaagagagaatgagaagacgtacctccactaccttctctactacttctcggctttctcacccacaccccacccatctttgtctctctgttctttctgtcagtctccggaaagaagcttctcagttgactgactagccattctgctccgggatcttgaggcgttctaaagatctttgcgataaatgtgccacctggtgctaagagatgaacagatatcgaaaatgctgccaaaagtaactgagcttggaggtgcgagtctagtgtatgtaagccagtaacttttgattccataggacagaaagaagatatcatgaatcagtatgcgctagtaaagacgacaacagaagagctgaacacaccatcaggagccccgtcacaaatgacaagttgagctttctctccatccatagctgagataacttcagccgctgttttgggagacgtgatatccccggtgatctgaactacaccttccagaggtgcctgccagattttataagaaaaagaatgacaaggagggtgaacaatccaatgagtgagaggtcaagtagcgtcgtaacacgaaatgaaccgaccataggttggagatctacagctacaatctttgctggcatctgattaggtacttcgctaccgaaacaaacaagataggaacagcatccaaagatacagtcattgataggtaaggtagtaggtgataggaaaccctgataagagatggaaccgacttgagtttcttgactaaaacttgactccaacttcctggggctgcacaaaggtcaactggcagttgagcaaagaataagatggccataagcgccaggtcagttcaatacgaacggtgctacaactatttaacatagacagaaatgagttatcacctgcattgcgaagatcatgaggaaatatatcaaactcttcggcaatatgaagcaacttgtatgccgagcgcgccctataaccctcggatttacctgatgttaccggttggaagagagaagtaagctgattgaggctccaataatagtcttaataagtacaaggaaagaacagtcaggttctacccactgagtctgtagtagatgtctctggaatcgacgttcgaactcttgcccatgatgtatctgctgagagaaagagagcggatgatgataggaaggattcgtctcaaagagttggctgaattatgtctccatgacaacgctggacgaaactaagttcgtcaccttcactttatcgcttgctcattccgttcacactctcacacacgactcttccatatcatctcaccatctgtataaagtcagaaagatgttcattgtctctgatctactttccctactcccttcgtccgattcgaatgtcgcacctcgtccgactgttggatcccccgcacctaaggaccctaacgatcgtttgaactttcctctcgatgtacgtcctctctgcttctcacgtgcaatatcactggctatcgtctgaccggtctttttatttattttatgattactttgattcaaaagcctcctcggccaatcgctttagtttttgtcaggcattgtggctgtccgttcgccgaggacacagtccatactcttctccacaaagtacttgacgaccccgagagatacactctggcgtctgggagcaagctccaattcctgatcgtgactcatgcccctttaaccgaatcccgagagtggttcgcctctgtcctacatgctgcttacgagtcctataagccggctgaaggaaagaccaagcctgattccgatgtcatccaacaacacttttcactctttcctcaaggtccttcgcagagcctttccaaggcttacggtcttggtagcttgccaagttattcaacgatgttttccaaggggatgtgggccgagttttcgaaattgaaggaacgagggattgtcaacagagcgacggccagtggaagtgatcgctgggccgctcatgggggttgcgttgtcgatcaaaatggaacggtcaagtggatctggatagcagacaagattgaggaatttggagactgggaggcagctgtatctagcttggggatctagactatgatcttttttgtaggcgtgtatatgtgtgtgtgtctatgatgtagactgtgctaaggtgtaagattaatgaagattgtctcttgttccaaaagtgcctgagagtcaaatcaaacctctctttcagcacctagtgtagatatctactaacagtagcaacccttttgttgcgctaccgaccatcagtagaaacggacttgcaatcgactgtctcaaatctattcacctaccaaagtagaacagtgtaaagagcgacgtggtatgtaagttggttagggttgtaaatgcttacataataaatgccgtcatcaccgtgagccaactgaattcaccatcagacacgattaagatcgaatggtcgaacagatctggagacccagagtttgtttggatccttcctcgtgtcgggagatcgttgtatagataccatctctatccatcgaatgtttaaagcacttcgttcttacgccgtcatgtccactcaacaagatctgaacgttcttcgaacgcctctccagaaatgttcaactagggcagaagatccagtatctgggtgggaaagatcttggacccttctttatgaggctgtctcatatactgatcaattcgttgctttgttttcatccgtcgaatcaaacatatccaaatgttcctcgtctgacggatctttttctctgacttgccacctttgttttctctcctagatggtttcgagacgggttctgtcggtacgtaggctcatagcctctcatagatgaagtggtatacccagacaatctggctcagactgatacatccactggatgcaatatgcatataacttataacaacctatctgttgtcagatcggatcccaaggactacggaaagcatacggttgcaggaatcttgacgcctgccttccttgagttttcaaaaagtcgagggaacgatttgtctacgcctcgtcctggattccctggattgaccggaggtaggcatctttcttttgttttactatcgcatctgccttgatcgtatggtgggtggttaggtttgattcgttccgatacacgtattgatttcgtatcacgtgggcgggcgcttgctctgaaaggttgtaggtggtgtctttgcgtagaggtttgtgatgcttcattattcttgacctttacaggagaacaactgtatcatcagagcactaagagaacgttttctacaacgactacagcgatggaaagaagccttcactgccagaacagaatatggagacaagattgtaccgttgtgagtctcatttgttgatgatcgtcctgctatatatatttatatacctggattaaccctggtcttgtttgtacttcgcaatctgacagggtcgatttgaccgctactcatgtttgtcttgttctctatttcttcatcctgaatgcgagtactggtttactgacggttcgggcttatgtttcatcgtatacacgagaacaggctgacgctttgaatcatgtacctctgagcgacttcaagatgtttagttcagaacacagacctcctcctcaacgttaattttctgtaggcttccttatctatgtacacgactgagtcttgcctgaaactgctagtaacaaatccaactgtatgccttgatgtgtgaaattgaatgacaagaatgactgccgtcgatgtcctatttatagtttgccttagtaaacgctctttctcgttcaaagaacaatcaaggcagtttccagagggtgagaaagcgatcagatacgtcccacagccccgatgtcgtccgtcggctactctgcaagcaaagagcgtcaag

SEQ ID NO: 1994 - DNA, 5106 bp, Xanthophyllomyces dendrorhous
cgtcaagagtcaatccacttcatcgacggcctgccttggttcgtgagaaccaagagcaaaagaccgcatgtcctccgtgaaggggtgtgggtggagtatcagcatctcgctttatgtggtgtagctagtgtaaactagcaagaccagttatatctctatagaaatgaatcctgcagagtctgtagagtggaaggaagatgtgcatcaaagcgagataaggtcagctattgaaggaagaaagcgaaaaccatagagggaagaaagtgaactaacgtggtcaatggagaaaagcaaaattgattgggcagaaactgacgaatttataccctgggcggagggaggtccgagcgtcacgcggctttcaactccgaagcttattcagcttatgagagtagatgaaaatttgaatccaattcaaatactactgcgcgcctctatcttggtgacgcagagagaacactcaaattatctgtatcattaatcgactctggctggccggtatcctctccttctctcctgcttggcccggtccttctgactcaatgagatatcatcaaccaaacttggagaacgaacatcgagattataaatcgcttctactcaatcttcgacatcaagacacgctcgaccttcgacaaggtctgatttcgcctcttgttagatacacccgaaagaaaccggctcggtcgagagcgagcgagcaaagatcgcgcttggaggatgagagcgatatggatatcggagaggaggacgaggatgggtatgaagataaagacgatgaagcggcctgggtgatcgaagacggcgttagaaagaggatcaaaggcgaagataaagaagagggagacggaagattcagtgacgtgtttggtttttcactgcctcctctccttcaagctcgaccagtccttccgaggatcccaccagaagatgagagaactttgttcccgctgtatgtctcccaactcccgccacctccgtttgagactctggcagacgagatcttgctgctcgcgaaaaagtttctgaaacaggaccggaaacgatgtttgaaggtaaagcctacccgattaccggccacaatggactcttgccaaaccgttgaaccctccctcccaacaagctcgctatgtcaacctccatcagcccaacctcaaccaccaatatccccaccttcgttgtcttcccaaccgccttctttgtttcctcctacttctcctcaccactatcagccatactgtccgccgaagagtagctctcaaacatccagtataacatctaaagaactcatccacacaaccaggtcactactagctgtcaccctggatggtttatcaaaagtcactcccgtcgacacgttcggcacagctcgggcaaagaagaggaaactgagggaagcagagtcgggatgggagagagtgttgaacgtgttgagtggactagatcaggattcattggatccagtgtgagtctttctcttctgcgctgcgctatctatcagccagttcttcttctttcttctcgatagagacgatcatagctgataaggttctctgacttcagtgtgaaggaacggacgattgcgcgtctggaaacgatttatggacttagaaaacggaattctctaggtaagagaaaacacccgactcggagcgatcttcaacttttccttttcgcttctgcccaactcttcgttctcgtttcgtcttgagactcatattgttccgttcatttctatctcatgtttttcttcttgcgggagggggaaaatctgtagatcactatgcagatgaaatcgatgaattggctaatgattcagacctcaatccagggcggagtaaacgaagggacaagacaagacacaaacgaaatgctcctcgtatgtcctctttctcttctcttctcttctcttctcttccaccttctccttcatctgggttctctcacgatgtctaacatagcgggattctattttctttttccaaatcttggggaacggactcttgtgcgcgaacagtactgacgaagaaggagaggtcgatacaagaggagacaagattcaagagccaagagaccttggataaacaatttgttccgacctctctcctccgtccactctcggtgtcttcctgtttctcttcttctcgaggttctaagggttttggatcggttggctcgagcaatcttgttagagcaagtacggagacagaccggagggcgaggaagagaacgagagggatatccgaagagagcacgacttcttctgatgatatcagggatgaagactctgatctaaactctgaagataaggaggtggaggaagaagaggaagaggaagaggaggaggagatggacagagagcaggaggaaggggaagacgaagcagaaaagctggaaggcactgggttgacaatattccatagcccgttcattccacctcgaaaacgttcggtcgagcgctccaaggacataaaggagtcttagtttttcgcgagcgagaacgcaatagaagagattaatatttgatagatgatactttgataggaaacaacaagaaaagaggatgacgatataaaaagagacagaaagggaagagacggatgaggtatatatctaatctgaagaagggagtttatgccttgttaagtccatcgaccgaccaaccctcctcgaccatgaccactcctacgctctccataacctccactgcctttttgcattcctcgatagtgacgttcaaactgggcaacaacctgacacaatccgtcccggccgtcaacaacaagactcctcgttctctgcacaactcaacaaaccgtcctggcattgcagggtgaacgaacggaataccaaggatgaggcctcttcctctgatggcagcagatgagggcgaggaaggcgaaggatcataaggcgtgggggtctgggagacaagtgtagggaagagtgaagggaatcgtgatagacagtccaccaaggtttgactggtcgagtgaaggtttgataagaaggatggagcggaaagtcgggtaaggacatggtgagctagtcgggtagatagcacgtttcctccaaacgtggttccgtgcgagcctgtgtaggtttaaagcgttgacaaacaagagtttatatttccatccccacaagggaggaagatcacaaaacgaaaagcagaaagagggacgaaccaacggtgacagctttgacgacattgtctcggaccatgatagccccgattgggattccattagccaaaggcttggccattgtcacgatatccggcctgcaagatagattacgatagatgatgagtattggccaggatgcatcgagggaggacatgagataagaaaggaggtagacctgaagatggaagatactcactggcactcgagagggtattttgagtgagcccacatcgtacccgttcggaaaagcccacactagaaagaaagagcatcgcggaaagtgagcaaaaggaaaggaaacccgtcgaataggaagaaagagagaagacttacttgaatctcgtcaaagataacgacggcgccgacctgcctggctcgattgacaacctttgtgagccactcggtctctgcctcaaagatcccaccctcaccctggatgggctccacaatgacaccgcaagtgcgctcattgataagatcctcgagtccgtcagactcattcatctttccgaccttcactccagggatgagaggcgcgaacggtgcttgatactttgggtttggagtcacactcaacgcgcccatggttcgtccgtgaaaggctcgttcgaaacagacgatgtctgacttttcaacaccctcgccagcttgttcggaagcaaactttcgggcaaacttgagagctccttcattcgcctcggctccagagttggcgaaaaagactttggcagagctcgagtcggcggtggtagatgtcgcggtgaggccgagaccaccgtgtgtctttgtgagctcgaccaacaggctcgcgcacggcccggcccattggttgtggtacacgttggacgaatggacgagcagtgcggcctgctcacctagcagtgtagcaatctaaaggattcgaaagattggagttagagatacaaatcgaccggcgataaagaagaagagattagctatcgaacttgcctgggaatcggcatgcccgagcgcgttgacggcgataccggcggaaaagtcgaggtattctttgttctgagtgtcgaatatggcgcttccctttccatgggtgaacacgattggtggtcgggagtaggtggaaaggaggccttcggcctgggcttcgagaaacttgacaacgtctgggggaaccgggtggtccgggtgagtgggcttaaggaaggccctgctaggctaagagagggaaaaaacggccgacagggttaagcaggtgctgagaacgaagataggagggacggaagaaaagaaaaggcgaggtgagagaaagaagagatcagacctgagtggaagccgaggcgagcctggaggcactgtgggagatggctctgagggagaacgaaggacacgctttcttgacgctagctctgagcatgattgaggacgacgcaagtagagaatgactgtttggacgagagcgactaaggatggtattgaggatgggagggagaacgggaaaaaagaggattgactcggacacgaacgattgacgattcgaaatggccgggcacaccgcggcggagagcggacggttactaaccgggttcggctgataagacatcaccgataacgcagcacgctggcgatccaaccggtgggcggtgagtaacctgaattcctggttgtgtgtttttatccgtcctgtagagtagagtagaatagagtagagtagagtagagtagagtagagtagagtagagtagagtagagtagagtagagtagagtagagtagagtagagtagagtagagtatagtgtgatgtctgatgtagtcttgacgacgtcagtacagtatgtatcatatagtgtccggtgtctagtgtctgttctgccaagtttctattgattagactggttgtattgtactgtactgtactgtattgtactgtattgtactgtat

SEQ ID NO: 1995 - DNA, 22299 bp, Xanthophyllomyces dendrorhous
gtattgtattgtattgtattgtattgtattgtattgtattgtttgccatcaaatgttctgcgtattctctagtgtgtctatgcctaatacaccgtagagtacagctctagtccaatccctaatacgatcctaacaaaatccctgatagagtcccaaaaagaattcaaatacaattcgaatacaatccctaacacactgtgtaatacccccaaacacccaacgctccctctgccgacacgccggcggccggctgttgtgatttcttccttcgtcattcttcttgttctcctccttctcccaagcctcaccgactctgtcctgaatcccatcacccatcgagacgagcgaggcgttcattctctttcattctcttccttctttcatatctagtcctttctctatctctctcacaacacagacaagtcagaccatcaccttgaaccattctctcctctttgtctccgggtcaagcagaaagaaagtacacttggaaatcgatcgacgttcattcaacaatattcccttttcctctcccgccctcgctcgtgagttccagtctgttttgatgcatacagtcgtccatgccattgatcgttctatcgtctcccgaattccttccttagccttcacttcgtttgtctcggtcgacaccctcctcttcaactccgtgtctgtctttttgttgagtgaatacacagcatatacttctttgctgcgttcctgaaggacaatccgttagctttcctctgtcggcccttatcctactgctgtaggtcttggtctcaactctaaatcgtcttgtttgttctcttcctgcttaccccgacgcgcgccacgagctttttctgaccaaaatatactcgcgccttgttgctctctcctctctctctctctccctccctctcccctttgctcttctacacagacatccatggggttctttcatcgcacctcggactctggatcgtcctccgtcgccctgtcccgttcgtcaacggactcttacgcctctaccgcagacacaagcgacacctcctaccaaggttcagcctccgtctcgccaaacacacccttgccgaagtcctcgtcgtccagctcgctccgcgcattctttgcgtcccccaaacagttcatatttcctccaccagctgtgttctacccggcgtcaactaccaccaccgatcacatgtcttaccggtccagaggcaccagcttcgacagacaacacagctccggtcaggtcaccccaaacggatcagccggccttgagcgaaagacctcgagaagaaagcaacgatcacagtcgtttcatgtgctcaccccctcgtccagtcaaacctggctctccccggatggctcgacccgctcccgatccgattttcttctcgagatagcctgcaacaccgagaaggttccactcgtttcgtccacatcatccagacggaattctttcgttctgatgtcagcctgccactcgaccaactctcagagagacagctcagtcgattctctaggctcctcagtctctcgtcgacggaccagatcgatcgagtatgcagcagcagccggtacaccaacagcctcaacgtcggctgctggaacaccaatcgggacgcctcaatccatcaacatgaaacaactttctccccttcaggagttcagaagatctaactcggcgaccagaccgtttcctcttcgatcaaacaccgccccgcctgtctcacccacgcagctctcgaagattcccacatccaatcagcctgtcagctttatcgatgccctagccgaatctgcgagagagagacccgatcgagctgatggaccgaatgacgaaaacgagcgagacgaagaggacgacgaggacgatgatgacagatccacgatgaaacctaatcaggaacttcaacctagattaaaaattggaagctcgacgtcctcaagctcggctggcttccgagcagattcaccctcaggcaggtcccttcaaggaagaagaccaataggaaacagagggtataccaccacctctgtttccacttccacctccagccccaatgcaaccacttctatgatctatatcgatcgcgtcatccgcaccaccaggcatccgattccttcctgtcaaaaatcgacacgtacatcgaccgttcattcggttcctttcccgtcaacggcgtcatcaaagaacctcgctctctcctcttcaagagaacagttcaatcaactcgaaatccgaaatatccctctcatcacgacctctcctccatcagttctgaccggctcgacagtgacgttcaagccaaaatccagacgcaccctctccttgccctttcagcctcatctagcgttgtcgatcatcgaaccggccgaaccgaacgaggcggacgtagtcacaccgacagccactacgtttccgcccacttcgacatcaggtgccgctgccgctgccgctgctgccagtgcagccctatcaccatcctcgtccacatctaccatcacccccagaccgaggacacactcaactttctccagaccgctaacaacatctctcaaaggtgtccttccagaagtagctccgtcacagattccctcttcagccagcatggcgtgtctctcgacgttctcatcctgggactttccaccagccagagcagaatctctggcagcaaagcacaaagtgctgtccccgctggaatcttatgtgtttccaaccacctctcgatcgtccacaatgtcctcgtcaaactcattgatgcttcccccaccggtccctccgcctcgatcgatcagacgatcgatagtcggcggccaaccgactgctctggtggaacgagcgctgaactcaaaggcaacaaccgcccgaccgaacgtcaagtcttattccgcagtgcctacaattcctctagcatcttcttccaccgctcctaccttgacctcgactacgatcgcccagacctcttcttcttcttcttctactacctctttatcctctaccgctttatctctagccgcactgaccggaccatcacggacgacgctaaagaggtcgatgactgtaaattcgatcgttcacatacaggggccttcacaattatcgccgcctacagtcccatccagacatccgaatcgagcaaaacttcgaaatccacagtcatattccttacagaattgcaaaacaatatctgttcaaacgaacactggatcttcacgatcacactcgagtccgaactctgcttcatcgtcaacggcgctttcttcttctccagtctacatgttccctttggaaagctcgaacggatcagatcattcctcaaaaaggtctctatcaccttctctgaacggatacgtgtctgactctggacacaatcaccaccgccaccttcatgagatggggttcggatcaatctccactccggccggatgggcagatagaaggggctcccattcgagttcttcgtcccttcggcaggaagtctttccgtttgagaaaagtcgacctctggattcctctcatactgcgttttctcctatctcttccgaacggtctagcgcagggcaatcggccgcaaattacaacttcaacgtccatagaccgggaataggagacagaagacagaccacaggagggccaggcccgagtgtacgacagatggagagaacgttaagcatagacagtgagagttcgtcctccggcttttcctcttttgctatcgggaactacgacccatccgtcaacatgacggctatcgatccgggcatggaaaccggcctgagtacgggaggcacatcgggtgcgacaggaaagacgagaagcagaagctcgctgagcctcgctggtctgcttggtgggttcacaaaaagaggatccagtttctgggatggagcttcaaagaagagagatgatgatggcgaccagatcgatgagttcggacgacagaaggtcgttcattctttctcggacggaggggagagaaacgatgggagtagtcgcagaggacgaggaagaggaagggatgaaaagcgcgagcaagagaggcccgggcaggaagaagacgaagacgaggatgaagaagagttctgctcgttcgggaacatgtgaacacctcttctgtttcctccttttcttactgtttcatcagaaacaaaattgcatgttcacacacactcatactttccatttcacttccaacatatacccacaatccaataccatacttccagcaggaagggagggaaaaaagctggcccttcatttctcttcttccgtgtctggacttttacttctgctctcaaattgtctatttctctttttccatcaagttttttttcttctttttctttcaatcatccatctgccatcaccacaatcgaaactcaacacactcgggctcatcccattcaactcagatcatgtacaacaccatagatacgtataccctatacccctctcaccttctttctctcttgctcttctcttgtcttgactcaatcttgaacacatgacttgaccgtcgatcatcgactatcgacttttgactccattccttctcagtgtaaattgtgtactccctaccccacctctcatttaaatttccttcagtttcaattccaatacctcatcttgcccgttctctattctcatcctgtttgttgctccctgctttttataattttatatgaatcttgtttcggtctcgatttctggctcgatcttgcacattctgggctcatggttctgcttctgattgtgcacttcgtcctccccgtagacccttggaagtcttctggctgaaagatagttcaggaaaggctcagtgaaagggcaagaagggaagataggaagtagaagggagaccaagattgtatatgtcgtacggtgcacgagaaaagagtagagatagcgacgacgtgtcgtgagatataatgagaaaacaaaagatattctgaagatcgtgggtgacatcgatgacgatgatgatgaacattggctccgaacatgtaacataggctggcaagataagttattaacgaatccagaataaaagataacaaaaaaagaggataaaacacagccaaacctaaatggacaaataatcgaacaagactcgttgaaacatgaacgagaaaaacaagaaaaggaaggaataaataaaacagaagaacagtgaaggattgaagagtcatcaggtcaatagactactgttctttccggacacggcccaatacatcagctagagcggatatgttctgtgacacccacacccatatcaaacccacataaacagcgatggacaggtgagtcgatgaattctttggacgatctagcttggcttgtgatcatcgtagtgacttaccaagggctgttaagttcccgattatgtaggtcgattcaagaggtatcaagccatcagaataatctcgttgtatcaaccgcccaaatcaaatagaatgactcaccttcgataggtacgcgaagaacccagaggcctgacagagcgcttgggtatcctggtaggaatggagtaattgagaaaaagtgatcagtgtcggaataaaccataatcataaaaaagagtaaacaagagttttcagaaacatacgctatccgtgttctagaaaagacagggtcaccgaataaaatgcaaatcagttgggtgtttccctctgtgtagaaccaaagggcaaagacttacggcagtgagggctacaacaggcggatttcctgtcagaggactcgccataatccgtttctgagcggtatgcccatcacaaactggcatcgatagatcctatgttggttcgcgtgcgtcgagttcaaatcaatatcggacgcggatttctgagaggtaccaataatggaacaagactgaccatgagaattaagtcgtatctggagctctcggctgattcaatcgcctgagctccatcaaagactatatccacatctctgttgaaggcccgggtaagatgaaatgtcaagatcatacttatcagagaaacagtctaaacgagtgcggcctaccgatatccgaaccgctgtagaatcttctgtccaacgaccgtgttgactttgttgtcgcttcagagggtatagatagatgatgttagaaacacgtcaagccatgatagatttgaaccagcttactccaccagcagaatcttaagcggattattctatcgatgcaatgggtagaaagatgaaaagtcaatcaggtacagactcgttgatgaccaacaatgcacaacccgtcaacataccgatcccaagttcttatcaatatcggtcttcttctttgctttgggtagaggtgagccatttgaggctttattcgcagaagtgagaattccaagcagactctgaacctttactggtctagtcaagatgctaccctgcgatactcctaacgttgcagatgcttgaaccaactcagaggtcctgaccaaaagagttacagtggcttttggttgtaacatagagagccgttccagctcatctttagtcactagccgagaatcgatgaatatgaatgctattcggtagagatataatcagaacaggacatcagaccgaatttcttctccacataaatgatagaagataggttagataggacgaacaaaactgtgtgttggcaaaactgggaaaagattcagaagcgattgctgatgagtatgaagagaacgtcgacactgttgcggctccatatgcattcaggctgataatcgatatatcgtcagctgagcgcccacaacataagaataacgtgtgattgttttgtacattgagtacaggaaacacctactttcgtataaaaacatcccttgcgaccgattcttcaaacagaagaccagctgtgaatggctgtgatggaggcgaaagttttggaagaactggaggcgatcgatccaccttagagatgaagctgaagtagaacgtggaccctttccaaagcgtagaagtcgcccaagcgtccccaccaagaagtcgtgcaagactctgtgatatgactaagccaagaccagaaccaccatacgatctagttatactcgcgtctacctaaatgggattgtgttcatcagtatcaatcagaattatcagtttctcaagattgacggacctgagagaacgttttgaaaatacgatcctgtgatataagattgaacgaaatttgctgggatgagtcgaggaagtttgtaggagaagacagacacttgctcaccatcttctgcgcgggaataccgcatccctaagggtggtgatgagataagcaaacggaaatttagaggtttgtcaatggaaaaaaaaccgaagagtagaaattcgtaaacttacagtatcttctacgctgaccgttacacttttagtatcttcctcgacactcatgtcctcaatttgccctagaccaatcgaagaataatgagacgaatcagtgcgtcttgtcaagctgaccgatagagttgatgagaagccactcacatcggatgatcacggaacctgactcggtaaacttcgacgcattcctgtgaacacaaaacatcacatcagccatcagtatatcatcacccaggattgttacatatagaaagactgagaggttcgtacgataataagttcagcagctagttgaggaaaccatgtcagtaattaggtttgcacttgtatttctgcagcgaagaaaaacttacaatctgccgaattcgatatggatctaagtgtaaccaccagtgagaatctgattagattctagctcgcaaacacaggtatcacgaaatgtgagacttaccgcctagtaaagacggggggtcttttgaaacatccgtgcctataaaaatctcgatccgattcctgttttgaattgatagcgcaatggaatcgacctgtaaaacttgcagtaataagcatgttttccgtgacaaaccatcccaataatacaaatagagatagacgtaccgcaagttcaatgatggaccgaagattgaaaggaatgaactctggtgtgagagagccactttgtagtttgctcaaatcaagaacattgctaaaaagatagataattgatttgtgataagtcatgtgattactgggctttgtgaagaagacatataagatatacttgatgatggtctaaaacaatgcatgataaacgatcagaaactaaaatcatgatagaagcacataatatcatacgtacctgcagatcatctccagaccttcgaattgtctcgaggtgctcatgttgcagaggcgagagatcgggagcctcttgtaagaccgcactggtaacatgactgatggtcagcctggaacttgcagcgtgaagagttgaagagacttacgataatcccagaatagcgctaggaagggcaaaagatttgtatgtctcagcaactagatattttccggtaagtatgctagatgacggaaagaggttctcacaaaagaggtgttcgcatttcgtgactcatatgagagataaacttctgtttggctgcgagagcttcttccagatcccgagtccgagtagcgacctcgccctccagagatcgggtcagaagcgaagactccaccgccatagcagcaaaggctgtaaaaacaacattgttaaaaaaaactttattttcagcaagtagatattctctgcgacaacatcataagctactcactagctagagaagagaccatgtcaatctgttggtcgatcaaagaagcagaggcaacatacgatgcagaggaaaggaggataacctgaaagaacatgagagaaacatcagaagtcttatcatagttgattgccacgatcatatgaataacacacttactccaaccagcctcctcttattcgtcagaggtaatgccaacaggcttcggcatactcggttactgagaaaattatcctgcctcagggagctcgttgcgctatgactagtgatcttcttcttagtccggaaaacatgaaggagagtagatgcgggacacagttgttcggcagcactgagagggacattctgcagttcatatggttgacttgatcagtacttgagatatgacagatatgcaaaatacacttacaaaaggggctatagctccaaattctccggatgctctcagatgaagctctgaggtcttagagtctatcaacgcaagggcaccataatctcctcgaacaaactaaacgatttcaagagggcctataagcatgacaaccttatcaattcaaaaacaaattgaataaatttacttgcctgaagcaagatatccatcattttcacggctataccatataaacagacaccgtcagccaacagcgactctgctatctagaatgtttccgtattttagaagagagacctacttatcacatctggatcctgtggaacgagtatgatggttagtatatggttagcttggcgatcaaccttgatattaaactgtaaagacaactcaaaccttttccccagctatgaccaagcttgaccggacaaatgtgagatgatcaatgttattattttccgcaggcaatgctgtttcaggattatccggagaagagccatcctcgtgttttaagcttgttgtgctcattgtcgagtttgatagataggtcgaagagggtttgttgatcgtggagtcagattcagaacgcagaagttgtccaggtgatatcaatcgatgtgtaggaagcagttgaagcatagtgccactgggcaaaggaagaggtgttttgaactgcttcatgctctggaatgctgaagggaactcttccgcgaccgatctagaaagagcaactgttttcaagcagttataggcgttgctcgctgctcttgcatatcctgagataaatacaaaattgtaaaactcgctcggtggtcaatattctctttacttaaaaacttgaatctgattgtcctgtttgcttaccgacggatatggtccgtttaccagccttttgaagccagcgagcgacatatcgattgatcaagcctttcaccaaaagaatgaggcgtatcagctgtgttctagaaaatgttagtaacatgagttggcttacctaataaagccatccgttctaattgctcgcattgctcaatcaccccgtccaatacattcaacacactgtgtagatctgcagactttcgaactagcgaaaaagcaacgatgatctctcttcgaagctcatagtcgatggctattgaaaagacagggtggttaatatatatggtgatagatgagcacatgattctcaatcactcacacatcgtatctctccgaagtctatcaaggtgttgttgaacctgaacctgttcttcgtcagttccgtaccatacaatgatcaagctcgtgtagaagagccttcgttaaaagaaacatgtcagcgccacaaagtatcggattttctacttgtgcatatgggaaacggcgtacttaccattctagatggtagaccattgatggaaattcatctgggtctaccttgcctttgttctggacaatctcaaccaaacgctcacttgaagacccaaagtggatcgcaagagagagttctgtggttatccaacccagactagatcaaagagaaacccaatagaaagggtcatttacgaaaattggtttaacacacatcaagaaaaagtccataatatagttgtgaaactcacctgtaaagaggcaaagacttgattagatcatagtcagcttcctggatgtatacgccgttcaagcctaagaacaaatcactgttagaatgaaaggatccaactaagaaatgaagatttgtcaaaaccgacgtacgactcaattctgagcaaggctttgatggatggcacatgttctcagcagcttggatcgaagtgtctatagacgcagaaataaaacgcatgttgttgattagttgcaccatgggaaccagtcaaacagccagcgaaactcttacttaccaatgagtactcgggctaggcgatttagaagacatcgtgagagtgagtgaactgacatcagaatgattattgaaacaattgaccaaccttcttttgtagtagcatcgacggaggggtaccatttgatgatctatgattatttgtgtaagcgtgttgccatcagtctgataccaagacaagcaggattgacggactttttgaaaccacttgtcaaaccgataaccagagaagaatcgagtggagaactccaacgcaactgcgtacgtcaacacgtctgtgttgcccatgtcagatgatagcttgaacgatgggtcgtacatcacacaaggcaacggctcgaatacgaggctttgacaatatataacgataacactaggctttgagtcagaaaagagagcaaacatagggttagcaaaaaaaaatgctgtaagatgattaggaagaatagccaaggagagttgcaaaccccttcaaaaaatgtccctttgatgagagggaggatagctcgtgcaatgtcgacaaagttctttcgttggtgaaccccgaggctcagggctgtagagagagaataagttgagaatatatatgtctagaacacaaaagacaaagtcaagaccgttgaatcactatggacagtatatcttactaactgtgtcaattgactcacggttacgcccagcttattgcggaatatcgcgaccgactggctcaaaagaccaacaccaagcctcagcaatggcacggcatgaggactaagcgtgacctgtacgacgagaagaaaaaagatcaatatctccgccgttagtctgtgacataatgtgtgcttctcacatagagagtcggtccgacggatgctagatatatgacaacgtcacgcttcattcagttgtttgattcacctttgtagatagcataataagaaaaatcagacctatcagggtacagagaagagcttgtatctcttcctctggtgttagtaccggtattggaggtggtctaaacgtccattcggagactcgagcgaaatcctcatcgcgcgaaggaataaaaagcttggtaccaaaatcttcataaccagccatacgaacagcagcgacaagctcatccacggcgaccaaactaaatgtttacagatgagtgaactctcatcagcgaagtcgatagatgactgaacttactaagaaccggccgatatatgacatcgaatgatgatagttacaattttaagctgctcgattgtgttcgacgtgaatttgagaaactcttccatctgacaaacgacggcatagattaggcctcaaagaaccgacagatattcttagttcagaacctagacaaacctttgagatggcggaaacctgatcgttcatgagtgctgcaacgtccgagtaaacttcggcatagaaaaaacagacacttcgcgtccgaatccaagcttcaggctcggaaaactttgcaatgtcgtctgctaatttgaggtagtccattgatatccggattgaggccgagcggctggctctctgtgctgcttgacaagctagcaatacgagctcatcctcgttgtctatttttcggccatgcttggtagcaatgacatagttgtcgacaactgcaaggaaaattcaatcaaaaacgatataatggaaagagattagaacatcaagccatgaaacttactgtcatatataaagtcgactgagaaatctgaatgatggaaacagctagcaatacgaaagtgtgtgttggccatagaagacccagaagataacaaacggtatgaggcggccttgagaaatcgaatcataaccgagctttgttagcagtcctgattgaagggagagaaaaccccgtactcacctgctgacgatcgtgagagaatcgaactgtcttgtcatcaagaatgacgatacccttaaggacaagcgacgatatagcatcagtctttgaatgcgaagaagaggttacggattatgtcaactgactaaaagtgtcgcagtgtgtagcatcacttctgtttgatgacgttcctttccaagaatcatcgcgagatgttcgatcttacacgctctcgattgcaagcaggacaaaacctgtggtgcgggagagatgaaaagttgtcttcatgtaaacagttatcatcgaagacagatagattgaagagatttacctcaagggcttcctgaacattttctggcagtgttttgaggatggaatcaaggaattcatcaactccgacggatgaatgatcttgaagcgcaaatatatcaaacttccactggaaaaggtcgaaagcaaagactaaaagagagcaaagctttaggaacgagagagcaaatcgacaattcgtgagcagtatacgcgaaggtattactaacagatgactccctctcgaaccaaagcggcaaccaaggctatcacacagaatgacattgctcgaatcgttattactagatcacatcgttggtaaaagaaagactcacaacgtaagaacaataaatttccgtctgtttgactatacaggaaagaaaccaagtacggcgagtttgctaccgcagaaatgcttgcctgatcccaaccaaagcatgcacttaagaacttttccacgccctgttcgttcagcctagtaatgtgcagcatcataggagatggaatattcgttgcttctggaggaggctcaagattttccgttcggtacaaagtgatcaggagggcatgctccagacgatttttcgtttgaagactgatgtttctccacctgtctcaagccaacgaattgagagttagagcgcgggccatgaagctaacaccggttgtcagactattttactgccaaactgacaatattaattcctcgggagcaactatcgtgatgtaaataaacacgtaatggtaactaggttagatacttaagaactgggcttcaatcagaggaaattaagaaaagagtcttacgagcttggatatcgtccaacaccaataccaatggccgatcatgtgtggcaaatacttgcaagagcgtcttggaccagatctcaaacatctccgtgaagtgtgtccaatcgatctggccaacctctgtggtggtgtaggccagatcaggatctgataagagcagaaaatccctccattctgcactaatcaggctgaggaaggtgtttacgagattagcaggtaaagcgtttaggatcttctttcgccattcacgagcgtcgactttggggtctgatatgtttatataagagttgccaaggaaggtaagccactggcaggccaagatcgtatgatttgattaaacttaaattgacctgtgaaaaccctgtcgagcagaccttcgaaaatctgcacaaatccagagaatggtttcttcatatgcactatagaagaaatagaacggagtatcggaaccaagttagacaagttagacataacgcgtataaaagagaaggacatatgacagccaacttacaatctaatttggcccaacccaaaagacaacttttccccttatccatatcgaccacctttttcgcccagacctctaccaacttgcttttcccacatccactatttccataaatattcactgagacaaagactccctttacgtttgatatgttaggtccgtcttccataagttcacttgcgggcaggctcgacgtgccgaccgttgatcggcgagcaatagtatgagtggccgatgcggaacagactatgtagaaagctcggtcgagcatcccgatctcattctcccgatctatcaaattcttaggaatctgaaatttggacgctcgattagcttcgccgatgcgcaatcggctgatctcctccttgctgtttcctcgatagcagaggatggtaaatttgttcaagtcgtaaagcactaaagtgaagatataagaaaaccgtaagaacgaacgaaactcctttgccttgtctacattgattttatgaacgtgacgtactcgtttttatacttgaatagcgctcggtaggatctttctcaagacacaacatgatgatttcagcaagagagggtggtacaatatctggtggttgaactttccgggtgatatgacggctttaaagtgaaggatcgagatattgagtaagagtttaaaaagacgacgagcaagacggaagacgtactggacatctgtcaacatgtccagctcggatgaactcatcggctcaattggaacgcctgtcaccatctcgtagcagaaaacaccgaacgagtaaactggagcgggtttttccattgtttcatattggtgataaaccgagactcttttaagctctagcaagacaaactaggaagcaaagagaagtgcaacaagatcgacgaaccatccaatgtgacttgcggcatgattgctcttctcgttgataaaaactctggtccaaggaacctcaagtgcctatgcatcagaatctccgccagcgctcttcccttcacgcctgtctctctttgtgtttcatcctctgcttgtgcgaccaggtatgccggtacttcggtcgcaccaacctccgtagatgagactactggagccaccatgcttgctcgatcgggaaaaattgaaaggaaagcatctcgatcaaatccgggaaggaagactgcagtggacagatccatgagctcgacctggtattttatgggatcgttatttatgctgggcttgatttcgtaatattcctcggtggacatggtctccagtctgattcgaaaaaactcggctcggcacaccggcagagatattttccgttcatgtagtgtctggggatgaagaaagttcaatatcacaccaaacaatgattcgaagtagagcatttcgaaaaacatgttgaaagctcacttactatcaaaacctcagccactttcaaaagcacctcgcaggccaaagcacatcttcgtcctgctttggccaacgtatctctatcgactccagatgataattcctcatcttcattgacctcatgtatctcccttttttgaacacttccaacccaatattcttccaacgtcacgtagtttcgatgttcatcatccactatcatccacaagccttcactatcctcccaaaaagccaagatgctgttgagaaaaggaaggaagactccggacgtggctacattattatcagacgacaaggttccagagatgctagatttaacagatgtattggaacgtctggatgcgttgcgggtgacgagaacacctgaggtatctggctcagaatctgatcccgagtgactatatgtgttggattgtctttcttgggcaaatagattaaacaatcttctgtttctctgaaacaatagggaccctaagtaatgtcattttaaaacagagaagcgatcaagaatcaatacgagaaactctgcagtcaagaactctagatcgatcacaccttctttatgcgatgaatatgtgaagcttcgagcggtcgttttagcaagtcaatgtgtcagatggttcgttcagaatgctccttacttctcactacccatatctgtccccagaagaataatcaaggataaataaaaccaaacatacaaaaactcgactcttcgcggtttgttcctaggttgaaggtctatccgaccgggccaatccaagacctgaaaatcctcggtcggttcccagagggcacgaccggataacgaataatgaactggttggccgtcttctacagtcttcagatctatttgagagagcccttttgacgcgtaatcgggtacgctcatcctctgtcgtagttttcttcgctctaaactgttattatctctccgtcaggaagaagagagaaacagaagaagaaaaggagagggcaacttgggttaaatgtatggtcgaaaatggaaggttacccaagcgatgctgagtgaaggttaggaccggcgattgaagtttcatgaaccctaactgaatcaaacgcgcggttgtgtattgtttattagtcgggctgatcaaattagataacttggccattttgccttgatacgtatatgttcttgcttcatcatatcatgtgtcaacggtccgtcgaaaccaagacaattccgatagacttctatggtctcttcaagagtgaataggaggattgaacaatctcgtggcccactggtttcaaatgtatatagagaaccagtctcagcttctgcagtcattcccagtctggtagagatattcagtgactgcgcatcccttgactaggccgtgttgggttcggtcgtttaacttgaagtaagacaatgtcgatcagttttattaatagcagtcataaaagttctttaaaaatatcagatttggcattagattggcatatactgaagcaattatgtacatatttaaataaaacgaaagaatattatgattatatctcgactcaatccatctcttcgatctccaaatcgtccatgtcttcatccgaggtttcgtcaacttcgacctctggtgcatggtttggctgaatcgtaagctaatcatcacaaaaagaaacagcaggaaggagaagatatcagcacaaagagacatagccaagacaagccgagaaagagagcaaaaatgttagaagaaaaaaacgtaccctgttgttgacatgatcagctgtaaccactgccgtttctaactctcgaacggatccatcaagaacacatcgggatagtgggaagaggatctcggactgcattactcggttcaatggtcgagctccatactgtgggctgtatccagcactcgccaaccattcctttgcatccggctggatgtccagtttgatctttttgttcgacttcagtctcgtttccagttctttgagtcggatatcaacaaccgacatcatgtccgatcgggagagcggattgaagatgatcgtgtcatccagtctgttgagaaattcgggagggaagtgtgcctgaacagcacccatcaccagagatttagtcggtttcgagatcggtccttcaggtgcttcgttcaaataggcagcacccaaattactcgtgaacagaaagatggtgttcttgaagttgatctttcggccttttccatcagtcgcatggccatcatccaagatctgtaggaaaacggcagaaaactctcgacaggccttctcaacttcgtccaccaaaatgagggtgtacggctttcgtcggacggcctccgtcaactgaccgccctgatcgtatccgacatatccaggaggtgcaccaataagtctggcaacagagtgcttctcggtgtattctgatgcatcgattcggaccattgcatcagcgctgttgaacataaactctgccagcgttctgtttggtaagagaagaaataatcgacgaccaataagctttcgttcgactggatatcaacaaggcaaataagaaatacagaagatactcacttggcgagcaacgtctttccagttccagatggtccacacagaaggaaacttgcgatcggccggttcggattgcccaagccacttcgagacaatcggatagcatttgagacggatttgacggcatcgggctgaccgacaattgctttggtaaggattttctccatatggagaagtttctggacaaaatcataccaaaacgaagccgatggttactatctcttcataacagaaagataaaccaaaacgaaacataacaaaatgagactccctacctgtttttctgtggacatcagacgttgagcaggaatcgcggtccaacgggccacgacctcagcaatctggtcgggagtcacgatatcactttctggtacctgttgtaaccaaaattagagtatagaactcagtaccaacacgtttttcacaaagcgagaataaaaaatcggcactcacctctccggcagcctccttctctgctttcttctcttctaacatctgtagccttttctggaggtccgggatcgcatagtacttgaggtccgccgcggtctcaaggtccatccgtcgctcggcatcaagaacctttgcctttagctcgtcaatcttggttcggactgtgttgatctcgtctcctcgagatttctcaaattcatatttggccttgagaggctcgagttcgtcttggagatccgagatttgcttgcgagcaatctcaagccgctccttcgaagccgaatccttctctcgctcaagcgcatgaacctcgacttcgagctccagacgtttcctctccaatagatccagctcttctggtctagtttctcgtgcgactttcacgctcgatgctgcctcatccaacaaatcaatagccgaatccggaagttttctcgaggtgaggtactgctttgccagttgagcggccaaaaccaatgaactgtcaagaattcgaactccgtgatggattgcgtatttttcactgattcctcgaagaatggagatcgtttcgggaacggtaggctcattgacctgaacctgggcaaatcgtcgttcgaaggcagcatccttctccacgtattctcggtactcgttcaaagtagtcgcaccaatacatcggagttttccacgagcaagcaacggcttgagaaggttagcggcgtccatacctccagagtcgcttcctcggccagccatgatgaggtgcatctcgtcgatgaacagaatgattccttgaccttgctcggcagctttctcaatgtcgctcattactcctttaacacgctcctcatactctcctttgtattttgctccactgaaaagaaaattcagtaaaatcgatcaatacgtaatcagcagagatttttctgcaagacaagagacgagcagagagacttacgccatgagagctcccatgtccaagctgtagatctttccgaagagtgaagtaggaacatctcttgcaacgatacctgtatcgtttaatgtatcaaggaaacgaacgctgtcagcatggttgctaatctgaggatttcgtcctacaaagatgatactcacgttgcgcaagaagctctgctatcgaagtttttccaactcccggctgtcaacaagaacgagagattaagtaacacggtccagtacaggcgacacgaaaaaccgagctcacctctcctatgagaactgggttgttcttcgttcttctacataaaatgcggatgacccgtctagtctcattgtctcgcccaatgacgggatccagttttccctcctctgccaactttgtgagatccacgcagaactttgcgaggttttctccaacttcggctcctccagcagcggccttatcggcatctttggagtctactcgtctccctgcgcggagggttgtaagagcgtcgagcagcggttgagcaggaagagaaagagaagcaagaacaggagtcatttgagagtgttgaatgagtggtgggagcaggtggagtggagaaaggtaggtgtcattctagtgattgtatcagaatgaaaaacaaaaaacaaaaaacatctgagtcagtgattgccgtaaataagtaccctgaaaactttctcggagaaagacgtacctgagtcttcatcaaagactgagcatctttgaggagcttgttgataggtccgatagtcacatcgtccggcggagggttttgggcgggaagacgaacgatggctttttgcagagctcgttgaagagcgacctgaggtgaacaacatcaacggatcggaagtcgtggatgagtgttctattgatacaaaaaggtcatgaggatgataggggtgataaacttactgggtcccctccaactttttccactacgctccaaaggacgctttgtttgcctgcgcccggagactctgcagtttgattgggatctgcgagaagagcgagagcgagatggacagggtagacttgagatgatgcgtatgattttgcgatctaacaatgaaacgttcgatgatcagcatgtcgtgaattcacaaaagaggttacaaacgagatttagcaatgaatcaactcacctcgagagctgacgagatagcttgttgagaaagttcagtgaactggaaagagctcatggtgggattaaatgtgaaatgtgtgtcagtgcgtgtatgtatctgtatgtgtatatgtggtttaggtgtgttggagtatcagttggatgaggtgagatgaagaagcaactcaagtttatatagagcatagaaccactgacatcatcctcgccgaaaattccagcgccttctcgaaactatacaaaccactcatctaatccacactctctacacttcccatacagtatgcgtgtgtgtttgtttgaatgtagacatcatatttactcggaacaggttctctcgctttctctcactgtcatggtatcgtccatatctcgagggtgctgttctttccagaataatctgttgagctgttctttgtattccagattctgcaatctgaagtcgcgtcggacggaagccgcgaaaatcaaaaaagatatacagcccttatttaagtcgtcatctccatggttacggccgataatagatagagctgagaggcctatgatcgaacttccaaagaatcaagccagacgacccatcatcgtcggaattcttccgttggccaatactttttcatacactcaggttcctatattcgttccatatggctccccggaagacaggaaaaggaatcgtcaagtctggagcagtgtcctccaaggcatcacctttgccagagaaggcaaaggaaccagctgttcctttgacacctgaagaactcatccatcgagagctaaagcgaccaggttataaggtctgtttgttcattcattgatttatctctcgattgtctacagagtcttatagagagatgctaatggtccgttggaagaacttgtttcataaatttatcgtcccaaaagactccggtcaccatccttgtatgtgctcatcattcagatgtagggtcgcgtctccgacacagaaagaatcttgttcaagacatattcagccagtcgtcaccagctcaaacaatctcgaatgctcaatagtcactcatcctctttctcatcctgtttgtatggctctgacagaatgagaggtgtcaacgactaaattgggaacgacctgatttgatgaccgtacgttataacccaatctttcatacaagcccttcgtcaatcattactttattctcttgcctttcttcgattctctcattacaatacaatcacatatatgtttagcgtcaaacgggctcaacattttcttgcgcggtcaatttaaagcgacatatcaagaaatctcagaattctcctatcgagagtgttctgttggctccgcatcctcctttaactagtgcaaccgctttggaggcacgacatatggccgcggtgtatgcgctctttagattcaactcggtacgttaaaagagaatctatat

SEQ ID NO: 1996 - DNA, 25200 bp, Xanthophyllomyces dendrorhous
tcaatatcgaaaaaggtcttatcgaacgcttcccttgtacttgccctttcaaacatcagggacaacctctttcgatgacccttccacctcatttccgaccatactggacggaacttctcaaagagaaggcttctgcgcccgatcatcgagcttgggaatgggctgacgatcctttcaacgccagaaaggctgtagaagatcgacaagtcaggaagcaagccgtcgaccaggctcgtgccgccgcttccggtggtgggggtagcaatggaataggaggcggtggatctgctatcgtcctcggaccttcgggccgtccattatcgaacgcagaggcttcccaaatcccagaagtcagaatggcgcctgttcttcgagaacttatcgagcagacaatcaagaaccagatgctgaattatccagaagccatcttgactgctactcgagaatcatcctctacaccttctggatcgaacactccaggaacgttcgataccgctaagctggagcagaatctgctagaacttggtttcagaaagagtcatgtaatctctgtcattggattcttgataggtgccagagagaggattcataaagggatcgccgatggggaaggcttggacccgttggtattggcattgagtagactgtcagaggaggaggccgcagttgagtggttgatcttgcatttgccagaggtgagtgtttccatgtctatcagactagatatcctggtgcgcgagagaattgacatgcttgaatgatcgatatattaggacgatctacctaagaggttcgttctattagccttgactttcattcagttatagattgttgcgctgtatgatccaacgctcatcttggtcaaatcttatattctaggtttcgcccatcgacgtctgtcgcagatttcgtttcctctgcccgagcgtcttcgagtaaacaatccatcaaccagtcttggctcgttgataaactaattcacaaaatcggatttcctcgctcaatcattcttgaaattcttaaactccaaggagatggagaatttgacgaaggtcagatgttagaaattctgagtagaaaacttgtaggctgggacgaagatcccgagtggggaatcgatcttatcacggaccgggcagtcacggatgtaagtgagcaagattggtccgagagggacgaaaggcgacaagaagagatcgaagccctggaagctgtttttggagaccgattgaagattttaccaagagattcttctctcaactcggctacagaggtttctatctcgatcccacctcgctatgcctcggaatcgaaggacgacctgacgcttcatatcctgttttcggcttcctccccttacccatcttccctctacccaactgcaattccgccattctatctgacctcaacaactcttccttcctacattcgattacatctctatgcgtctctgctcaatcttttccgggatcccaatcgcgaggactttgcatccattttagcatcgggagatggaggagtcggttcaggattggtcgatcatttagaagagatctgggaagaagctgtagagcatcctccaggcgtaggagaggtcacactgcatctcctgccaaaaatgtctcctgcgcctacgtccgaaggccctaaagcgggccaagtaggaagagtaaaggtgcgaggaaccggagggagaaagctccgggtttacacgaaggaggaaaacgaaaagctgaagaaacggaccgaggagtggcaaggtagagaagagtttaagagcgtgatgaagggacgaatgagtttgcctgcttggaaagtcaaggaagagattctgcaaggggttgagtcaaacagagttgtggtcatcattggagaggtacgtcaatcatgaagatatcgagcgtaatgaagccgtctacttttctctgatctcttgacgcgctcttttttgtctctgctatcaagactggttctggaaagactactcagcttccccaattcattcttggtgagtgctcgatggatcaagtgttgtaccgttcttcggcatcatgagagagaagcaaatttaacatttgagtgttatgcgtcttttcaagataacgagattgcgtccctgagaggttgttcaacaaacattcttgtcactcagcctcgacgagtgtctgctctcggagtcgctgcacgtgtagctcaagaacgactagaagacgtagatagagtctcaggttcagttggatacgctatccgaggtgaaagacgagccggcccagacacgaaactgttgttctgtacaacaggagtcttgttaaggagactgagcagcggaggtgatacaaatctagatggcgtcagtcatgtcatcgtcgatgaggtttgtccttcttacttcttatcgatatgcgcctcatgcaaagtcaaatgcgagatgctgatagataaatcttgaacgcacttaaaaaggttcatgaaagatctgtggatggcgatttcttactgttggaacttcgtgagctactaaaacgcaatagtaccatcaaggtgagatcacttgttcactcagtcattgtgcatggctactctgtgttgaaactgaaatgttttgtattgttcttacaatcagatcatcctcatgagtcagtgaagttatctatcgtacatactggtctaatttcttccgacacctgatgactcgattcttaattcatgtatctaggtgcgaccatcaaccacaaaacattcaccacctactttgagtcccctacaactggtcctgctccccttcttgagattcatggccgtactttccccgtagaggaccactacctcgaggatgttatcggacagatccgataccgtccatccaataatgtgcgaccgacagagcgccagacagaagaacaactcaaatcattcaaagcggagtatgagagtaaaggccttggatcgagtgaaattcagttgttggatactgtttcgagatccgacaagcttgatccagggttggtagctgctgtggcagcatacgcgatcacagagccaaacgctgatggaggtggtgtgcttatattctgtcctggtacatcttaatctctgcatcgaatgtcgagtgataacattcacaaggatgcaaaacttactcttatggctatcttttgttcgcaggtgtgatggaaatcaaccagacaatccaggctctccgatcgatgaatttaggcaaagttgagattatgcctcttcatgctcaactctctagtcaggagcagaagagggtcttcgtcaaacttccagctgaaatccgaaagattgtagttgctactaatgtcgctgagacctctatcacaatcgagtgagtattcatcttttctcctctatttaaaaactataccttctatcccagttcgggtttgcttacagccgtttccttcatcttaccagcgatatcactgtcgtagtagataccggtaaagtaaaggaaacacagtttgaagctgagagaggcatgcagttgttggtagaagtcttgacaaggttaggaacatcgactctttgatttttcgcattactgagacttacatacatacaaatgactatctacagtaaagcggcttcacgtcaaagaaaaggtcgagcaggtcgaacgaaacccggaaaggtatgtatcctcacttgtaatctttttgctcggtttcgatatgaactaacatcgcgctaccctaacttacatcaagtgttataaagtgagtattagctagcatcatgtcatgtcacttatagctgataattttgtttctctctatgttaggtattcactcgacgaatggaaaacaataagatgccttcattccctgttcccgaaagtaagaccttccatgactcacaaaaggacccatatcagatactaataatctgtacatgacgtacacagttctacgtactccacttgaggctctctttcttcaagtcaaagccatgcgaggcgatgaagacgtcaaagctttcttgtccaaagcaatttctcctccgtcgatgccgaacatgaacgtggcgtggcagacgttgattgatctaggcgctgtagaagcggaacacgaaacgtcgaacctgacagctttaggaagacatgtacgtactcagctcatgagaacacaacgtcgttatgcagcgtattgacaattatgcgttgtccaatctttgacagatgtcttctattcctgtagatttacgtcttgcgaaaatgcttgtgttagctgctatcttcaaatgcttagatccaagtgcgttcagttatcttttgcgtggaaatcttggaatatatatatataccatcattctgacttcaagatccgatatctagttgtgactattgcagccatcctttcttcgaaacctttgttcttatcccctatggacaaaagagatcaagctcagaagtaacataccttctccatcagctgttctcttagagtcggttgtgtactaacaaaggaattgcttctgttgatatttaaaagagctcgagctcaatttgttaccgcaaactccgatttgttgaccgatgcgaaagcatacacagcatgtgccgatatcaagggtttcagtggtcaaagattattttgtgaagaggtgggtgaactgaatattgaactccactctcattcatcagttgttaattaagtctttgttgcacagaactttttgtcgatgactagtgttcgggatatcaccactgctaagtcagacttcatcggggcccttcaagatattgggtttgtgccgcctggatcgtctcggacttcatttccccatttaaatacggtaaatatgcttttatattgatctacagttagcacgagcagattgttaacttgaaagtatatcgtttaccattcacagaatagttgcaacgagaatctcgtgaaatctgttagtcactgttgttcacgtctgtattcatgtctcaagtctaattcccgaatatatgctttagatcgtgcttggagggctgtacccgcgtttggctgtttgtctttctcatctcatttggtaaatatataaataaaaagatgttagaactgatccaacgtctatgtttatggcatgatataacagaaagtatccatgcccaaagcaaagttcgagcaactgcaatcgggaactttacaaaaggaacacctcgcaaaagaggtcaagttttttgaccagcaagaacgagttttccttcatcctggatctgtccttttcggagaggcaaaaattccatccgggttcctcgcttactgggccaagaatcaaacaaccaaggtctttctccgagacgcgacagaagttccgttgtatggcctacttttgtttggaggtaaagtcacagtaaatcatttctcgtcaatgcttatgttaggaaacggttgggtcaaactcaaggcgtggacgaggatcggagttttagtgaaccaacttcgacgactcttagatgcttccgtgagttactgatatttctcatcacatccgatctttgaatttcgttcaactcgtatcctgacttatttgttactgttcctataaagctggatgcacagtttgatgatccaacggcgtctacgtccgatgagatcattcaagcgatgctcgctcttcttgtcaaggatggattaacagcttagaatcttagcgtatctaatacatttttgtttttcagatgctgtcttttcaattttcattcagtcatttgtctcatcgaaaaacttgcattgaaatggcgaatatagtggtaaattgagatcaagaggaagagatagaataacatcattatttatggagacaacatatattgcgcaaaaggatatctccctaggaacgaagaacgagaaaggagacacgaaaaagatgaaatgaagaatgaaagatgcaaaggagatgcaagaaaacccattaagacccatccagtaacataaaccaaaagaaaacaaaataaaagattcgaaaaagacgaattaaaacaaaaggacagaatgaaatgaataaatggatgtgctttcaagtcttcgcctctcctccgtcctcactctctcgcaacttagtctcacactgttcctacacaactcattcaaccttgggcttcttctcctccgtcccggccccttcttcttccgcctttctctttacctgcccatcagctgtccccactccagctccaaccatagccacagcactggtatcaatcttctccactttcatcttgtctaacgagagagtgttcgtcgacgacaacaaagcagcacttggcactttggtcgtagatgcagacgtgggcgtaggtgtaggtgtaggagcaggagagggagcttcactcgaaggtgacattgacagaacagctgctaggtcgtccaaactcgggacataactcgtcggtgttgagccaacaccggcgacagcagtagcagttgtcgcagatgtaatcgctgaggttgttgaggatatagtggaagtggaagtgaaagtggaagtggaagtggaagtggaagtggggagtggaggagcactttggttcttgggaagaggtctggaaatgtttgtagacgtagcaggttgggtgggcctaataggcgtagaagtgacaggagcgcggttcaaagtcgatgatggacctgcttttgtaggtgtcactatcgcagagccggacggaagctgtagagaaggccgagccgcaacagatccaacagggcgaacagagggaccaggtggtcttgcttgagttgtagcaggcctaaccggccttaccgctccaactcctgcagaaggtccgacagttctcgttcctgatcctgccgctgttgtggcgactccactggatcttggtgtcaattttccttgcaacagaggtggaacatagagcggcacacctggcgctcgacccgttttgatcaactgagcagccacgttcagatctgctttgtctcctatggaactcaagtactggaagaaagcacctgcatgagggcctagaccggcgagacctagttgaggattagacgcgtaggccgaaagagctgctcgcgggtcagcagggacacctggtaaagtaggcgccgggcgaggttggacgaggggccgaactgtggttgcacttgtagctgcagatgagacaggtcggacagtggatgctgcaggccgaggtggaggaggccgggtatttattggacggccaactgctggtcggaccgacagcgggggtcgggcaccagtgccaactgtgctcgttgggtttgacggtcgaactgctcctcctacggagggacgaatcggaggcggtcttccaacagcgtttgttggtgttccacctggtcgaacaccccctgtacctccagtaccaccaccagccgtagaaccagcacccccggatttaccttgagcgtccaactttgctttcaggtgatcgacaatataagccctcaggatcttcaaggccttttcctgacccagactctccaaataatccaactgaggtcttggaacatgagaaaagattgctggatcaagcaatagacttccttgatacatcgccataggagtagactccaacaatcgatgaggaggtgtggtttgaagatgagctggaataggcgaaacgagtagcggaagtctagtattcggagagattgtgagtgtccgacctccgttcaagggtgggcccccagttccggtggacccaccacctgccggaggaggtcgacctactgctgttgccgtggtaggaagtggtcgactgggttggtttccaagggacgaaggaattgctaacggtttgtgtagcacattgtcacccaccgaaatcggttttccagccagtcttccaacaccatttgagggatacgcatccggtacagccaatgaaggaattcctcccggccctgcttgtccgacgttgactccacttgtggatgaagacccgatcttcccatctttgcccatctccttttctttcgcctttcgcattttctcctgcttagatactcggtttttgatttctgattcggcagtcgccatgagggctccttcgcaagcagggtcgagtttccagtaggcacctgcatttttgggttgatctgggcgaagagggactttctgaaaggcttcattggtggaaagcgtatgcctcaacgagttctgtttcgccgatgaattaggaggcccaaaagtcaaatgcagatgtcaatttgataacagagtcgtacacggcaagggatggataagcctagaagacagacaaagaacgaacctgccaaccactgttcttgttcacccgataccactcaaactcattcatgatccaatcacagatcattctcaacgttccctggttgccttcaaagctttggagactcaacagaatggctgtgttgtacgtcaatggcggtttcgcagcctcaccttcttctgttgtctggcccattggaatgagcgccgagagtggattggcgtggagaggacgggtaggtggtaggccaagattggagctagagttactattcgttcgacggatacctgaaggaggagagacagacgccgatgctgtaggcgagggggactggaagtttccagtcgaggcggataacatatgagcagctgtagaagatgcagacgccgaacctgagccagagttggatccagaggtagaaccgtagtggatttgatgatgatgcagcaacgccgcttgctgcgagagaattgtcgacgacgagatcggcatctgagaacctgatcttcctgttgatgacatattcgatgaaggatgagtatgggaagggattggtcgatgtgatgttgatccacctaaaatttcggctgatgtcaatgggacttgaggtcgataagttggccctgtcgtgatagatggtgatataggatgtggatggttcgttaaagaaggaagggactgaggtcggacagcttgtcgtaggatcgatgtgttggcaacaagaggctttgctccaccgccaagcgcagagacagacctattcggaccagtaccaactgttgaatttgttcctgttgagccgcttgttactcggctgggtagatttacgctcgagcccgcaggaccaccaacagacctggcggtcattggggtagtcgatattccagtcccgtttgataggacggacggagcgatctgacctggcttaccagttgatgcaggttgtacccctcttgatgcaggacctgtcaaaggggccggtttacccgtcgacacgtttgtatgtattgttgaagcagaattcagaggtgaacccagagaagctgaaggttgcgaaagttgtttgacaggtccagatcctgaactttgggacaaaggactaggcactcctcttcccatactaacaccactggaagcgatatgttttgtcgaagtgttacctgccgagtcaatgacaacagtagaatctgtggatgtcgaatttggtctatcagatggaggcatactggtagaaaccggtgtctttggagggttctgcgatggagaagatggttttgtgattgtagagagtgcagattgaacgaccgatgagtgattagaatgcgacggggtctgagcgtcagaaggataggaaaggatagggagagtcggtttgacatctgccgactgtcccgttgaagacgctattgtggttggtgtagaaatcgatatagagcctgtggaactggttttcgagcgtcttggcgctggcgtctttttcgctgccggaggcttcttgccagctgttgtcggagttgttgtcgaagccagttgactttgagaagccgtgactgtcatatctaagagcacataaatcaaacagtcagtcaacgtggcctgacaagaaaggctgaacgtcaaacgttgaacgaaaaataagttaccttttgatttatttggagaatccacgtccataggtgacgaaaaagatccaaacgattcgacagaagcagccactttgcctttggtcttggtacttgaggatggagcggctgaaggagaagcttgacctgataccgaggtagacatgttagattcttgcccaggatcaggagtgagcaccgggagaaacgttggtttgatgtcttcttctacagcagactcttcaagttgtgattgtggtatggaaggtatcatggaagatagcgctaaagacgaattgttggctgcgtccagaccggaagtagttttcgaagcttttgattttgctttcgattttgtttttgtcttgtccgtctgctctttctttaattttgttttcgtctttgtctttgtcttcgtcgaaggcggcattgtcggtggtaacggtggcggtgagcgaggcggaggggctacagctgtgatcggtacgggcggaggtagtggataagattgtgtcagcagtaaagaagctgacggaattgaaggtgatggagtcggcactggtataggtgacggcccagcaaggtatgggctctttgtcgcgcgtggccgatttgtctttgaggatggtttgagcaggctcgcttgagcaagcggttggtcatcttcagatgaagagccagatgaggatgagtgtgatgaagaagatagggatgaactggaagaggcggaagaagatgaaccggatgaatgacgggatgaagacattttcctcgacaaagacgcggcagcagaagaggcagaagaggaagaagaggaagaaccagatgagatagacgagtctgaagcagaggcggagccgtcgctgtcttcatggtgaaattccttggccgcacttgccctcttgccgccacttgctctcggagggacagcatgatgagacgctttcccccctccgacatgaaccccgacaggcgggcgaacactacttggcgctttcccgcctccgttgatcttccctccagacattttggcgccgaagccagttgctttgccttttcctccgcttgacttgccgcctcccgaagcgttcccaccggaaatctttccacctgaggcctttccttttcctttggatggttttgcggttgcaaaaacgccgagatcgagttcatcgagctctcctagcaaggcattatcggggttctcagcgatcgcctcgaggagagcgtacgtggccggagagagcggcccagagtcatccgcatatgtgaattcaggaagaccaagaggtgtcgatggaggtggtgaaggtgagggaggaagcacaaaggtgaatgtccggatggatatttgaatttttgttctatatgaccatcaagaatgaccaaaatgcatccagatcgataggacatatggacgcgttcagtcaagggccaacccagcgaatgattcggaaagagagaaggagaagcgtacctttcgttcaacacggctctttgacctttcgcaaagtactcgtcttcaacccatgctccattccgaccgaacacgtcgaggacgaagcagccggattcgtcgtcgtaactgatcctcgcgtgtaatctagacaccgatttgatagcccctagatcaacgtcgatcccttggttggcatcctgtccggtatactcgaagggggagggaaggagtggtgtcggtggaggctgcaaggaaggtgccgtgggaacgataagcgaggacgatgtcgacaacggtggacttggcggtagaggcggaggagcgggtggatttggcggctatcgttaggggtacgacgcgtgaggaaagcgagattcaccatcatggttagctgaaatgtcctgcaaggttcgagctgagcagttgtttttccgcgtctacgtggtattctgacgggaaacgacgcgtttgaaagaggacggagggaaagaaaaaaaagaagaaacgaaaagaaggaggaaagagacttgccaaagttcttctgccgatagaaacggacagagtttgaaggtaataagaaaacccagggaattcgagcttaaagtaagccgagatgggttctgtcgacggattggttgctcctgcgggaagtatggctggtgcagctggcgatgttgacggtggaggaggtggatgaggatgatgtgtctggacgtgtggatgggaagaagaaccgaacgcggagtgatgaagctccggttgggtcgatggatttagcattggtccggacgtcaataagagaaagtgttcggattgaaaaggatgctaagtagacgatcagaaacgcatgctagatgggaaatagaaacagagagacgaagaaacaagagagagaagaacaagacgtggatggatggcagtccgggtggtgttggacgaaaacgggagaagttgttggttgaggatgaagaagacgacttagataaattctttcgtagtcctctgaaaaaacaatagaaaagttctgtagtcatttgtagtgattcatagtgtgcgtgtctaataggtctcgcattacgaatcaacctagtcagtcgagatcgagtttgtagttcgatctgtagtagttctgtcgatgcctgttcctccttcttccataccatccatccagcatataccccatcctaatcatcatacatcaatatataccctcgtctttctctttctttccgtctttctttctctctccatgatagcatgggctcgtatatgaatataaacattgcttcaaacacatctcaagccgaggtcgacgccattgcctcaaacagcttgccatcggcaaccagtctcgacgcgtctctgggaacaccagagatcgccgtccatcttccagtcatccaggtaccagctgttcaagatgttcggactttaacatcaaacccatcaatctctgatgttaatcccttggtcgggtcgttgataccacaggttgcgttgggcagtgcctcaatgggatctgcccaaccaggaaaggtgatcccaaatcacaactcacaagacgacgcgttcatgatgaattctacttctgtcgtcaatccggccatcactcgacaaaacctatcctcagccttgagtggtactccttcgttccagaaagtttggtcaaccgtgtcttctctgcctcttccaactcagatagcacgtccgactcatccacccaggccgactcatccgccgaggccttcctctgtccttcctacacctcattcgcagccagcatcgttcaacagcaaagaaccgatcctgaacagtgcttctgctgtcgtcaccccttctgtattctcctctacgtcctctctatccattcaaactacaaatgctggttatccttcccttcaaactgaacaatcacaaacctcagatgaacgaccggctagagccgaggtgagaactccgaccggaccggacaaatcaaagatgaacttgccgagagtttcgttctcagttgtagaagacgattatgaaacttacagagttcctcaggatgcttcagccctgagaagcttcgggtgtgagtctggattttctcgtactattcagccgtcgcagacaatgctgacccatgtccgccatgcgggcgattgtttggagaaacttagtcagagatgggtctgaatggatgaaacctgagcattacatcagttacctcggttcgtacgggagccgttttctgtatttccatattagcattcgaagatcatgtctttcttactcctcgtctacttcggcaccataaacccagagcctatcgaagcagacctcaagaatcaagttgaatatgatgtcgatgtagcaggtccgtcgggtttcttactaaaccggatttactttggacaggatgaacgttgattgagctgataaatgtgcattaaaaaaaaataaaataaaaaaaacttaatcaagatattcactgggtcaatgcttataatgaggagagaagaaaggcgaacacagatccaatctctattcctctcttcgaggtggtcattgacaggcttgaaaaagagtggtgggatctcgtcagtcctttcatggtcgccttctctttcaaactctcttacacatgaggcttggatgctcacacaaactgaactctgcgcgctgtcttataatgcaaccgtatcgtcttcaaccagacaaagaaccttccgaatgctcgtaattcggctccagtagaagacgcgccttgtgcgatctgtgacgatatggagggcgaaaactcaaatgcaatcgttttttgtgatggctgtaatcttgccgttcatcaaggtttttattctttctccgtttttctctttcttcattaagcactccatatataacttgcgttgtcattgtcgctttagattgctatggggtaccttacattccggagggacaatggctctgtaggaagtgtacagtttcacccgaacatcctgttgtaagttctatcctccaaactcccttccaaatctcgatttttggtatatttgtcttacggctctggtttcgatcatcgaaaagtcttgcgtcctttgcccgacggagggtggcgcattcaaacagacatcagcgggacattgggcacatctgttatgtgcaatttgggttcccgaggctggagtcgggaacgccgtctggatggagcccatagacggtatcgaagggatctcaagacaaagatggaaattggtaagtttcttctcgaacagaccgtccgtgtcagctcatgtctgaacgctagacttacgcctttattccgtggtttgggtcgggccccctcatttggtataaacctcaaacaagaactgttcgctgtgcagactcaagacaggagcgtgcatccagtgtgagaacaagaattgcttcactgcgtttcacgtgacatgtgctagagaggctgggttcctcggcagcatgaagacgtacggcggtggtggagatgaccttggtgggagctattcaggaggctcaggagggatcctgagagcttggtgtgagaagcatgctcccgttcgtctctattcttacttgacgcttgcttctctgatgaattcagtctttcgttgacctcctatcgtctatttttttctctttcgatgttcaatgtgatttcttcaggccagacttcttgaatccaacgctcaaaaactcgctctatatcccaaggcgtcatccagcaagacgaaaaagtctgctcaggctcatgccaataaatataggccacctgctcctcgggtacctgcaaaagtccgggatgacgtcctaagctatgtgggtaaagtttcgttgagaaagaagaaagaagcagttgagtcgatcattaggtattggtgtttgaaaagggagtcaagaagaggggctccacttttgaagagattgcatatggaggttagttgatacttcgctcaaatgctttcagttatgaccagagagtagattcataactactaacctgttgtgtatgtgattggtaaacgtttccatatatagccgtggacagcggctgacttggctcgtcaagagaccgatattgagaaagcccagcgtcacgaggtactgtattttctgcttttctttcatcttctttaacccatcaacccattcaacttgtcataatccttcttcgattaacatggtgtatttacatacgacagtatctatctcgactccgaaacgaccttgaatctgctcgattcttatgcgagatggtccggaaaagggagaaagagaaaatcagacaatcagagattctcagggacgtggtttactcaatcctattttctcaggaggaaccgttgaaagtgtttttgaagaagctcaaaaggtaatattactcatgcgtttctctatcgctgttgactacagtgtatcttacgacgatcgtggtttacaatttgctataaccgaacttgtggtctcttatcatcctatcagtcaagacagatcccgtttttttgaagtactcgtgtcaaaagtggaagtacccgactactacgacatcatcaagacgccgatggcgtttgaggtgattgagcgaaagatcgaggatcatgcgtatcacaatttccaggagattaaggtgtgtacgcttacctcgaggactggcatcgactctttttactgatagttttctttctctaattcaaacacctaaggacgatgtgaatctcattttcgataacgccgtgctgtataatcctccagtctcgcccatccacaagctctccatccgactgcgaaagtacgcggaaaaacttctcgctgatcttcaatcggagctactttctattcttggaccttctgtcttttctgtccctgtagatccaacgatagtcggcaacctcgatgcacctactgaggttcttcaactttttgaatcgaaggattcagatgagtcaagatcattaagtcgattattccaattcaccgttgagcgaacaccttccccctcacctccgccgccacctcctctgtccgtttcacctgagcttgatgttgagcacgaaacggcaagggaacccaaaagaaagaaacaaaaagtggcgcctatcgctagacagagcagcagacggagtagagccagccatgtcgcgttccttcctatgcccgattcgtctaatatttctgctcctctacaccctaccgactcgacagaggctgctgctgatggtgacgacgacggtgagagagaagtagttaagccagctgtgacacctgtgtcaaagaaaggtcatcgaaagcaggcaacggtgatcggtcaaacgatggaccttccagtgatcaatccggacgatctcgacaacaagagcacgtttagtaactttgagactgggtggattttgccggctggttcgttaagaaaaagaacggcaactggttcgagaatgaatcagagctcaaccgtcgcagccgcagaaggacttgagaggaaagcttcctccacaaggctgaagagaggtcagacttcttcaaccaagcccttacatggtgagatgattctccctcttccatttctgctccttctctttcactcccatagacttctatttgtcggtctgttggtttgctgagttctatgcctcttaaatttcccaggtggtgctgaagttataaaggatctgccatcatccaatcctcgctcgattctgtctgctgtaaagccttctggatcctcgccctcacatacgccccccctatcttcacctctcaaagcccgatctgctgtccaaccttctccaatgtctatttcgacggcgatacctacgtcaacttccaacaagttagcggtcggtctgtttgagaataacgatagtgaactgagtgatctatcgtcagacaacgaatcttctccggcggatgatctcgatgggctcggagaatcagacgacgagatggatgtcgatcaagatgaggaccagggaatggggacgaatgaactttcctccaggagaaagaaaggagaggcgaaagttgatgatcagccaacaatgttaaccgagtctaaaacaccaaggtcatcaaatcgattcggttctcagaagcaggctgaatctaggtattcgccaacatctcatccgtctgggtcacctcctttgaatccaagtctagtgcaaagtcccgacgggatgatgacacatacattgatctccaaaccaagattgggattggagagtgcttcgaaaattggtaatcaattgtctactcgagaaatcgcttcgaactcggattcaaccgctagtggtcagagacggtcttctcgaggaggcttacaccaaacattgaccgttggtgatcgatcgatcgttgaaccagtctcccctgtccgtcgttactctcctcagacgtcgtcggattctgcctcgagaccgatgagatcaactcgacagaggccatccctcacatatccaaatccctcggcaccttctgctccggaaggagaccggcattcatctttgggaagaaatgtcgctgaaggagctgcaggagccatcagaccaaacgaagcgatgatttttcgggcgatgtccttcaggacaagaagagggtcatcgaatgccagtgggattgatgcgactggcgatcttgttagccagtccaagccagaaacagagggcgagtcgaaattccagtcagactcaaaaccaaagtcgaaatcagagcagaaccgaaaagcgcctcggaagtcaatcttccgatccaagaacaaaaccgcccgaataccttcccggcctgatcttcgtcctgatctcgaacacggagaacttgtctgggcccgagtacctgggtatcaactgtacccctctcatctgattatcttggaagagatcgaccctgacgatccggacgaagatcagatacctacctccgtagtcaacgctcgaccgaaaaacaatatcgcccatttggtcagattttatgatgcccaaatgagttttggatgggctcaaccgaatgatctttacaaattgggtgaagacaaagagttcgataagctgctggtaacagcaaggacggtagctgcttacaatcgagcgatggagaacattgaggttccactggagccggatgcggagtcgacagagagagaagcaaggagtgatggagagaatttcaagacagaggcggtgaagattgaagaaagaggaggtgttaaaatcccgttgggacattcagctgataaggaagatgaagatctggatatggaggttgatgaggaggaaaaggtcgacaagatcgtgggaggtcaagacactttgatttctggtgatgctcgagctcgaacgcgaccacagaaatcgcgtgttcagaaagaaccaagacggttggtttcaagtctctctcacacccttgtatgcttctctactactcttgtgtacggttctcttatcattgtttcttgttctaattaaccacttcacgaatcagactgacgaaagcgacaagtccagacgaacccgagagtgaaccgttatctcagcctttgacgcctctcgaccccgaatcaccctatccttccagcattggatctcccattgatccaaaagagacgacaaaaacatcacggtcaagatcagagtctagaagaaggtcttcaagacggttgaatgtatgaaaattatgatcgaaaaatgatttgatgtgactttttttttgtatcggttttcagccagattcgttcatctaattgaggtgttgaagggaaaaccttaaatgaagagggaagaatacaatttgttgaaaatccaaagaaaccaaagaaagacgaagaggaattcctagatcgtgggggaaagagaacggattggcatggaaaagaggaagtatcaagcaaaataggaagcgatgggtaagagctaaagagctcattggaaaggaggaagggaagtgaaagagggcaatctaagagatgtgtttctatcgatccaaaagtcaaacaaagaagagagtgaacaatagagatgattcaggaatgaataagaaagcagagcgagaaaaaaacattgaggcgtgttaacaaagagattgagaaaagtaaatggcaagtcaacgtgaaagaaaaacaaattagttgacgaaatagccggccctgtcactcgccctcctctctcgtccccttttgcctcctgttccccgttctctatctggacctcctctcgtcatgctacttgagcttggtctgacaggcaccgaagacatccgtgctgctgacgatgatggcggcgggaaagaggaacgagaaggagaaggagaccgggatggggaggaaagaaagggtgatcgctcgtcttgatcttcttcatattcttccataaactgttcgtctagttcgacctcttttgctcctgtgtttcgtatagttcacaaacaagaggaagacagaatagtcagaattagatgaacaccagatcaggaaaagtaaagatatagcgaaaccaaccttcaacgcccataaaggagaaactcaacagaacgagaacagctcccattatagcctgccaacctccagttgaggttcctctgaaatagtctccgataagagcaaatggaatagttagtgagaggccgattgtcactacaagcggcgtcgttttgagcatctaagggacccgccaagtttgaagattagctcagtctcgccaagatagaaaaaaggtagaaaagtgaggcgaaagaacgcacggcgatgacatagaggtaatcggatataagagtgatacacatgttcgctgccattgtcaaccaagcaatttcgccggaggggatctcaagggtttcccagcctgtgaaatggaggacaagtccgactggccagaggagaagggtattaaacaaaccgacaaaactgttgaccgaacgcgagtcgaatgaaagcaattcagcaaggaagattataaacatagaaaagaagaaacccacccaaagaaaagctgcatgtccaccctggcttcttctccaatcctaacttttagcaaaacaacatacattgcgtagaagaacgcagagagtaaggcgagcgcgtcgccgtacatccggtacgtatgtggtgatgatgagacgatccaagaagcattggaagtgaaattgtctggtgtagaggatgaaggagctgaagaaggaagagcggggcgagcggttgaggaaagagtatcggctagagagactagaaggacgcccatgaaactatccagatccattgaaagatgttaggtcagaaacttagacatcgagtgatgaaaggggattaagacggacgagatagtgaccgcgatcatctttgatagtgtaaaggtctccaccctgaaaagacgaccaattcctaaagtaaagaagcctgacatcgaagcgaggattgttctgtgagggaaaggcatagtagaaggttggaatctatcgcgctacatggaaacattctgaagagagagtagagagttggctcacgaagaaccgacagaagtccactccagtgacttgttgacactccagttggccgcgaactagatgaaccccggatagtatatcaaaagatagattggaatcagaggaaaaatagcgaacgcaaaaacaccgcacttctgtagcccacaagtaaggtactcacccaagctccacaaaacaaaactgcgagccctgccgtttctctaacacttaatctatcaattccttcccctccgttgacctctgcagagatacataccgaggagtgagccaaaggcggatgaagggtcgccatcggacttaaacttctccttccatcaagagacatgcttcttctagctgagagtgatctcgttctacttcttggggctgggtggtatattggtgaggatggaggggaaagaggagccataggaggaaagaaccggcgtttgaagaggaatggaagaaggtagagcgtgaaggccgaagtgttcatatatgtaacgagaaagggcttgttgaaccctccagctacatggaagaggaaagtaaaaaagattttgttgagtatctgatgtgcaccaaagaggtggaaaggcagagacatagacgttgaaccaaccaaagaggtcctacaaggtacagaagagatagcaagataggcagatcgataaatggcatattcaagtgagcatgaatatttattgaatggactggaagcactgaacattcatcagaagcagacaaacggcttacagaagtgatgaaacttgaaatgacccatactgtgagtgatcagatcgatatgaccgaggcccaaggacaacacagaagtggtagcagcaacagataaggaaggctttggagtcagtccctctgtgcgcataaagcgtctgatcggacactattccccaaacactctctgacgaactaccgagaaagaagagatacgaaagaaacgcgtacaagagacgacacagagtaataagacaatcccggtcatgtaatcccttgaagcctcatccttccatgcttccctaagcgtgatgaaccaggtcggtatgcgtgaccggtgcgaaggattatttgtcgtcgtcgtcatcgtcgttggttttggtagataagcagcctttctctttgacgctggattcaacagggagttcgactcagtaggagccatctggaaatgcggagagagaagaacaagtggtcttggactagactgatgtcttcaacttgtcgctcgtgtgagggagtgagaaggaagagaaggtgaggaaaggtgaggaaatacttgggtgctacgagacaggtcagtcacgtgatccggatgatccgcgatggcgacattggggcaaatcaggggtttgatctggggttaatttgggttcttatgggctctacttacataagcagactactcggtatcaagttctccttattcctccgtttctctttgcacctcattctcctcgacctgtgcccttcgacctcatccggtttctttcctctttggctctcgtgacattgatactccctctcggttggttttgaaacccaaaaaacctcaagctgccctacgcgcttttccttacttttcttctctcttcttgaacttgtgccagaggtatgtaccgcctttgctatgctggttttttctttcttttctacctctatactaactttcttggcgttcttcgaatcgctatttaatcattctcagccaccctgaatcatccatcatggctccaatcctacactcattcaaccagaacaaacgatctgttctctctaccctctttctcctcacctttctcggctcggtagcgaccgtggcgatcccttgtccgtcagcgtcccgatctggcgcccagcttgattcggaactctcacatggtctaggtgtcggatcaaactcaagtagggtacgatcgggatcaaaccgaacgggccaagaatcctgggaagagagagtggttgaggctaggaggctagccagactgaaacacgggtttctggaggaacgttaacgtcgacttccagatctagtaaatccttgcctgcaaattcttggggtctatatcttggcttttcaaacaggaaagactcgaaattatcttcgtttgcggaatgttctttctactgtcttcgccttcatttctctgtcttttgtttccatcagctcttcatcagctctcatcaacacgcatctcatttcactcaaggtatcgactttcggttcatctcataagaatctctcgacttcctatcacatcacatttaaaaagggatctttgtcggcccatccttacatctcgtgcatcatcctccttgttcataatacacactttgattctctttctctccgtctttcttacctcacttcttttgttttctttttttctcttcattttcttgcggctttggttatgttcttttcttgttgttagagtatagagaaagaagattcagattgttcttccatatataaatattcgcaatttatcacctacatgcagcgctgtttgaatctattcttcgaagaggatagaaaggggtattttgtaagaaaaaaaaagaagaggaaaggttcttaagaagacgagataatcagattatccaagacctttctccgttccttccttattttccgccttgggattttactgtcgactcgattggctaaaatcaagacacgccagatatctgttctacgaatttcctcattcgttggatgtttgcctcagacagacgtcatcccctgtataccctccattttctcacataagtctcatattcacgttatcatcagcttgagaaacagacaagagagatcacatatgtataagacgtttcttctgttgagaagaaaaacagaatcgactaactaactaactgactgactcgctagctagctacctggaatttgcgaaactataaggtaaaaggaaaacgggattcagagcaaaaagttccaaaacccaccgtccccgtctccttccctattcctcctctctctatcctctctctccaggatctctctctgcgcctcctcttcttcagcccagtcaacccggtcacctctgtccaggaccctgtggtagaacatctttgcttgtgcgcttagtcctgccgggagagttctccttgtttgtccttgaccttgaccatgtgcatcttgtggcgccggcgccgactctgccaaagatggagaaggagaaagactacctacccgttctcgaatcagattctcccttcgccgaagagtagatcgtctgaaggcgtcgagaggtggtaaagcggatgtgacgaataagaccggaaataacacaactttcaaccataaagggaggcatccgctgctcgtcagcatctctgttgatgttgtttctgacggcgtcgacgatgaggaaaatctcagcaaggcagactcgcgttccagtccaatgagcgccactcgatgcaacggtgtcggcgggactggcaacacaaatatcgtatgcgattcaccatccgccgatccagatctcgtctccggtgccgatcctctaccggctcccccggctcccccagcgactccgcctcttgtttcatccccaccaacctgagcacgtctgatctccaaaaagccttcgtacatccaccaacctaacagcccaacagcccaaacgatactttccattgtatcttcctccctcgtaaacacataccacaccaatgcgtactttacaaagttcattcccagtaagatcatcgccttgatcatccgagtccgtacttcagcagagacacccggggctaccggagcagctgctggaatagttggtgtgggctcaatatgtgaggagaacgaaagagggaaggaggggtatagatgggtggccaacaggttggtaagaatgtcttgacggcttgagtaaagtagatacgaatgaagcgccgttctttgagcggtcgataaggtggataatggtggaaccgagagttgatagggcatatcgctttgaggaacaaggatgaagttacctaaattagctcacgcagtctctctttccatcaatagacccttggtgaagcttactcgatgataatcggccattcaccaccttccggacctatccactcctctagacgacctcggtgttcacttccggctccttctaaaccactctcaattcctagattggttacgagcgcatgcaccaccagtctggccacatcccacggaacgaccggtggtggagacagatcctcccatttgttcatcgactgtgttggcacattgataaactgaaagagggccgactgagattcaaacgtatagaaagcaagagcgtccgttatagatcggtagaacgatgggtcgatgggtgctgtcgatgtatatggatatgaat

SEQ ID NO: 1997 - DNA, 9645 bp, Xanthophyllomyces dendrorhous
ccagtagatagctcgggtgttgctgccagttcagagctactaggtccagagagcgctatagacacatcatcattccccatattagctgaatgactgactcccacagacgaagctcctgtcctgtttggggtcgtcttcgatgccctcccatcaggtctcaaaaccaaatgaattgtatgagtctccccttcggtatcctcctctccagaaccaatcactccacccagtacgtcctggacagtttccgtgtccgccaagagtcgaccagctcggacaagtcgaatatcatccagagagggtgagaggggatgacggagtgcgatctgggaacggatgtggttgatcgagtctgtgggtgatgctcttatttgaagttgatttgccgtcgctgatggttcgaggaggtgaaggacaaccatgaattcttctggaacaggtcacagtttatggatgcttgtgagtcgattatttgtaggacgagggtgtatgaatatcaaagatggaggttctttcctgttggctgtctggggaaggtgacgatggtgagctggcgggctgcgcagcaaatgatttagcacgtgacccacacgcttagcgcaaacagagcgatacattcagactcgaaggcacagcgacaaaagggtataaaattatatctcatgtagtgtgaaattaattgtagaggaagaggtgcaatgcaatgtgtgatatgaagcagagtggaaggatgtgtttgtagtcagaatataaaacggaaaaactatgggcactggtcgtccgcgcccccataggagtgacagagaactgagaagcaaataaaagcccaatgtagagaataggccaaagaaacaagagaagcaaaggataaacggatatgcaaaacaaagacacactcagacatcgtcagaaccaagtgttacctctcccctaagcttcttgaacatgacgtgatctcgctctccctcctcctcttctttctccttctcgccatactcgattctatcaccctcgtcttcgtcctcttcctcctcttcatcaggaccaccgtcacccataatcaaccggcccaactgcgccgcttctggaccgtatccaaaatcaagcgctaactcatcaatctccatctcctcatccttcagatcatatacatcctccttctcttcgttctgcaacgattcaacaaacgcgacgagtttcgcagatgcctttgtcgcccgggcctttctcgatattacccctgcccggagcttcctcttgcccaacacagattccaccccagctgccagttttctcgcttctcgttcctgatcggttcgtcttctcgacgctcgcttgacttccagttcatccacaccatcgaatttgccctcttcatcccacaaccgttttatgaactcgacctcttcttcatctctcacatatccttcaagttcgccatctaagaagagctcatcatcgacaatgtcctcgactccacccggacgtagagcggccagcactcctattgtactcttcggtgctacatgagcaggaagcggtcttccattctgaccgtatccgttcaagatatatcgacctagctcggtcgagtcatcttgggcgtccagtacggaacgaattatatccggattaagatgactgtaaggattctttctacggtagtccgaaggtcggtatcgcatgtaagcctttggtctcatacctgtacttgctttgcgagtagcataagttgatgatgactcggctacacgaacagaatttgtgccaactaccgaaggaatagggcttgtcaacgagttgatggatgcaggtgcaagagctcttgacattctcgatgatgagcaagaggacaagtaggagttccgtttggaacgaacaagttcagtattggatgaacctagagagggggtggccgcaggagaggttttaagcttggatgagaatggagatgcgatgtctatcaacgaaggcagtttcgtagaggagcaaggtgacagtcttatgtttggcgtacaatcctgtggaggtgatggccggaatgcagaggaagaacgagaggtagatgaagcttggacggaaggaagcaaggaaaacatgtccacatagatctctgttccctcgtgctcaccagattggtgatctgaacatgagtactccgagatggattccggtcgacttgaaacgggatgttcgttttcggaggattgaggccagataggtggaaacgcaataggggtatcttctcgggcggattgttcagtagagatgatggtaggggcaggggtgaggatggtggcatgagtggaacagttatcaggactagcagtagtagttgtcaacataggaggtgatgttcgttcgtccaaagatgcaaggcatgtcgagccaatagatggcgcttcagaaggtgatactagcgggggaggcgagaaaatcttgtcggcgagattatcaacaagctgagagtcaactaaatcgagttcgttttcagaggcgctcggaactgaagttgttcggagacacctcaaagggcctgttcgtccaaattcagaagttttttgaatatagagatctatagattggaccgggttgtttggaattccccgagcctctgttggtttaatgattacaccttgacctacatccgatcttggatttggtttaagcccatccttcattggatcttctttttcaacactctcgtatgcattatccttcttctcctgttctccatcactactatcagaagacgaatcgctgtctgagagatcgtcccacgtcgagatctcttcgacctctgacccaatagccgcctcctttttccatcgttccaggtcttgattggatatgctctggtcgtggttggtcttattcaacacctcatccgtcatctggctcgggctagcctgttcaaccccgagttccaatctacgtgcccaaaccaactctttgttctccaacaccaacttcacgagcgacgcaatctcttttctcttcgaaactacccgtcgtgcaaccgtgcttttcacaaccacctgtctggaggagaggtcatacccagggatatactctgcccaatccaagaaggctttacccgcttctcgataacgctccattatggtgaacgttgccacagcttcgagtttaccgagctcgttggcaacatctgtcgctttaggcatcggagcctcacatgttccttcgatagcaaccataatcacagcgatagataccgccatagctgctcgaccggcgtagagatggattcggtcgaaccaatgaaagagtgctcgggcgagttcgaacactaaggaccagtcgacctttttaaggtatccaacagttgttcggtcgacttcgttcttgttcactcggcttaaccaggtggaatgagtgagcgctttggacggatcagaagatatgagcgagaggtgtgccaccaggcgtggtagaaaggatgccggtgttatctcgagtaggttaacggcttgctctcgctggagtttcataaacactctattcagcttaagcagcttgaggtcggccgcatactgaagagatttatacataacgtaagcgaacgaataacagacatatcagcaagacaatctcggtccagagttacataaaagagttgaaaaacgcacagctatgtccttcaacgtttctgttctctttcgttcacgaagagccatagcgaaggcagcgcatgctacgtaggtcgtcaaattcttgatcctgtacactggcttgatggcatccgaggcaaggtagatgaactgagcacgctcgaccacgttattggctctgaattgtcgacctagagactcgatcaagtgtttcgatgcggtctattgaaaagataatgagaaaagttcagctcttcagcatagtctacgaaagcaatcagcaagatagggtgcttgtcatctgttgaacatagaaaagacaaattactcacgtttctttctaatctgttctgttttgctgtttctccttgagccgtgaacctgctgacgctgctcaccgaacccaactgaactcggctggtaccttcgaaatatgtgccttcaccctcgcctagttcacgatgaacgagcgttccagctgaactgccaacgattgttccacaggactcgcatacagtttctccgtacgtatcagacagggtgaaagacgatccggaacagtttggacattttttgtcttttatacgggactgcatcgtgacctaaggagtcgaagtggaaccgaccagggggaaaggaaaaggcgggtggatattgaaacgaggacgaagacgagcgacgctgaaggatcaaagataggtccgtcgtcgctctcgatattcagcacgactgatactcgttttttcttatatttctagtttgtctctctttggagtacaaagagcagggtggagggtggagggaagctctctttacacgaacaacctaggagaagggtggtatcaagtttcagaaggtgagctctaaacgtacttgttaaaaagcaggcaagacatctgaaagtgccttccgaggctggctattggattgagagaggagaagagagacgagagagcaagagcagaccctcaggcgatgtagatagatgatgagcagaaagaaagagttgttggctgggagaaatgaaaccgcctgaattcttcgaaattagtattttgccttctctctttcttcacccacccacaacctcttttcgttcttccctctttcttttcccttttctcgctcttttgtatctgaacaatgtctgtgagttcaaaaaacgttctgattcttttcttttgaatactaccaacatcatttaacttgattaatccgatggttggtgaaacctttgatgcagggaattaaacctggagacgacaagatcgtacgtcctatctttatagcttttctttctagcgatagaccttcatggtgcttatttcttttatgattcgtctaatccctccctcaacacatggagtaggtgttcgagtcctcagagaccgtcaaagtcgtacgtactactcttttggatcgatcgccagctagagtttatctggtccaacttggacgaagataaactcgttggaagatgaagtggagaaatgatccgctatatgtgagaaagacgggtagcttacttcttcaatgagtgtgctgcacgtctttctcgatctaggcccctacttgtgagtctccatcccctgtagtcttgttacgaagacaccgttcactgacggatccacctgctcttgttctcgtcctgaacggaaacgcgtacaactcgatcaatctgctgcttttgccttcatttctctttcaatctgcctttagtcgacgctctcaagctcaaggaggaccttctcaggggtatctacgcgtacagtgagtgttttctgttcttaatctctcaaacgcttcacgacctcgaactcatcaaccttcatgtcgtcgccctcactcgaatataatgaaatagactttgaaaagccttctgccattcagcagcgagccattctgcccatcatctctggccgagatgtgattgcgcaggctcagtctggaacgggtaagactgcaacattctctatttcgatgcttcaatctatcgatacctctattcgagacacccaggcgcttgtcctttctcccaccagagagctggctacccaaatccagtcggttgttctcgctctgggagattacatgaacgtccagtgccatgcctgtattggaggtacctccattggagaggacattaaaaagcttgatcatggacaacacatcgtttcgggaactcctggacgagtgttcgatatgatccgacgaaggaacttgaggaccagaaatgtcaaggtctgctcgaagtttttctctcgttttgcaatatcatgtttctgtttgtcttttcaatactaacgaaccgcttttatagatgctcattcttgatgaggccgacgagttactcaaccaaggattcaaggatcagatctacgatatttaccgatatttgcctcctgccacacaggtggtcgttttgtccgctactctcccttatgatgtgctcgagatgacgaccaagttcatgaccgatcccatccgaatccttgtcaagcgtgatgagttgacactcgagggaatcaagcagttctttgtcgctgtcgagaaggaagactggaagtttgacactctctgcgatctttacgatacgtaagtcgctgtttacctacttcttttctgtcgcttttctttgtttagacatctgatctgatgagcatttttcatcacatgattcatctatatggctttgtataatgatcttacaggctcacgattacccaggccgtgatcttctgtaacaccaagcgcaaagtcgactggttgaccgagaagatgcgagaggccaacttcactgtatcgtctatgcacggagacgtaggtccacttttttttccattttgttattggctatatccagaactggctagactggactggacgttggttgtctgattcggtagtgcttttaatgtttctttttattagatgccccaaaaggagcgagactctatcatgggtgaattccgaggaggatcttcgttcgtctatctttcatagtcttattctcgctctaaacttgtcatctcggaatattgaagggttaccgttcttaatcgtctacctctagccgagtgctcatcaccaccgatgtttgggcacgaggaatcgatgtccagcaagtctcgttagtcattaactacgatctgcccatcaaccgagaaaactacctgcacagaatcggtcgatccggtcggttcggtcgaaagggtgtggccattaacgtttgttttggtttcttccctcattttcaatgttaacgaaagcgaatagaattctaacaaggatttattttatctttttgataaactcgttggtgtcctcagttcgtttctgtggaggacgttcgaattcttcgagatattggtttgttttcgatttcttatgagtctttgatggcttcttcctctgtatcaaacaactaacaagcttacaactctggaaacatgcatttcaacagaacaatactactctgtgcgtcctgtcttgagcgtcaagatatttaagagatatgtgtctgtcttgactgacgttgaattgcactttaccacagactcaaattgatgagatgcctcttaaccttgccgagatgtgagttcttgctgttcttcttccttgcttctctgttccgacgaacgaacaaacgaacgaacggtcggtggctgaattatcggctccttccttttctttcacctagtgtttgaggaaaataaaagaagtggctcttgtgggtgatatgtcgagggattgtggatgatttttctttatgtgattaatgtcgttatactttgctccgtggtccatctggcctattctatccttctggcattgtcaatattggctaaactgtaggccagatcaataagggattttgtactgctttcgtatgaatgtgcatcacgtgaatgatatccaaataaacccagctgacgactacatacaataaagacattcattacttctactcttctcttgtttgttattcatcacgttttgcttttgtatatctgtcttctgtctttcgctgtttctctctctctctttctggcgaaggcctgatattgtagtatattggaacatgtgagtgattcacttgaattttgtaggatacttttgccgcgttgcctgaatggattgattagcgttagggcttcctcctgtttgttgggattcgctttgacctggctgttctgggattcattcgtctcatttgtacttactgacatgctctttttgtactctctgcaacctgttctgcgtgttcgttccgacttttgattgcctaattgttttctgattacagattgaagaatatttcgaagcattcccatcctctacaacttctcgtgtaattcagattgccaactgtttcctcactctgttctatttttaaggaaggctaccctacatcatgtcctctgcttactttgaaacgcccgatgtgatcgaacccaatggtgcggacgacgaatggcaacccccgccattcaactttagcaaattctctttgtcggcggatgatcctgtttcagaggaggaccctttccaatcattcatcaccggtcaacttcaaccggtccgatctccgacctcaaagtttacctctccgtttttgcccacgtttaactctgaagggtcgatcggagatcattcaatctcaaccgggcgggttttctcacctgtccagttttcttctggaggaagcgattcggttgacagccaagatatctcaccgcgcacatcggtgtggttcccggattctccgaggaacagaggcaccagggaggaggataaattcgagcctgaagcgtcattgtttacaaaacaggaccaagaagaagaagaaaatcaggagatgaaggaggaccaagatcaggacgttgggtccctctcgttcgcatcgtccgagcttgatggcatgcccgatcaagatggctcttttcgttcttcgggctcaagttcgatgtcgtggtcctcttctctttatcaacaacaacaacaacaacaacaacaacaaaaacagcggtacccaacctcactctctaaagcgtcacctcaagggagagcttctttccctcagcttccgtcccaaattcacttgcaacttcgactagaggaagccagtcggtcttcccttacttttccttcttcttctacctcccctactatccacacagatattccaggacaaccttcccctctgcctcgctcggactctcctcctccgttgtgtctaagtattgatcaggctcggttaaggagtcactcgcttccaccaaatcattcgttttccgagtcttcctcctcgatcctaacccctgctccgtcctttgtggtcaacacattcacaaacagcacggatcatcctcgatcgatccaacgaagaccatcagaaatatcagctagctcgccggctctttctgccctcgccaattctcctggaacatcatctccactttcaaagaaccttaattcgaaactagcagtacccacgtcgaatagtggaaatctgacccctcttcgatcccctatccgtacgtttttttttgttgatgttgtctttcatcataatcaggactcgtgttcctggactaacattgccgtgttcgttctgttgacttgaactgactcttacgtggcctctgacgaaccttcagttcgcccgaccaacttctggaggcatacctctcgttcggctttacattctccgctctcatcgccttcctcacttgttcttcgtcgcagttcattgatcaatactggtgcagctagtcctgacgaatgttccgatcaagaagagactcttcggcaatgcgaaggcaaggtttggggcgagcgagtcaaggtggacaaactgctcctgtgagagactctctgtcggatgtgcaggaatcaagggacaggggaaagtcgaaaggacgagaggacaggtcggcgttcgagttggagggaaagcgtttgaagggagtaaattatcgtccatcctccttatcaccatccactgtatatctac

SEQ ID NO: 1998 - DNA, 1299 bp, Xanthophyllomyces dendrorhous
ctgtatatctaccactaccgccacaatcacaagtggctcatcaagaagaatattttagattgaactgttttcgatcacgctccgcccgttcatatttctcaggggggacgtttggtcatgtctctctcttgtttatgcttgctgcaacgttagtgcatggaacgccacaagcacttgttgatacctccccggctcctgttccaggagctggtctcccactttcttcccccactcttactcctgtaccattggctggaccggtcatgtcgacgattgattggtggccttatcatagcacctcaaccacagatgatcctgctaccctcttgcctacaacgactcccacgagtgatacaacaccgcccgagacgatgcctagttcagtcatagaaatactgtcaactgagctgaacagtatgatggtaggatcttcttcccaacaaatcgcctcatcaaagactggggaaagttcagaaaccccttcccaaacaggaaagggagaggaaaagggagaggacaaaggaagctcgtttcatttatattatcttaccccggtttttgttgcgatcggtacgtctttgttctccttcatcactcttgtcaatggtcagcattttgaaccgtttgttaatcggttcctcttttcttattcattggtttaatcttgacaaagcataggtttggtcaagatttacactctctacagatgctgtatccgttcccgccgacctggattggacgaagaacagggtgaggacgaatacccaggtctcagagaaagctaccatcccgttcaccccggccctttcggctctcgatatgaatctactcgacctgcatccgagctttatctttctaaatcagaaaaagcactcgatgagtgggatgatgaatcagactatgacggtgtggagatgcggtacgagtatggaggtggaatcgtcggtatgcctgttggaacgccctctgtttatgaagatctcggagtcctaaacgggcctttgagcacgcctggaagccgatactcgacctggcaaagcaaggtcacggtagccgacggaggaggatacgttctccgaccttcaaaggaaaagaagaagaagaagacgtatggcctgttaggaaatttcaagggagagcctgttgaaggaggccgtgagtctttcatgagagaggtatctctttcggctgctagcgcgctcaacggaatcaagcgtgggactcttggtcggagggtttcttcgggacatgctagacttgcttctgacgaatcattcggaactacccaacctcataaag

SEQ ID NO: 1999 - DNA, 7659 bp, Xanthophyllomyces dendrorhous
agaagaaaaaaaaagaaaaaaaacgacataacaagagcgcataagtcgaagagtattgagcttagcacagaacacaaagaaagagagggcgaacgttgatcttggctagtcatcggcccgactctcatatccactgcccagccgttaacagctctggcgtctctagccctgagccattgctcctttgcttgagcgcctgcagcttggacagcaatctcttcatctggcacaatatacagatcgcatgcgttacactcggtacacggctgaccagctgtgttgaacgaaagtaagagacatagcagaatcaaatttgttatgttaatacatatacaataccttcgaatgatcaaagcactcacggatgtgccgaaagctagacagccatgagataacgtgcaaagggaaacaaacaacagaagaatcagcatcaagctgtgtgtgcgtgggacagagctcgagaacagggttcacttactgctggcaaaaatgttgatagccctcttgactgatgtccgctcgacagatgtaacacatcttgtatccgtctcgaggacatgtcatctgttcaacaccacagctcggtcagaccaataaatctttccatctttaacgaacctatttcaaccgagagagcacccactttgttgcaagagtcgagtttggtgaaacccaattcgcatcttgggcatgtctaccggcaacatccaaacacaaagacgggtgagagagaacggatgaggtttagaacaagacttctagttcaaacaaagaagcttaagcttctgtactcacgcgaatagcagctctagacatcgcagtttccatcgccaacctcaactcctccctctccttctcttccttgccttgttcccccttttctccctcgtcggtctttttcttcgagtcttcatcttcagtctttctcacagtcccttcgaaacattcacatggtgcttcgtcctcccagacctccttaccacacctcacgcaactatctcgtccacatactatggattcaccttcatttccatcgatccgtctacacctgaacaccgtgcccgcttctttctctctagcaacatctagcctcctctccaaccatattctcatccaagcgaaactttcaaccggtcttgatattcctagcggtctccctggcccagctgagagcgttgacggtggaggtgggtcaaccgagaaagcaaagatttggttgaaggaagtagaaaacagaacgacgaggatgtaagtggcaatcatgttcaataggaccacaaggctcgagatcgaccaagatgctgggtcggtcgaaggaaaatccaccgaactcgctgtccgaggtttgagtaccatgtatttacagaatggacaagcatgaacactctcggctctggggcttctgttagagagcgcagaagcgtagagggcgagccatcgatggaaagcggcctctatagtggattgatacgatttcatattcgaatcagaaagatgttgtcgtagagtagacagaggaagggaagcagcacatggtttgttgggtgttgagcaagatggacaaggtatcagtgtgtctgaaggataaggtgatgattcgtctgaagattcgatcgtttctgaacgaaagcgagggggagggaaggcaagagtcggtagaagcgtgacaagatgagtgtttatacaggaccttctcgttcatacgacacatagggagaacataagagaacgatgagtctcgggaatgcactgaagaaataaggaatgagtgggcagaggaagagaaataggggtacacaccgacacagtaggtgaccatctgaacaagcgccaatgtcctcccaagcctcctctccgaaacaacactgacactccatcaactgtccttcggattggtaaacgccataattccaagctcgagcgagtatgtcgttgattgcttcttctttctttctctcctccctctcggttcccagagccctgatctcatcttctaactctctacattctgtctcccctctcagagcgttgactccatcacctccgccacctccacctgttcctatgcttcctcccccaaagctgtttctcaaggacaaagtcaacgaggaccatagtctaccggcgaaccctctctgacggaccaaccgctcacacgccctctttgttctctcgtatccccagttttcctctcccagtagacctctgagactaccctgtgagatcgctggaaattctgctgtgagccgtcgaagaacgttttctttgtatgctttcgtccggaatcgttccagaggatgcacaccctcgtgcgcccgtcggggatgagggagaagactaggagctggtccgtatatcttgggagggatcggacggagtagagtttgagctgatagatagagaggagcaggagcgtggttgggatggttgaggagtccacgaagatagctcgttgggtgagaaggatatatgtttgatagcgcttctctgtggtcaccgatcgatatatgcatcagttcctttttctttgtcagactcgatccgtacgtgatcaagaagaagttccccagagcagggataaaaggtgaggattgacgaacagatcgagattcaactgtttgacagctaagctgtccatctcatctccctctatgcttcttaaccttgtcttgtctttggtcttgccttttcctttccatctcctcttttctgcaaggtctattcctcctactactcctgctgctgctgctgctgctgtccgtctatctgcactgatattttcatgaactgcctcctctgctcttctcgtgggaaagacacctcctaggccatcgagtatcttctcgctgatgctctcaacagccccatctaccgtacgtgtccgatgtccagagatcggtaaagcaggatcgaaatagtagctgacggcccaagcaagaaactttggtgacgcggttgggaagagtgattgaagatgagacaccgctagtgatgggaggacctgaggtgtatgtgcggtcgatgacatgaattgactgacgtgagtatctgtgagtgcgaatgaacaaggaaggaaagcgtgtgtgtgtgtgtgtgtttcctctctgcgaagcaagagttgctcaacgcaaagggagcgaaccggttaaagttgttgagtttcacctacgcgccgcggcgtcatcattgttagcgatataaacagtcgacttcctgttagggttagctctctatcaaccaatcaatccgccaacaaacagtgctaagatacattggatcaagtagccgctacagtatgcaagaagagcacaaaaagagaacgagacggaatgaagggaagagagataataaatcacaaaagaacgaagaagcgataaaaacaaatcgaacagacatccgaatgagtagaaaggcctatatatcacgaaacaatcagattcgaaaataagagcaaagtaagttgggtatagaaattattgttgtctccttttttacttgaggttgttctggtcctccttgaatccagcaggagaggtcttgacctggtcagcatccttctggatctgagcctcggcctgttgcggaagcatagaatggagcgaaggatagaatatcgtcagtctgatgtactctgtcacgaaagcagaagcggtgggtcaacgtacggtgtcagccttcttctgagcctgctcctcctcttcctcctcgtcaacctcgtcctccttcttggacaacttgaggtaaccctcatcgcttccagagatgttcacagggagcttggcaatctgggccctggtcatcgtcaaaccacccttgttcatgccggaggtaggagtggtcgcgtggttctgaagccggggggaggtagggtcccaggtgttagtggcagcgactatacgtccatagagaaacattgtatgtgtcagttaggctcgacggagtcatcagagtgacgcgggttagtctcgggaaaacagagaagacgacgaacgggtaaggatcaaggaggatccgaccaccaaggtcaagtagaacctgtaggtggcgaaccatctgggagctgaagttataagacagtacgaaaagctttagtcaaacggaaggaatggcttcaagataggagaaacgcaaacgtactccatccctgtccagcggtccatcgatcgacgatccacgatacgaggaaacctccccactgggcagtcaactgggaacatcgggaagaattgtcaggaaagatgatctcggtcctaagagagtatgattgagaagtgaagatgaggcgagtaggcaaaaaactcacagcgacggccgggttggcgatgtagagggtaggccatgcgtaagcaataggcaacacaccgacgaagagtcgcttgtggccttgagcacctccatacttggcgaactccataccccagtgaagggcgccgaggaaggaaaggatgacggctccgtaggtgatttggaattcctggagctgattgagaagctgaaggtttgattcggcacctgatataacaagaaatggaaggtaaggcacaatagatctggcgagctcttaatgatacccctgaagagaaatggtccgtacctccagcgatagcaagagtagagtttcgggaaacccatccggtgagaccggcggtgacggcgtacggaatggtaccagctagaccccaaatcatgatgggcctagggacggcggcgaccatgtcggtcgtgattgttttctgtatgttgaaacgagcagcagatgtgtctgttagttgggctgaagatgaaacgactgactcgagtaaaagaaaaagaaaaagagagagaaagggaggttggactgacgtagtcatccttcaaagtaccctcagtgtttccaggtccggaacctcggatgaccttggcggctgtattccagaagaaaggccgagggagaggaaagataaagagcgtacgagatgttagtaagagaggacgaggaagacgagatgaaaaacgccacgggtctgattggacatcttgacgtcattgccggtcaagaaaagacgctatcgaacagaaagaacgacagaaaccaagatcactcaccctctccagcagcactgccgatttcttccctgatgtttgtagcagcctcgtcgagtgtctttgagcctggctgagcggagactgggttagcgacgaacctcttctggaacgacggcttgacctgctgaagagcgatggactgtctgagaagaggaagttgagcctggataggtgatctgatagctcgggaagagagaatggtggagcgaagagtcctggaaagcatgcttgtgataggagtaagggtagtagtggtagataatcaaacagagatgggatagaatgaatgtatgaaaggagaaagagaaggagagggaagaaaaaaaaaacgccaaaagatgggccgtccttgtcctttgtaggattgaagagttccttgcccgtctgattctgatcaagcgaatccgactggaaaggatccgatcgaacaggtaatagagaaaaagagagagagagagcacgcaaaacgtcatcggcaccaatgatgtcaatgattgccccgggtttttggtcacgatgatgctgcgcgatggccgatcaatttgttacatctattgagcggtgttgcataggttacgctgttgcataggttacgccgttccctgttcctatcgttccctgttcctcattttccccaagttttttttcccttcatcaagcgcatttgttgatcatcgcatgcacttgtgttggcctagtttgctcatctgatgccaccgaatctatgtgtttgctttgatttcaatgttaccatctctgaatttggttcttttcttaatcaagtatttttcaagatccatgaaatccatcagatttatgcgtcaggagcggcagtggctcgggtgtagatccactgtccgttgtggtggacaatcttcttgatggatccctccttggcaaggtgtcggatagcggctcgggcgacggaaccgttaacctgttgtgacgtattataggatgataagcaaaacatccaaaacgagacatgcgagacaaaacaacgaaccttgtgtcggtcaatcaagatagactgggagatcaacttgtaggtggggacctccttaacgatcttgtcgtactgtagacgcgaaagacagtggatatcacgataagcccatgcacaaaaacgcccaacaaacaaagagaagaaaaaggaacgaacagtggcctgatcaacaacgacgtggtgggcggccttgtccttcacctttcccttggaccacttcttcttcttctgggtcttaccgacaccggtcttggccttgactttgggaggctaatggaaagaaaggatggcgttcagatgtcagtcaacggctaataaatcccaaccaggtagtccattcggtccaaacacaagtacaaggtgggcgatactgcaggcaagcaggcaggtagatgggcatagtcgagcagtggtttgtgatgataagtcgatgcatgggtttgtggggacgtatgatcggactgtgcaaagtagattttttggggggtgcaagtttttcgctctctgtctcctctttccctacacattataacaacagccgtccgtccgtcgcaccatgccactgatatcccaatgatatcggaaggagttcttcgagaaagcctaggaagactggatggaatcgtgggatcgatagatcggtcgtggggagggaaaaagattttttctccttcgtgtaaagtcggtgcctgcctgcgagtatgatgaaccctgccggatgcccgtcttgtacaagcgtataaagatacgaaggatgtcctctggacggcccaaccatatactgagagcaaagggtgggccggaagtgaagggagcgacaaggaaggatcagaattgctcaccatgttggatgatggggactcgtcaaagaaacctctccaagatttctctttcgtccttcagctgaccagacctcgccccggcgagtggccagtgcgggatttgctgacaaagcaggatccagccggcccaacggttactaactgtaaaagtcagaccccttttgaccttatgacctttttctcacagattttctctccaaacaagcggcaggcgagagagagagagagattacgtaatcagctacctctgcgcctcccccccgcccgtccgtcgaacagaaggggaacgctttgtcggtaggaggggactgactttgactctttgtcgtcgatctccctcaagaaatcaaccaccgtatgtgtcgtctctcgcatggtatctgcacaggatacgtcgcctgctcggagaacattctcgagaggatgtattctgtgtctgcttagaaggaagaaacacctgttctgacattttgaacgtttgacttttttcttccttcttttcttcaactctcacagggtatgtttttcttttcttttctagattgttctccctggaaaatcgtggagaaacaagaagtgaaggaaccccaacgacttacaaaacctttctctctctcccgctttgaacctccctttttccccttccaactctcaatccgacttgaattttgatcgaaacaaatctggtcacgcctttcttccctcccttcgacacttctttccctt

SEQ ID NO: 2000 - DNA, 1851 bp, Xanthophyllomyces dendrorhous
gtcctacccctccctttccctcccctttccttttcttgaacatcttagcacatcatgtccaagcgaaccaagaaagttggaatcaccggaaagtacggagtccgatacggagcttccctccgaaagaccgtcaagaagatggaggtctggcagcacggtacctacacctgtgacttctgcggaaaggtacgtttcaacatttcctaaagtgaatgttttgtaagggcaacatcacgggatccattatccaacggacgatttagtggatgggttcatgggaggaacgccagtgggagccttgggagaatcagaaggaaaaatcgttagaattggcatagtacagatttgttgattctcgttcattctttttttttccatcaaactccacaaatccacaggacgccgtcaagcgaaccgctgttggtatctggaagtgccgaggatgccgaaagaccaccgccggtggtgcttggcagcttcagaccaccgccgctctcaccgtcaagtcgtaagtattcttaaaagctcctgttcaccaccgcttggcaaatttatgtcctcggattcttccctcatgccattgcttacccttgtttcccatatttgcttctcttagcaccactcgacgactccgagagctcaaggaggtttaaattgaattctgcacaaagacaaaactgttgcgggcgggagagagtggattcattctttttttttgtagatctgaagggatgccatgtcaaccctttcgttcccacatctcttttcttgtttccagttcacttgacacaaccgttctagcccctttgtcatcacctttcatacaatcacaattaagttcgatcccattcggtacatccctcgccaacaaccacccacataccgacttagacaataaaggttcccagtttcatttcgccttgtcacatcgtcatactcgacatttgcatctacttcactccccacaaatcattccggccgatctgtcgtccttgcaaacacgaacatcatcatcatcatgagggtttatcataaataatagtttacaacggtaaagatcccaataaggcattcaaacaagacgaatgtgaactaaggatcacacaaaaaaggaaagaaggagttcttttgttctggtccctcctaaaatagaacgtagataaggactcttttctaagcacggaccgaaagcgaaaggaaaatggaaatgatgaagtgttaaaaattgcaagattttttattcgacagaaataggagctttgttgatgttggatttggacagatgatgtttttgtaataaacttgaaaacgagaatgagaataacgataaggtcgaaacccgaaaagcatgcacgggatggatgaaagatgcgggagatggctagttgtacattattttgtatgcaggaatgatggatattttattttgttttgttttgaagcatttagagcagaagaggaaaaggataaacaagagaaagtaaaaggcaaggtttgtgaacgagaccgtagcggcaagaaaacgaagagagaaatctatgggaagagactctattaagagaaagggttgcctctcaatctctctttcgtcttcttctctcagctcagggagaacgcgcgagcgtggatcttgttgcctgctagatcgaacagttgacggtcgtctgcgaggaacacttgacgcaccatcgtcttggacgaatatagttggacctgaaagtgaagagaaaagaaaaggtatggtcaaagatacgaaatctcaccgaccagggtttgttgatttgggcagatacttacagtagtcaacttatcgggcttgcgaatatcccagacctacccattcattcatat

SEQ ID NO: 2001 - DNA, 31286 bp, Xanthophyllomyces dendrorhous
cattcatatagaacaagataagatggattagtccctaacactctgctctaaatcagtcaagtcaagcaaggaggaaagaaaggccagacaaaccttaagctgaccattcctcgtgcctttgagaaagaggttaccagtaaactgacctcgagaatgggcaatactgatcatctcattcggatcccgaagaccgattacggcctggggacgagtccgaaaatcatatacctggaaagggtccgagttgttgtacttaaacgaggcgaaagaaaagacaagcacacgtgtgagctcgatcgtccgttcaggtcgaaacgagatattgtatgaagagaaaaatgcttctacctcgatgcagaacaagttgggatcctcgttgagatggatctgagagatagatgcaagtcctggacttttaggaattccaaaccatcccggtcgattttgagccagatcaaaagtacagactgtagtgtatcaacgtcaaattaacatcgttactaactttcaaacttatgcagatacaatcgaaaaaaatcagaatacatacgggttccatctgctgcaccagaaaagagcagactatctgttgttcacaagacatatacgcgtggtcagtagacagaacctcaagtacgctgtggacattgtttagaaagacgtactccgaggctgataggacaatgcgctgatctccatctggtgatactttgccggaagtcgtgtcgtggtagctacgccctcaggacagatcgaccaacttctacaaaatggataaaccccaatcatacttgtgagatctaattcatgagtccttatgaaattctaaatatgaagtcgtgactgactgaacgactccatcatttcctccagaggcaaagtttgatcgaccaaacaactggctctccggaattgatgccagacaggtgattcccttgggagcatgcggagctgtcggacaactttgaattcgaggagtgatctttcaaaacaaatgcgccttatgttaattcaaggaagagaaggctacagaggaaatgctggtaaaaactaacatcggaacgtagattgataaaagatatttgagggcagatggacggcccgttagatgctggcttgtgattcctgtgatagttccgagagagaatgattcgatttcctgagaatacgatatctgatacgctctcctcgagcttaagatcgtcaatctcagcctcgtccaggcagctataaccacacaatagcatatcagcaacagcctgtttcgacagccatgtacaacttatataaatatggactaacgatctggctttggtagaatacagcccaactttgccttaaaacattataagaacatgttagcaagcgtattatataactacaattgtaaaaggaaacagactcaacccttgatcgaagtatatgcgagaagactgtcctggacgacaaaccacgataccgagtctggtttaggtctctgccctacaccaaaatcatacttttccgacaagacaacagcaggaggtcctattggtaggcgtgtttggtttctgggacccggaatggtgccaggtatagtcccgatgatcccttgagaagtatcatcaggtgcttgctcttccagtttgggcttcttgaatggacggggtggaccttctatcggactcttctctacacgctgattgaaagcgtctacggctaagatgaagtacatcctgggcatgtccctctgtggtccgttgagatttgccactgtccacatggcctcatcctcgttggaaagagtgatcattactatgtccttattttctaccgtaatacaatcaagactaaaatgaaaagtgttagtttttataaccagaacttgcacgtgtgtacattcaggcatcaacgacaacagaatcaaggtcaacataagaatagactcacacgttcaaccctgtctctgcgagatacgtcatcaaccctgttgtaccctctgagaacataccacggacgatcacttgttgaggtagaagatgagggtcagaagaactgaactgatgccatgggatgggcgaatctatctggaactctgtcgaaggggcaaccgattgagtccgttgcctaatcttctcatgacagttcgcaagtctctgctcaagctccctctgttcctcctgtaaccgctcgacatcgttatcatcccctatgtatgcctcttccagagatagagacgtaggaggattgacggttgtttcgctaggaggattattcatcaggataattgaagaggcaggggccgatgaagagaatggaagatttagaacagatccagagacggcggtttgacaatcggattcatccagtgggttgatcgaagagatgtctgtagggaggagctgggaagaaatttctgtttgtcgggtttgaaccgtcgatagctgattcttcttcgatgtcgcaccgaagttctctgcattttgagcgagcttttccttgaaagacgctcgtcgtttccgagacagtcttggagcagtcggggtaggaatgggggctggagctgcagatgtaggtgtggctgcagctttcaatgctgattgacatagctagttgaagaaagcaagaaaagtcgcatatccaaatcagaacagacaggtttatcgagcaaagaatggcaaatataacgtacctccgttgtgggtattacctcggattcagcatttggaagctgtacgtcaggcttagatacctggtacgaaagtcgaagaaacacgcgcgaatacatcagattttgaattgaagtagaaggaaaagagtcgtaggattactaacttgggaagagagaagttgattctgctttttaatcagacaattggcattagaatctttccttagaggagaataccaaacagcagttgaccatcatagagatacgaaccttcacacgtacgtcagttttggaggagtttctgtttgtaccctcctcctcttcctcctctgtttgcttcgcccaccagctaaacacgaccctatcctttgtccagtcgaccgctttgacatctttacccttcccagacaagatttttttatgttttctctccaactcggacctcgagaccggttcggttgagagcaacactgtaaacttcccttccaacgtgtttaacttccagtcgagtgccagcccgtcgtctcgccaagtacctttactagtgacgaccctgtctgtattggcaagttccattcgtttggtttctacgaaaagctttcgtgctctcgctcgttcctccggtcgttcattcgaccataacgcccgtgctagatccggcggaagcttgtctttgagatagggttgggatcccttcaacggtcgaacgggtggaggagtaggtgatttcggacggatagcaaggagggacacattaggcttgatgtcttcagagatttgtgccagaagtgtatctatcggattcgaagcaagttctacggcgggtgtcggaggaccaacggaagtaggaagacaaggagaggctgtgagagaagagggaatattcgcggaggctgatagaggatcttgaggcagacaattaagttgttgattgtgagacgcatgcaagggttgagaggatagagaggttgactctgagttgacagaatcagaggcagtagtcggagtagcgttacaagtctgttaatgctcagagaggaaaatgtatacccgttaagaaaacgtcagcgaccaagatacaacaatcaagaaggaaggaagagaaagagaaacgaacaagattagggactttattaaggagaactgaggaaatcttctcctcggcaggttgaggatcagatacttgactctgtattgggggagggaatagcagcgcagatggttcggcagccaaaggatccgtcttctgagatacatatgaagtctgtgccgccaccgaactctttcttgatcgagaagacttttttgcgatcgatgcagaagatgatctggtctcagatgaattcatgggttgacattccggagtcatgcaagcatcattagaggcaggaggaatgtcgaaggtctctatggctggtgcggggcaagtatccattttgatcaaatccataggaactttatcatcgaccgatatctccccatgctgaatttctggctcagatggtgtcggtttctttgaaggatcaagcatcgggttaggcttttgtcgattccgtggtcgtttcgctttggccgattgggtagaaggagcaggagcagggggtggattcttggagtggggagaagaacacggatcgattgcgaggagcggtttgagaggatggatcggtggttgacaatggacagaattctttgccgttaatctagggctcgatctgataccttccttcctactatcgacagtattcgctctatttaccgacccttccaaccgtttgaccggcttgttgctgctctccgcccgggcgtcttctccaagtggcctaggttggacagtatcccttctgaactcagtatttggtttgaacttgatcttttccgtcttggaccttgaggaacctgattctaaaacccgattgacatcttcatccagagacgttgatttctgtgcttgagccagagtcggaggtggctgggacgaaagtatagatccggtaacattaaataccgagctctctttctcgtttgaaccaaggattaggtttgcttcttgccggatatctttttgaaagggaacagaaggtgagctcgagtgtgcggtcggtgatgtcatgactggagtggctgccaacgaacgagaaacacttctggtcattgtcctgttcccaggcggtgtaggtccaggctgcaatggctttggttccagttcagattccggttttgatcccagtctttcttcgtcttcttcgtcctcacccattatcaatgagtttctcaccgccaactcttcctgcgcgtctaacgcggcctgcttttcatcgtccgttgccgccgatatcgccggcgctgccgtcgtcgtcgttggtactgccaccggtactgctggtattgctggaacagctgatcttttattcccatcctctctagaggattgagagcgctgattgaaacctctagtggacgtcccacctctcattctcccattaccagtaccattaccgtctctctggtttccagctctgtcccactccacaccatgtcctcctcctggagcagctactgctcggtaataacctccgttcgacctatgcgatcttggaccaagtggaactccctgtccattaaatcctcgtcccgacggtccattgacaggaaagagcggtggtctagtggggactggtataggaacgtgaggatacgaatgaggttgggatctatgttgagactggattcgagtctgaagtggaggttgagtccgagattgagattgatgctggaatggatatggaggtcgaatgggaaacccggtagagcgaggggtcatcacttctgccactagtggaacaacccttgctcggttagcatgaacagattcattaggttgggtatcttctcctctagtcgtcgtcgtcgtcgtcgtgttcgccgatatctttgactttgccgttgccgttgctatcgatgacgatgatagtggtttggatcgtatcggtactgccgaggacgaggaggaagaattagaaaaggaaggcggtaagagtggaggtagagacaggggtattgacggatcaggttgaatcgttcgaaaccgtttacctgtatatccttgtctcctatttgacccgttgctacccccattggcgttgatgttgacgtttccgagcccgttgtcgccgttgatagtactagaactagcacccacacctgtaccagacgaaggagaagtatgctcattctccggtcctttccgacaggaaacggacggagggcgattcatcggtcggatctgcccttctgttcaagcctttccttgagcaaaagcaaacagacagaaaggactaaggtggaggaaagattgatccaagaagatatcgaagcgaaccagaacagaacaaagaaaaggaaacgaaaggaaagtagagtatgaaaaagagaaaaggcagaaagacaaaaacttgggtttattacatttccactttcactctcgctttcactatcactgtcacttctactttcacttcttcattccagcctcttctctttgctctgcttcgctattgacaactcaacgttcaaatctagtggtatatcctgttctattacaacattgatgatgtctcctcttgttgcaaagacacatgaggaggcgcgattcctgaacaaacttttcctttcttttttctttttcttgacttagatttagatattctattctcctaatcttcgctccagtcccagcgctgagcgttttctcaaataatgaagaaacaaagagaagaagagaagaaagggaaagaagaaacgtgatcttactgaacaccaaagcgaaaaatgaaaaggacaagaaacataaacacaaacaacaacaacgagaactacgctggaaggacagaagggacgagtgaatgaacagatgaatgatatgtctatctagagctgagcgatttgctttccgagccgttctttcaaagtcgagtctatggagaagaagaggatcacatacgcgacgcgtgagtatcccgtcggatagaagacaagggggagtcagctcttgagcatgaagcacactcgatgtctggctagagcgaagaagagcaagcagaggaacgtacaagcagacatgatggtttgctcattaatcacgatctcgcctgcggtatccgctcttgggcgggaaaccctggaggcgatagctactgggtctgtctctaggataattctgtatggatgtgcgcatatggagggacagaaggggttgccatcaggtcattaaggttccgtttagaaagaccgcacaaaggaggaggagaaaccccgaagaaatggtaggaaatattgaagactaacccgtcatcaatcgtttcgtccagagccaacatgactagatctaagttctccaacacgctcctcttctcgacaagtcctctgaggagtagtcccacagcatcatggaatgcggtcaacgcgttctgaagcatgagttcattttcggatgttggtccaaccagatgaaacgttaggtccgtcgaggactttgttaggcagattgacgatggtgggaggaataatacgtcggcttttgttttgtttttgttttttgagatgaacacaaagatgaagccaaaagataagacgacacgttggcacacgactcgttaagaaacgaaaaggaagcatgactgagagaaaaagaacacggggcaaggagagtcgactgaccaagtcccttccttgttttctcacaaacattcttctcgaatgctctctgctctttcaacgtcccgaacggatttccacctagcgtactagctgcggctactccttgaccgaccgaagctggctggtgaggaggcgaccagtattttgcaatcactctgtttccttcactgtcgaggatgattagacaggtagccgaatatagcgtcagattggactgaagtaacggggagaatgaacgagtagaaggagagagcaagaagaagagagttagattgtcttctaagcgttaagcacacacaaaatctcataagaacagcacaaggtttgactaaacggaacatagaaggtctcaccatgatgagtataagacagatcaaacacacaaggcagacacagcaagagagacgagatgggaggaaagtacaacgagccgaaacagtgaaaacatcgtcggggggagatgaggtttgttagggttacatgtctgcttatataagttcactcgtttcttttgaaccatttcatctaatcaatcgactggtatgtataaagagggaaagaaagatctaggaaacagtctgtatagtctagtgttttactggacaaagaacaaggatgattaaaaaggaagagaagagagccaatccaagaccggaaggttttaacctcgctgggcggtcttatcactaaacaagttcaagagaagaagcagccaggtcagtcaaggagagaatcatacactttcaacgaatgatttacaggaaaaaacacttgaaaaaaaagcttactcgatatgagcgctctcgccttcctcctcctcagccaagagtcgttctgcctcaagggcggccatgcaaccagttccggcactggtgatagcctgcctgtatcgcttgtcctgaacatcaccggcggcaaagacaccctgaacggaggtttgggcggtaccgggaacggtgacgatataaccgtcctcgtctgtcttgacctgacccttgatgagatcggtagccgggacgtgacctgaggagaaaggagagaaggaagtgttaaacgctagaaagacgatatggatgttctagaaataaaaatcgtaccaattgcatagaagagaccgttgacatcaagcttagatgtctccttcgtcttgttgttgtagatctcaagacctgtgagaagctccccatctccagtgcactctttgccctcggtctggttttaaagaagcggaaagggggaagagtaagcttcaactgagagaaatgtcgatcgaagcaaaagaagaaaggaaagaaaataatacatacgttccacagcacggtcaccttcgggtgagccagcaatcgttgagccataatcctggaggctcgaagttcgtccttcctgaccaaagtgtacacatgtgatgcgtactttgtcaagtagatactctcctcagccgcagagtcacctccaccgatcactgccaacggcttgtttcggaagattggcacggctccatcacacactgcgcacgcactaacaccggactgccagtaggtctcctcaccgggcaaaccgagtcgcttggcggaagcaccggtcgcaaggatgatactaagaggaagaaagacaatatatgtagaaatgaataaataagtaaaaggtaccgaaagaagagataacgaagggcaagggagaaaaacttacgtgtcggcagtctcaaacgctgtctcatcgtcctcttctccctctcgccagtacttgaaaggtcgcttggagagatcaaccttggaaatggtctcagtgatgatttccgtcccgaatcgctcgctacacaaagatagaaaaagcgtgggtatagataagcgagggagggctgtagacagaaaaagtagaaacacaggaaagaaacgtacgattgggctctgaacttgtccatcatctcggatccaagaatgccatccgggaaaccggggaagttctcaacatcggtggtggtggtgagctgacctccgggagcaaacccgttggcaagcatgccctattacgagataaaatgcgcgcaaagggaaaataaggggaagacagagcaagacgtatgattagcacgataagaagaaacttgtaaacgttttagtctgagctgacctcgaatagaacagggttcaagttggctcggccaagatatatagcagcggtgtgaccagctggaccagaaccgatgatgaccactttagagtgaagtctagtggactgctcgcccttttcaggaatggcgagctcgtggttctcaggcgagtttccgttagggacagcgataggggccatggtagtttggtctgaagaaggaagggaggagtagtgcttgggaattggagtaggggaaggggcagctgtgggctgagaatgagctgaggagaaagtcgaagaggagcggtggatataccgagggttgaaggagtgtttagcaggaagggtgacggtgagtgcgagccgtttgttgctttgaaaagcaagagtctttaacagagacagtttcggttaaaagatgtaggggtggtggtagtaaaagtgaaagaaaagagcaagcgaggcaagagcacctggttcttaagggatctagagcgatggccgttcgtgtttactaattggctgaagggaggaggaggaaaaaaagaaggcgacagttccgttcagaccggagacgtcattcgggctgtgctatgtaatcgaaagaaacagctcacgtgttctttgggtcacgtgcggccgacttcacgtgcagaactacactcagcactggatgttccatcgcgacagtagtactatcaccgtcaacggactaccactgctatatcagcgctatcaccgtacagagggctgatcgattaagatgagcgagaacagatcttacatgtccatagagaagttgggatgtgatctccagcagaaaggtggagaggatgaagggctgagctagggtttgactacgctgatgaggtccacggttgtagtgggattaccgcatcagcgcacatcaccaccatactgggtatatcatactgattggcactgtgaacgcgtcagggattacctttgtgtaaattaatggacttaaatccgaattatgaggtgggcttatctgtagtttagttcagcgtagttccttctctgattggtctcctattgtagtctaccaaagtctcttcctgagccaaagtgtgcagtctctttctcttgtacatctagagaacaagatgttctcatcgtatatgtacatatgcaactatggtccttacattgggctcaagatggctaataaccctcatcttctttctctcttggatctctcttgggtcaccaagtctagatgacaatatgctcttgaattttcagaggaagatcccatagatcgttgctcccacttgatagtgataaacaggtaaaaaaaacatgatggatgattcagaagacaacattagacaaatgtctgtctagacaagctttcttctggcaaggatatgagaactcttggtgacgtgcgcgtgcgcgaaagaggaaaacatatgttgcacaactggtcatgtacactagatatagagattctcacaaccgaaagataacatgaaccatgctgcatagaaactctgagcaaggaaatagcagagtttgaaagaaagaaagaaatacaaaggagagagttattgtaagcggctacactgaagaattcgatgttgtgggtgtagttcccttcttcctgtctctgtctatcgtccccagttgcagttgcctcgctctccagctgtccattcttatacctccttgataaatgaacaaatcttcagctgttgctccagcttagacttctctgccaggactactgtgtttgtatgccgattggcattgcgtctcgtaggttttctatctcactgtttacgcctctatagtctcccatcaggcttgcctaatttctgtagtcccttttgtaatacctcgcctaatgcactctcatagtcatatgcccggcagtcgattgtttttcttttcttcttctcttccatccatcttccatcatctgcccttctccattcaatcctcttccgtttctccttctcttcctctcccgatcgattcgactgggtcgtctctttggaaaagctaatctttcccttgttctctaggtctctcacctgtatctcaacttcataaccgcaagaagacacagagaacgcgtcgtctcattttcttcccccttctgctcctttctcctctctttccatctctattgagtgagtaggcatttctgtttccctctttttcttcctcatgtgtctctttctgcctcttcatattctttcttcacgttccgtactcatctctttctcttcttttttttaattttctgttccatccttgcaggtcttctctctggtccatctttctagagttcactccacccatacacaccagagcacaccttacccctcatgtcctcatcaccctcgccttcctcccagagatcaccctcgccctcgcttccgcctccaccgtctagcgcaaagttgccgcctagaccatctagcagcacaacctcacacgttccctatgcaagacagtcccttggcccaggtggccctcagtcggccaccacgtacaccagtctttcttctgtcaaccctaacgccaccaacaatgccaacagttccaccgggccagcctacagaaacttttcaggtccacccggtgcaggcaggtcgggcggtgtcggtggaagaccgtcttcagagattttaggaggggctcatcttggcgggattggtaacactggtggaaacgccgaacctaggaatgccgaaggtaaatctctctgtcctttttctttctctgaatcttctcagttctttcagagatcctgaaattttatttaactctctttctgtctcttttttttgcagccgaggccattgaccgttggttccaagacctggcgtcttacgaggttaccttggttagtctcttttctttttaaggcttttctgctcgcccgttattcgtatttccttgtgttcatcttgctcatccgccttcgtctctcaccttgacccctcattcacaggaagagatggcggccgcttcgctcgatcaaaacttcactgaagagctgagtgccattgaacaatgttcgttctctagtctactctttacctctcgttttctgaacatagttctaactcttttggccttctcttcaaagggtttcgagtcctctccgaggcggagagaacggccgcgttatattctttactccagcactcgacccagcttcagattaggttctttatgaccgtgcttcaacagatggcaagatcagaccccatgtccgccctactatctccagctgtaggaaccgggatgcaggctcaggtggaagcaaagatgaacacctaccgatcacccgtccgaacgagcttcggaggtgggaatgctgcctcggccgtcagagaatcctttgccgacagctcggcctaccttactccagagtctgctctatctaccctagatggaccgccccttgggaccatctctgccaccgctggctcccagcgaaagtcatctgccagctcgtctcacaagccgaaccgaatttcggccccaggaggcttgaattcgctgacaccgtcgtggctagccggtgggtcgaccggactcgatcaagttctcgagcgaggcccatcccccggtggagaatccgttacttctactcgatcaacagaccgacccaagtcagcagacttctccgggctcgcgaatatcgtccccggttcgacccacgcggccaataaccaaaagtccagatcaagctcaaggatgagcatgcctggttctggagcaggactcggcctcggtcctcctgctggcacaacgcctaacctagcagacgaaagccccttcccatcttcgcccagtgccaaagctggtgtatcgttcccattgtcccctaactccaacgctggtggctgggccagcatggccaataccccgactagccaggtaccaaaactatcggacgctcctaaacgaagagtgactggtggaggaaacccgaccggatccggttacccatcaaggtctctcttcaacgacgagccggctcagcaacagcaacagccgagcggtcctgggtccggcgtcggtctcggcgtcggaatcaatctaaagtccggtcgaaacttttcgtcgcctggtaatgtcggtggtaacttccaaggaccggctactggttcgtgggcccaatccagacagagccctgccctcggaagtaacgccgatgcgttcggtccttccggtttaaacatccttaccaacggactagcctcaccttcgccatcggaccttgcgttccagatgtctcaacttcaactccagcagcttcagatccaacagcttcaacagcttcagcagttaggtgtcgctgccgctggaggcaatgccggcaacaccactggagcaggaggaactggctcggctattacaggtctcggtggcctcggagggattggcattggtttacccgtaggcggattgcaaaaccccggaatgggtcttggcctaggcgccttcgccggtctgaataatgccgggttgattggtctgctaggtcaacaacaagctcagctccaagctcaagttcaggctcaggcgcaagcacaggctcaagcgcaagcgcaacagactccgagatcagtctcgatcaaaagccagcacaacggctcacactccgccaccagacggtcccccatgctgggcgtctctggttcggccggtttgaagagcccgtcgcctggtgggtctggtagacgagagagcggtggaggtggatggggagcacacgcacaggccggacaggcacagactggagaggaagatgtggacatcagagtgttggaagacattccccagtggctgaggacattaagattacatgttcgtcctttccttttcctcgctaccctttcttctactctcttatcttattgaactgacgagtcgacatctaaatgtttgaatcaacaacgaaccaaacaccagaaatacacaccgaacttcgaaaactcgaaatggacggaaatggtgctcatgtcggacgctgaccttgaagctcagggcgtcgccgctttgggggctagacgaaaacttctcaaggtctgttctcttcactgcctttctcttgctttttcctcgtcttgtcagaatcgtgctttcttcccaaaatttggaggaaacatagtttactgataaaccctccttgaatttttgaatgtaacagacgttcgaggctgtccgagctcaaatggggatcccagagcctgattcccctggcgctggcgttagtgccgaatcgggtgccggcggcgagaacgccgggaaagaaaggagggctgggaagggtggggatgacgactcagaggatgaagacgcgtgatcgctccctttctttaatcttcctgattcaatcctatctctctattcttgtctttttttctgtccctctgcctttctgccttttcttgtttcccttgactcttggtagtagttgtttcttttcttatattctctatccattttaaatatctcaattcaaataggaagtttccgccttgtctgagctagttcacattccaaacccatgattccatccatcgtgctttcttacttcttttatatatattttattttgtttctcttcttttgcttctttaatttgtttttcagattgttttgcttctctcatgtttcatgctctaattcatcccggtccgtctaggatctctcaacgatctttatcttgacatcctttcttttaaaagccatcaacgcaaccagccttttctcaaactagacccggcaatcaacacggggctcattcctgaacccaacaagtatagacatcagagagaaaagaaagcggagaagagaagagaacaagatctctcgtcagtcatcagatcaagaattaaaaagaatgatgcaaaattagagcgaaacgaaagaaagaaggtgaagagagcagagggcgggacagacatttttacgagagggacgagccggtctagttgggactggttccagacttcagtttccatttaatgatcatcagaacattagtgtccgtttcttatcaaacgaaaaccaggatagatgcaaaaatagaagaaggtaaggaaagacagacttgagttgactttgttgagaacgagaaccagaagtgtctgctaccgtcctctttgtccttctcgaggtatttgccgacgccgccgcctttggcggcgctctcgatcttgacctacaaccgttcaatcaatatttgaaaatcaagatcaagagaaagaaagagaagaagggtatgttgtcaaaattggagaaagaagaagagagagatagatacagcgtgaaagaggcaggaacggacgtctgaggggctgctcttcgtctaggaggagaagcaatagtaatctcttcgtcctcatccccatcctcgtcatcatcgaaatcatcgatatgaccttttgtccgttgagtttcagttcgacagtcatcttcgtccgtatcgtgtatgaaaatttcctcttcactgtcgttgaactagagatagcagaggagttaagttcagaaaattgatatccgtgttcaggatggctacaccaacgtactaaagcctgcttcttctttgctgcagctggaggcttcttggtggctgggactttcttggcctttgctgcagttgaggtcgttgcttttttggctcttcctgtcgcccgagtgaacacggagtcgtctgagtcttcacccatcgactctgccatcattacgtccgagtctggagcattcgacgccttattaaacaaatatcaatgtccataccgtcgatagatcaaagaacaaaggcaaaggaaaccaggtgtttggacgaactctgactttcccttcggatagcacagcgggccgcttccctccgaattggctctcggccaagtttttttgttggatcaacttgaaaaataaggcaaacaaacaggcgatgaatgagatcaagctgcctataagaaacattgagtaaccagtccacggtacctcatcttggatctcatcctcagtcaggttcttcattcgtgcgtttgagttgaatgctttcagcgttccagcgacaaaactttaagtgcgcacaaagaggagataagcttcctttgttatctgatcgatcaggcaagagatctatgaggacaaactctttgatcgccgtcttactgcccttttctacaaacttttcgacagcatcctctaatccgttctcgggtaagacgtctagcttctgagctgtcaaatactcctttaccaaatccgccatcttgatcttcccttgtcgctgaccgggcgcgagcccgtcatcgtcggagaggtccagatcaggttgatcgacagaaactttatctgtccgtttggcaaacttcttccgtcgataaaactgtagaagatttcctgggttggcaaccagctggttgaggccttctccgaaacgggtgacgttcgttagctctaatacgcccgttgtttcaacctgtgtagaagagtcaaaaataaggatcgggaatatccaaacataggtaaatcgtcaaagaaggacggttagacgaactttcaaacgaattaatggcttaggtctcttgggaccgtctacctcaggtgatagggacaagttcttctcatcccatttagcattcgcctcggccacacacttcaatacctaaatatgaagaggggtgagaccagaggaaaacattcagacatggacgtcaaactcgtacccatacgactgattgtcgatgtaaagaaaaagaaaacgaggcgtacctgttgtctcaaatactcagttacctttggcttattttctaaattcagcccggtttcttccgctacgactgacagctcgatatgtttcatcacgaacggccgaacggtcttgagaggcatcggagtgatctggaaatgtttaccttggatctccagaagtccgacatgtctatcatgttgcatgtaaaccagaaagagaagcgatcagtctcgactctggttgtctagcgcggcagcagggtatgatagcaagtcggaaggaacgagagaacgtacttgtcaatggcttcaccgtctgctaaactagtggccacactcgagcctggctgtgtgatccagtattgtttgtctgctaccatttctggaacgatccggcaatcatgctcgtgaccccagacgacaagatctgtcgaatcatcaaacatgttctcaggtatatactcatgccggttatgagccactctgattgtgttgacaaagaaaaaaaattgaggtaacacccgtcaatatccgacaaagtagaaggaaagatgaactaggacaaacctgttttgatgcaccagtacaatgttgaaccagttatcgatatcctcttctggtctcaacatcctaactcttccgttccgtaactcatgactcatcctaacatccttgatgtttccgattccatacatcgcaagcttggtcgtcccctttcttagtaggacgggtgagatcgtcaaaccctgcttggctgattcgggacgcgcttcgtctgctcccagatcagtcttcccaaagtagttcagttgaccagagacggacagaatatcaatcgcggaaagagctcctgcctggatagtttgagaagcaaaaaaaaaaaacgcttgttaaaactcaggggatgcctggtatgggtatgatatgaatgaggagcgcacagctgacgttccctggggatcatcatgattgccatgaatagagaagacaggaatgccgacgttgaggttatagtcttcgtaattaatcgctggaaatctaacaggccgaatgatttttgatagacatcagcacgtatatagagaaggcgcagaagaataatgtcgatatttggctaagagacttacgtgaatcctgcggctttcccttcattcggatcgctcagaagttctatctggacgggcctatccccttgagagtactctctgagaagagcaatcgtctgatggagagtgtatcttgaaggatagttctcgtggaagagatcgcctgccagcaagatgaaatctacctgtcgccatcaaaaagaagagacatcagctggctatgtgccattgaagatggacggatataaggagagattattccaacccacctcctcttttctggccagctctagaatctctctaaaggcatcaaacgaatcatttccccgaatgggatccttctcaaggtaccctaaatggttgtcggtagcaagcatgatgcgtatagtgtttgacccatcgtcctctatatcccttagcaaaggagttggtcttgtaagtctgttctctcagaaacgaagacgacatcagcccatgtcttctttcccttctagtctctccactctttacccttgcagccacatagactcacggcggttctccctctgatagctgagatgatactggtggggacgacatgtgtctatacaactgctacctggacacggcgtggatctgaacgagagatcggacaatggcggtctaaagggggacgagcgtcagcgttactgcgcgacgcgtcctaaatgaggctacgcgtctcaaatgcgtctgtcggctggcgcgtctcgatcaacacacgcttttgatttctatctctcatcattccttctgctcacacactcttcctaggtttataggccatacatataccatacgatcacagaccttaataacagagttaaatttgtcactattccgatcaatacgatggatgaagtagatgcctccgatccggcggctatgagaatgttttacaacaggctctttccttggaaacagctcttcacctggttgaaccacgaacaaagtgagattccgttgctggccgaggctgttttaactggttctcgcggtcttactctctgatgtgttactattcgacgagaacagtaccgacaaggttgtttacccacagagagttcgctttcactctggccggggacatctatttgagatacaactcgttcgccaaccacgaagaaatgaaacgagaggttctccgactgaaccctagtcgattcgaaatcggagccatctatactgctaaggtacttctacgagataaaactacctacgcatcttccagctgagccgatgatctctgatagatatcaaatctgaccttcttttccttgtttgtttcgcctcagcccaaagacaagaagacccttcgtccgtcggccctccagccggctcgtcgggagcttgtgttcgatatcgatatgacagactacgacgagatccggacgtgctgctctgacaagtctatgtgtaaacgatgctggggattcattgcttgcgctaccgaagtcttggaccatgctcttcgaggtacgtgttgcgctttgagcttgtctttctgtttctctctatgaatgccactttcggtaaacttaacaatattttctgaaaacaatgcttcgtatcaaatgatgtaaaaaactgctacagatcaattcggctttcagcatcttctctgggtgtattccggtcgacgaggaattcattgttggatctctgatacgacagcattagatctgaccgacgatcagagacgagcgattgttcactatctcgaggttgtcaaaggagggaaggaaatgagtaagaaggtgaatgttaggttcggaagagcacccgaattgcaccctagtataatgtgagtgattcctctctatcacatgtttgttcattaaagatgaagatgaactgaattggggttctctccaacgatctgtcggtaacctttcctcctctaaaaaagggatgcatacgatattctggggaaagactttgctactctgatcctagacgaccaggaatgtttcaagacgaaagaacagtgggaaacccttctgtctcttgttcctgatgaaggtaagtggcctccttgacctattttcatcctttcgttcatcatcgaagcacatcagcaaatctgaaacgagatctatttgagaaactaaagcgctcacctccaagctccgcaccaaatggtccgccaagtcgtacacttcgcgtcaaaaatggacccatcttacggatgcccttccgtcccgagcatccaagaccggatctgccgcaggtttaggaccgaaagggaaaggaagtccgttggaacatgcactacaggatatcgttctgcagtacacataccctaggctagatgcggatgtgtcaaaacatcgaaaccatttgttaaaatctccttttgtcatccatcccggaacaagtgcgtcctcttctcttctcttcttatttgttgtatttaaaggggaaattgtgaccgctcaaccttgtttaactgttgttgtctcacatatttattcggaatttcgacagaccgagtatgcgtccctgtagatcctgcgaggatctctgaattcgacccatcgacagttccgacattaggtcaactaataggcgaacttaacgtagccgctgctgccgcaaagacggatcctcaatctgtagatggggaaaatgggtcatctcaggatctgggggatgagaagaaagtcgtcggttcgtcctttttgcttccatcccttcgatattcctttccccttcattttaggtcccctctgactgtcagctactgactcgttcactacttcattgttctttgtaaaatccttaaagattggagacagacaagcttgaaaccatatgtggacatgctcgagcgacattctcaaggtctcctcagacagactcgagaaaagaaacgaagtaaatcccttcttcttttctttgctctttctaaatccttcgtggctctttgtaagcatgcggatggagctttagagatacggagactgacttcaattctctacttatattcttctctgtatgattgggtattaaaaaaccaagacgcagcgcaaatgtctactgacttttagtcttcaactataacccctcctgtcaatcggaccttacatgtttccccacgatacttctatgcgcttctcgtatgtatgtatatatgtatgtaatgcaaatccctcaatcgatttaaatcgagcttcctttctcctcctttcttctttacgtgacgagtgcaacatggtttagagatagtagtatacatgcttaacgataaagtttaataagaaatttccaacgagagcctacgaaggtcttctttgcaagagagatggaggaaagagagaagaggaacaacagcaacagaagacgacaaacggcgacgggagatgaacaaagacagggcaagataacagcttaaagaaattcaagagaattagaaagagaggataatgcgacccctgatccttactctctacttttttcctcttaaacaccttcggttccactggcaacgggagcagctggcgggactgtacctgcatgagcacgagctgtcgcaggcggagcgacggcctcgtgtgaagcggcgactgcttcttcttcaagtcgaatccgaccttctctagtccgggccgagtggaagaagatggaagccaagtaggtaaagggctgagggagagacgacgtttaagcagaatccacttgataagctgaccgggtcctttaaccagaaaagggagacatggacatacgtagagggcgaggaagatgaacaaagtgaccaccatagtaaatggctttggcttcttgagcagaagagatacaagcagatactcggctgatactgtccagactgttataatcgatgatccgaatcaaccaaaaatccagccaaacgatgagtgatgaagcacaaaagatggaaaatgaggaagatggtgagtcctcaccaaggtccttggttacaaagaccatcagcaaaccaacgacgttgaccccagcaaggattccaatagcctgccaggagtattttgcataagtggccggatctctagactcccagccaagaacaatgaaaccgttgtcaagccattcaagcaagaaaacgatagcgagcatcatcttcatgggagtgtagacaaagagccaggttccggtagaaaagtgataatgtcggtggagagtaaggtaaatggtgcctctagtggaagatggatacaatgcaggtcagcaagtcggatggcggaggaggaacgagattgatagatacgtacagaatcagagaattaagaataagcaagacctcggcgaccatgaaagaccatgaagtttgaagagtctgagtcatgtgagacccgtaagtttgatgctaatcagcttgcaattaagagcaacggacacaagcacaaagtcagacgaacccagaagacggcccagccagccatgagccaattggcgatcgagaacctcattccaacaccccgcatcagcacatccttcgtctcggccgatctggccaggacgagcatcaggcagaatccaatttgaagagcatacaccacggtctattatatttgaccaccagacaaacgcgtgtgatcagtcagtttgttatactcattcatcaaacggataaaaggaaggacggacccaataaccgcttatcatgacagataaaggcgtgaagagcgtcggatgggctctcgagatatcgactggaggacaacccggacaatcaatcggtggttcaagttcaacgttttgccattttgctctaaactacaattttcgcccgaaaaagaatgcaatgcgcgaccacccccaagaagagagaaagcaagatagaaaggagatgagaccagagaaggcgggaaagaaggatggactaactcatcgatggtttaattagactggcacagacaatatttgctcctatagaaaccagcaggctgaggggctgttgaaaaggaagcaggacggatggtaaaggcaataagcgatgtgttaattccgatcgaatccacacaggtttcagccgggagaggtttgaattgatggatacaactctacttacggaaatgatctgaagtcgaacatacttcaatgtcgctcgaagctgctcctgtgtgagcacttggccacctgatggtaggtcgtatgaggacatggctgaaatacaataacggatgggcgagagaacagatggggaggaaggatgggaggtagtaggaagaagaaggacaagagcagaccaggtgagagacaggctatgatatcataggtgatcttatctaagaacattttcatctatcagttacaaattcatgaactgtcacatatttatcttcttatttctcgttctctacagagcaccattcgtgcggtcctcattccactttgtcttcgcaaacgtttgagcgacgagtagcgggaagatgagcgtagcatcggcgtagacctgatgaaaagacaagagatttatggtcaatatgggctagatgtagtcagataggaaaaaaatggtatcagacaaaccttgacagcgggagcatctgctttgatctttccccaggaaaccgcttcgtcaggtctagctccagaatcggatccatcaaactcttggccagtattgatatagacagagtaatccgctccatttctctgcaagaaaggaatgaatgggcaatcaggttgagcctcagcctctattattcatttttaaccattagttcaaggcgaaaaagtcatataagactcacgaaaagcatggcgttcgcgatctgatgcttgcaaacacctccgccaaggatgatcattccagctttcttggctttgacactcatgtcgttcaacctacgaatatccttgacgatatcgatcaccaatggtgtctcagtcttgtacgagtgaaagtagagcatgtcaccgagcgagccatctgtgagcgctggacagaatactgggatatcgttctagttgagtgaaggatgtagaggtattcatagtcagcagaagtgatcatatgaatctagagccgtcgcagaaacacagaataagcagcattgaaagcttctcggtacggaccttccaacaccagtagtacacactgctctcgtcgttgatctccttacccaaccgacggatcacatcggaaggagcccaggtaatggactctgtcttctgctcgaccaccatggcatccaagataggcaatacccaatcttcaaacgcgcaatagtttgagtttggcacaagcaagttacctatccggttcattctgttacaaaaaagaacaaaaagcaggccaaccgcgccagattaagtctttcaagtgctataagcagactggacgcagacatggttccaaacgtaccctttgcctctcagctccctaccaacctcttcaaagcccttttgaccaagataagtctttcccaaacacttaatgaagtcctcctcgactccgccggcagtggtgaccaaggcggagatcattttgtgctttgccagataacagataatttctctcagtccggacgagattaagttggacgtgtagccgagaaagatggccgctttgtcttgaggtggacggtacgggtcgttaggctccggtgtgctcggccggctgtcctcggcggtgtcggcttcgctggattccgcagaaggctctggcctccaagacctctatggcgcgagaaaaagaacagagcaaggcgatattcaatcaatacgtggatagattcttcagcaattgatctctttaacattccatctgcagaaaaacaacaagacaaaccatctcgtcgacgatacggcatgctttggcaaagctagtgccttggaagcccatggtcgcgtagctagctagaaggtcattcagtgaatgttccttgtcaaagttcgggccttgaaccgggatagattctattggtacaggttctgattgaaggagaacattcccgtgcgcttgacctgtagtagaagatgccatgatcgagggtagaaagtgaaacttcttttgggatggttgttgggaattcagtggaagggctgaatgagaagcttcaaaaaaggaaaaaaaaatcttccttaagggaaagtaaaataataaaataataataataaaaatgatgaattatactctcctccttcatctctcacatccatcccatcctattccattccatcctctcactcatcctatacgtgtatctatctccatcggtaactcataatgtcagcttatggcccagctggtacacagcaacaacaacaacagcatcatcaccatcatacccacgcccacgcccccatccatcatcatcatcatcggtctcagacatcccagcagatggcccttcaacagcatcagcatcaacaacaccagcagcaacaccagcatcagcatcagcatcagcatcaacaccaacaatcggcaggtgtcagatatggacgtgccgttggaagtggtagagggattggcctcctggcaaacgaacagggattgggtaatccaggggatgaatatctgttcgtacacttatctgctcttcccctcttcttgcctgtttccaaggattcaatcctcttttcatactcctagcctctccttagccaacctgattcaatcaaactaactgtttatctacctttgtgctggcatggcatgcattcagctctctcccgtcactcgatcaaacaaattcttacactccgattggaacatcttacccgccttcgggttcgtcctacgatgatctcgagcaagccaatcctagtgcaagttcaggcaatcggggaaacaagctcaaaaagaactcgagatgggtccggaaaggaaaggcagtggcttgggggatgagtgctggagagagagaggtatgtctgttctgtcttcatcccttcctcctttcttctcttgctgtagatacgcgtctgtttctggtgcccctgccaaaaggctgttttcaggagcactgacttcgaattttgtatttttgtatttatcatacttcatcttctctccaggctgaagaaaggctacgtgctaagctacgatacactcttgctcaccatctaccgcctgacttatcgcgaggtcggtcgccatcccgttcgctctcccctccattacttccccatcttcgttctccatccccaccaagcgtgacttcgagccatctctctcagctactctctccgcctagatcatataccgagatcgttctatctcctgccatgcggtataccttcgcgtctggtcatctggaggacgcgttgggacagacggcaggtgagttgatcgagggtgagatcggacttagcagaagtctaggcagattctttgaagaatgcagagaacgggggatcggaaagcgagatgatgatgacgaggaagagggagaggaagaagagaaggagaaggagaaggaacaagagcaagaggttgtggaagcaaccgaaggagaagcatcggcggcgacagacctcacatcatcaacaccaataacaaccactacaatagcaaccggagagacccctagagagggaaaagaggctgacggagaagtcaaaagcgctactcaagatcaggtacatatcccggagaatgggagccatgacaagaaagaaatcctagatgtgcacgagcagaaggaatacctcgatggatcaaaccggcttccgtcagatatatcgatgagaatggacgtcgacgatctatctgcatctcagcctcaaatttcctctaccctctcctctcatccaccaaaaaaatctgcggatcgtccttcgatacatgccgagggtcatcatcacggaccagaaggcgtgattgacgacccgactgattttgaacatcaacaggaggttcagctgagcgctttggagaaactgtttgttacgccggaaggagtgagttatccgatacctcctcaacagggaatggatccgaacggtggcgcaatgtttttaagtgtagagatgcagaaggaggcgctttatcgaggcatggatgcactcgttagtttattttcttgctttccctgtcacccttctcatccttcgacaaacaactggactgatctctggttttctctaacatgccaatatgatacatgctcttatagggagaattactggcagattcgagagaatatgtcgagcgattagaggaggtcagagagcgtctcgccggagttggaagagctagaaagcgggtctggagagaaattagggagagatgtttggagaacggagagttaggagatggtagtacggattcgtgagagcaggttagagatcagtatggatccggttcgatgtctacgtttaattattcctggtcagcactttgaccggctcagactgctattatttgttgtcttgtaaattttatctataaagtattctcgtttctggatctgattgctacattgatgatcataagatgtagaaaaggaagtagaaagggaaaaggctttggaagaattataaaaataatgaaatcttattagaactttcctattgtttatttttttgaaactcatcaccttctttccatccttgtcctcaaacactcatcatccaaccttggctcttcacgatgaccactctgtccttctcgtccggaccgataccacaaggtcatcttacccagtggcaagactctggaaggacactcagccatatactctctccaggcttcgggagtgtgagtttctttccttctctcctcaggcgtatctagattcagatcttctctccgaggaaaaaagcatagatagaaagacgtgttgattgacctttccggtcctcctcttctcctccgtcttggaacatcgataactgttctctgtggagaaatcttgtaggaagtcggagcattcgtcacaaagagagacggtactctcacgtctgccaagctcaagacacctgctcacggagagcgagcaatcttctttggaaagtgggacaaggtccctcaacatctcattcctgtgagtgctttctcgaggctcgatatatttcggtctgttttcttgttctcgatcactcaagcagaacctctcatctatttccatacatcatggagaatagctctacacaagaacatatacgctgtttcattcattgcagcagatcgcggctgaatccaacccggcccctcaagatacttccttccttcgtcgcccctcagctgccaaaccgaagtaagtgttacgtttctgaccgtttgacgacattgtcgcattcttgatgctgaagagccgcgagctgaaactcttttcaaattggaaacataaacagtctcccttcggcttctcagattaacttttattctaggatcgcatcgctttatactgagacccttcgacagactctacttctcccaacattaaccgccagcgagcaagatcactgggcatcgatcacccagatcttccaccttgcaaagattctttaccttcctgaagacggaaggggtgacggtgtcgtgggtgaggagttactcgattggataaacatggctgacttggggccaacgacggaggaaggagaagaaatccttggatttagcaacggggatagttgggcgcacgaagagttttggtcatacttgatcaggtaggtttgagatagtggttctctacagggcgagagaaagcatgtgtgtcaaagatgctgacaggttctctttctctttccatggctattcgcgttcttgactcattgattctcaggtcactcttgagaggatttcttccttcgacatctcagttaatctccactctatctacccacccctcacccgttctatcctctatctcctccaagatcgcgacccatctagccgactaccctcgatcgtcctcttcttcctaccctaccgagcgcgctttcctccaagcacactcatcctggcgagcgcaattccggacactttgtgttcctctcactaaacgagggtgggctctcgaaggagcctggggctcttcggatgaatcctctgggcttgaagacgtcgttcaagcagtgttggagctcatgcaagggaaagaagaccgagtgttagaggaatgcgtggattggaaggaggctgtcggcgcatggggtgtttgggtccgaccgtcgttgaaacgagacgacctaccggaaaccatccgaacgatcagctccggtgtgctttcgttggatccggcggctcaggatgaaaccgtgatgtacgcgttacttcaaggagacatcacccagacgatcacctctacgaatacgttgtccgtctggctagcgactcatttgacggacttgatggataagctgggcctggtcgagacagttgttggggcggagagagggttgagagatcacttcgtgttggaatatgcgcttcatctggccagtgaggagggtctgtggaggatgacgtgtgattatctgaagacatgtggagaggaaggcaggagacgggtcgcaggccttttggagaggatctcgctagaaaaggacgagcaggatggaggtgggattgacgaaagcaaagtagaagaggttttcaggacgtacgttatccaattctgctttgttgtctgctttgtgggcacggacggaacgacctgaccgaaacgtgttttcctttctcgttgctctcgatcgatgaacgaaactcaaacagtctacagacgttgggcctagaagaagaaagtcgaacgctatccagagtggtcggtcagcgaatggttcaatcgaggcagtacggcctcgctgtcgcgtactgtgttcgagcaggtgatggaaggagacttgggataatatcggataagattttaaacgtctatgttcaaaaaggtctgttgggtggtttttgtctatctcttttttttcgccacgcttttattctgatcttgcttttttttttctcttccctctcgcttcttgcgataggtcccaaggaattcatcgagcatgtcaactctatccccccatcactcttctcccccgaatcacctcactacatcgcctcggccgcttccggcctgtcgccctcgacgacatcaaacccgacgttcccgatcctggcgagtaaactaaacttcctcccgttgtaccgagactttctcgaatcgttccattccaacgatcttcccaaagctgcctccttactgtccaacatgtttgcatccgatatcgcacccaaagggttctgggctgtcctgttggtcgactcggtggtgatcttggaggatcagaggatgttggtcgggacggaagaagcatatggcttgctgggtcggttggaagaggtcgtttccggttcgagtcactcaccgggtgactacttgggataccttgtcgatctccaaacgacgtcttcctctactggtaatgccccgtcgtcgtcatcctcctcctcctcctttgacgcattcaacacgcccctgtcgacaacatcgaccttcaacacgatcgccaaatcaagaccgctcgtcaacgggcaacggaaaaaaggaaacggaaagtccccgacggatgagttctatctggcaggactgaagggcttggaggtagttaggctggcgttggctaggtatttggctagggatctgctgggttgagagagagagagagagggtgagggagagggtgagagactccataggcttcatttttttttcgaggtttataccctccgagatggaaatgtcctttttttttctccttcttggcctttgcttctttctcttctagagaaaggttgtttgcgtgtgtatatgtgtgtgtttggttcatcttggtcttccttttttgaatcacgatcatctcttggtggaaacccccacatgcattcctttcatctgttcttcttgatttccttctctttattagatttttcatttttatttttgtttttgtttttgtcttcattttcatttttacattccttc

SEQ ID NO: 2002 - DNA, 2498 bp, Xanthophyllomyces dendrorhous
ggaaagggaaaagggaaagggtgaagacaacgaaaagaaagaggacgaacctccctccaaggcaagaacgaccgaggggtagaccccgttgatgtacttcagactggtatcgagcgagcctaggccttctctgatcatgtccttgttgacggatgcgagggcgtctctggcggtggccgggtcggcaggatcgatcagccggaggtggagaagcttgctgtttgtcgacgtaggttcttcgtagtcgatgttggcgcttaaaagaattaaataaataaataaataaaagaagagaagagcagagcaaacgaacatcatcgtgtttgattgcattgatcagtcaatcaaccggtacaggaacgaaagacagctatcggcagatgaacgcttacatgagttttcgaccttcggcgatatcccggaatctgaagatggattcctcggcgtactccgtcccgggcttgacgagcttgacgaagctgttccggtaacgatagtaacaacaaagaatgttaatttgagtgtggttctattgttggcaatccccagcttgtgcgtgccgggatttctttcccccagaggaagagaaaaagagagagaggaagaaagtatacaagagagaagaaagaaggaaagcttggagactaacgagagtcgagcggcatgagcttgaggaggcaacgtcttgaacttggagtcgatcggtcgaactttggagaacggaaggacttcctcgtttccactgtagaaatgtattccagcaggaaacaccggcgggtcagtaaaagagagagagagagagagaagagaaagaaaacgaaaaagaaaaagaaaacgaaagagaaagagaaagaaaaagaaacccactagtcgataaacacaacctcgcactctttcttcagagcggacgctcgcttcactctagctctgtaccactgatcgtcctccgagaactaaagaaagagaccaagatttattattttattttattaaagtcgtaaccagttggtctgtcagatgccgaatggacacgcctagctcacaacaaacaagtctccgggaaagaaaagaaaaaaggaaagaaagaaaccgacggacctgtccagagatcaactctccggctttcggactgaacccagggggcgacctagcggaaggagaggcatggaacgatgaaaactcggccatcaacttttccagagctgccccgaactggttctttccgtcgaggatctggacggagaacccgaaaggatcggcggtcacgcacgagacgatcacgtcaaagtacgccgtcgggagtgctttagcggcttcttcgacggctgggtcgtatgaactccaaagctgaagagagagagagagagagagagagagagaggtcgccggtgaacgtttgatcagccttcgacacagaagagaatctgccgcaaaagggacaagacggaaagacgacatacgtttgctttgttctgatgggccatgcaacatgaagattgaaattggaacagtcaataaagaaaataaaaagacgattccttcttgtctctgtctcgaaggaacatgacttactcgctttgcctcctcctcggcagcgaacaactgtctggcgaatggcaggctttcggccgtgtacgcatggacctgggccagaccagcccggacgagctcgacagctacgttctccgtcttgttgacgtacatagctccgatgtatcctgaaagaatgacattgaaaagatgtatgcgcgttgagagctgatagcgagggagaaggaaaggaaaagagaggaaaaaaaaaaggaaggaaaaagagcgacacggacctccgactttatcgaccgtctcgaactcgacctctacgtctctctgcatgtatctcgaagcgaaccggtgagattccaccccgtagggttctcccttctctgatgggttccttaccgttctcggggctcggattccggcgaggacctacagggtgagaggaaggtggaaagtagtttatcagtaaacaagaagactgactagaaaaggagagggaaggaaagaaaaaaaactaacaaaggtcaactttttgttctccttgggcaaaagaactttgaatctcgacccggcggctacgaactcgaccacggcggcctgtctgccggctcgcttgaagaaaggcaagaactgagaggcctttgctccggacttgggaaagatttcggttcaaagatcatcggtcagtcatcgcgagagagagagagagagagagagagatttggaaggaagggagggaaagaacggttgagagtgggctggtttactcacctcggaggcatcgatgattcggggaagggccatctccttttgagagtgtaatcccctgagctcggtcacggcgctgttcgcacacagaagatgggatggatgacccaaagctaacgggaggttacaaacgcgtacaggccaaagaaaatcgatagagattggaacagaggcggaggggggggggg

SEQ ID NO: 2003 - DNA, 1728 bp, Xanthophyllomyces dendrorhous
gggggggggggaggacttacgtttgctcggcaatgatcaatttgtcgagatcaggcgatcgatcctcgtcctcctttcggtgtctctgaacggaggcaaaccctttctcgatcaacagctcggccacattcctgtttccggtcgtggtttacagtttgagatgagtgtgtctttgtttttttctctggaggaaaggcaggaaagagagagaggagagagggggaggatgactcacgcgtgcgctccaccgaaccgaatggtagcacaaggcttctcatcaaagtcgccttctttcggcttgacgtagtcgatcgtgacctggacggactttccgatgagcttctttcggaggaacctgagggcgagcgggtaagcgattggttttccggggcgagagagagagagagagagagagagaaggaaaaaggagaaaaaagacattcttggagagaagaagaagaaagaaagaaagaaaaaaaaaccacatactccttggcttgatcggcccaataagcctgtttgggatccgacgctctacgatgagaaagcgagatacagatggacgagaaagatgagttaggagtgctctgaaaggatacggctccgatgaatgtgtgtatacaaactacatatgggatctagaagaaacaaacctcgttcccctggtggaggctagctggactctgagctcggtggtctgtcctttttcctggacgctcacactatcggcgctccagatcctggtgacggtggcgtcgaacgttcggagcatgctttctctgtgggcgtcggctgctttgcttccggcagagccgttgacggcggcggcggccgctctggctgccggtccggaggtgggcacgtagttttcccagacacctagcttctttgcctgcgccgccttttcggccgcacgaagcttgtccataccgccaaaggaggaaaggaggccggcatgccagtcgagcactttggccaggccggcggcgacgaggatctggctgatgtcacctgcggggtgttgggcgagaccgaagaaggtggaggacgtggtgggaggcggcgggggaaggatgccggacgaggtgggcgaaggggtggtcgagggggcggcgctggtggtaccggtcgaggggcctccgatggagaccggggaggagaggaggatgaccttgatggccctttggagaagtcggctctcgacaaagaacttgctctcttccgaaaacggctcgccggtctctgttgatgatggtccgtgggcggaggcgttgactctgggtgctttgattccggcgaggttgaggttgacgaactggtgttcaccctggaggagcaaacgaattctgagggagcttccgtctcggacgttttcgacgattccgtcgagcggctggcctttgtattcggagaggaaggcctgggagtctcgcatgtgaaagtttaccaacggttggtctcgctggagaccggcgtggaggccgatggcgtttgcttctgcttctgcctggagctgtcggagggcgtcctttcttgcggtttctgcggtgtcctggttggccggggagtctctgactgtggcccaaccggcggagacgaccatggaggagacgtctctgtttggcgcgccctaagagggggggggatggcagagaggagaggagaggaagggaagaaaagatttagaatggggatgataggtgattgtgaatacacacacacacacac

SEQ ID NO: 2004 - DNA, 1019 bp, Xanthophyllomyces dendrorhous
cacacacacacacacacacacacgcttacctgggttgctccggggatggtgcaggttccgtattctctgatgacgtcggtcgagtagacgccgctaccttcggccgacttggacttgtccatcgagtgaaggacgaggatgctgacttctttgccgacgaggagcgttcggaggaactctctggaggggaatgcgtagggttcatcttctcgctgggaggatcccattcggggagctgtgattccgctcaagtggaggattctgggagaggagcaggtatgggatgtgtgtgtgtgtgtgtagatgattgttagtgaaaggcggagaagaaagagaaagagagggagaaaagtgtgctggagagagctgtgttggaaaggggcgtacctttccttgggagtttcattctttggtccggcccgaccacgtaggatcaaggtgtctccagagaggacggctggtggggggggaagaacggagcgaggagagcagcagagaagcagagaagcaagggaaagagaggagattatatgatataaaataaaccggagaggtcgggcgatggaggaaagagcaaacgagatggaaggtgagcgtttggtttgttggagcaaaaggagagaggcagagaaatcaaaatgataaaaaaacggatcttgcctttgacgatctgtatagaagagggagggagggagggaggaagaaagaaagaaagaaagaaaggcataaacattggagagaaagaagaaaagaaaaagaaaaagaaaatcctcatgagatggaacgacatctcggaccggagatgtctcttgtctctgtgtgctcaagtgagagaaggaaaaggatgggactgactgctttgaatggttgtgacatgatgctgatttgattgattgattgatgaaatgtgctagatgggcagactgaaggagagcaaccagagcgagaggaaagaggaggaagagatgaagaagaagatgaagatgaagatgaagatgaagatgaagatgaagatgatg

SEQ ID NO: 2005 - DNA, 808 bp, Xanthophyllomyces dendrorhous
gtgtgtgtggttgtgtgtggatgtgtggatgtggatgtgtaagagacagagagcaaggaagagagaagagaagaaacttggagagaacagatggagaagactgagcgaccagagcaaggataggagagagagggagaggagagagagggagaggagagagagggagaggagagagagggagaggagagagagggagaggagagagagggagaggattgagagagagaggattgagaggagagacgactagagaagagagagagagagagagagagagagatagaaatagagagatagatagatagatagatagatagagagatagatagatagagagatagatagaaatagagagagagatagaaatagagagagaggcagacaaagacaaagacaaagacacagtagagctagatacaatagagatacaatatacaatagaagtacaatatacaacagaagtacatgcaatagagataggaatacttagacacacacacacacacacacagaaaagacaggcatagagagacatagtggagtggagtggagtgcagcacagactagagcaatacactacagcacactacagtatagtcaacacacactcactcgctatgcttgaacctcggccgttctcgctcgccctctgtgtgtgtgcgtgagtgtctctactgtagtctctctagtacatcctctctagtgcatcctctctagtgcatcctctctagtgcatcctctctagtgcatcctctctagtgcatcctctctagtgcatcccccctaatacactctctctaacacactc

SEQ ID NO: 2006 - DNA, 2879 bp, Xanthophyllomyces dendrorhous
tcttctctttgctcttctctcgctcacactctcacactcacactcacactcccactccccctgcttgcccgagcgcgcacgcttcagtggcagaaggggaatcggcaatgtccgctgcgttctttgggtcacgtgcgagcacagcccggtgtcccatcagctctcctccctttgtctagcccaacaatgagaacgaccatctcactcaaatcatcatcatcatcatcatcaacatcaacagcgccgtccgatagaatgtcattcacccactttcttctttcttctttgtctctgtctttgtctctgtcgttctctctctctcttcttagtcctctctctcttcttagtcctctctctctgcgccttcctagtactctcctctcctctccctccccacacatatgcacacccacacccacacccacactgtagagcgcctcccatcaaacattctctccagcatccaactcgccatcggcacaacccacccgaccgcgctcagagatcatctcgcctggagcaggtcgcaccccatcctcagagcgttctaccaaccctggtgggaacggcagatcaataattcaggctggggggtgtgtcctcttttccttttctttttccttttctttttctttttccttttcctttccttttcttttcttttccttatcttctctttcccttcctcatttctcttcctccgtcccccttccactaaccaccccctcctcgacatcacttgaaccatcatccagctccccaacccagcgcccccgagtcctgtccacgcgctgtgctactacctccatcaccaaacgacctgcgccgtccaagtccttcgcccatgggcgtacgaggacgatgcagcctctccaggctcatccagaaaaaagatccctgacgatcgcggcgagtggatcgctctctgctggagcactcactctccagaaaagtacgggatctggcgtacgtcccatctttctctctcttcctctctccctctctccctctcttctcctctctccctcgccttgctccttgctccctctcggctaaccactctcatccttctcacagcacctctctccaaatctggccagacgatcacaccgaaccctctactgtccgacacgttcctcccactgaccccacctccaccggcgtggacccatcccgctctctccctgcccacacaccaagcccacaccacatccccgctctccagacacccgacctacgcccatcagctcgcctcctttcccgcccgagcagagctcgaggtcttgttcctatggggcacaccatcagatcactctctcgaccaccacaaaaccctcccagccggtcaagccgaatgggaaaaaggaagagccctcgtcagagtaaacaggcaggacggccgacccatcaccgtcagagatctatggcaggccatcttggatttgtaggggttcttccttccttccttccttccttccgtgcattggtaaatattgatcaaatcgcttccgcttcctattcctctgtctttttatgtactacctagctggacgagccctctaggatggcaagaaacgaaaagacgtaagctttcttccttctctcagtagcaaagcctcgctctccgtacccgtccttcctcttccgcctcctaatcttccctgctcttctcattccctttccccctccccgaacggaaactcgctcaccccgctcaacgtgcccaatcaagtacacgaccggttccctcatttggatacctatctctcttccgatcgccctaccaaaggcgagatgaacggtcgtctgacaaagattcagagagataaccagcgatgggcttggctcggaaactacaagtacgtttctatgtctatggttttttctttctttctttcttttttctctccacagaagggcggctctctttgttccccttccctcacaaccctccatatcgtgcttgactctcactcacacacacacacacacacatcctaactgcgctcgcgctcgtgttcacccatcccgaaccccagtgtgtttacaggtcttctctccgccatcccgtccccggcatcaagctcgacaccgagagacaggttcgtcgcctggctgatcactccctccgagctcgcacggtttcacgatcaaggggaagccgagcaactcgctgtcgggtcgaagcgaaaagcccaggatgacgccgaggccgaccttgatcttgaccttgaccttgaccttgacaacagcaaagataaaggcaaaggtagaaaggaaaactcgggtccgacccgatcccgacctagaacgcagatgcaacctcaagcccaacctcaagcgcactcgaaaccaaaggcccaggtccatgtaggagatcagatctggaggaggatagactcgacgacggatgaggctgtcagcggactttattagtatcttggttttttctttctttctttttttcttttttcctcttcttccccctcttctctttcgttcgtcattcccttgctttctcttccctcccccccccccttctccggtcggttctttttgtctgtctgttttgtttcttcgtctttttgttcacatcccccatgttgtacaaccattcgtcctgttctccccgcgcccctctactcgatacacatctttagtacttctcgatctgtccttgtttcaatccttatatgaatatacaccaaaacgaagactcggtcacaacgacagactatagaaaccaacggtgggcagcttggctctccttttctctgacggattctagggggggcgcaaagaattgagaaaaagactgggcggtcgtgcctatcttgatctgaagaagaagggaaaagaaaaaaaaaaaagaaaaaaaa

SEQ ID NO: 2007 - DNA, 1255 bp, Xanthophyllomyces dendrorhous
aaaaagaaaaaaaaagaagagaacaaacacccccccttggcacaaacatcgttttctctcctgccgttctcgtctctgttctttcctcccccctcccccttccctttccttctgcgttccgctgcccgtcaatgtcaatgaatctgtgtcgctctgccaaagaaacctcccagatcggtaacccaaccgctgttccctgttctctgttctgtcaatttttttctgtcttgttgtctctctttcgttcttcccttctttctcttcattcactcctaccccaccatcactttggattgacttgctttcactaacttgatcttcactcttgatgtcggcacgttgtctcttgggttgaagcaatcgctttccttcgtcgtcgtcctccattcccctgctccttctccttcatattcttcttcttcttcacgatcctcctgctctttgactctcgctttctcttccgagtgttccttcatctccacttatacacacacacacacactcattcacgacactcgaattttcacgtaaaaaaaaaaaaacaagcaaggattgcactcaagttgactctcacaaggacgacaagacgggacacacgagaagagaaagagaaagaggaaagaaaaaaaaaaaaggaaaaagaagtggtcatgaattcaaaaacgccgagactgagccatccgattttttactcggcctgaacggcggggaactcaaagtggacgtcctttccggtaagtcgtcggtagacggaggagaaggctgagcggttgaggaagaacgaacgaaagaaaggtgaatcagcatcggaaaggagaaacacacacccaagcaaaccatgtatccatcccttcctaccgtcccccgtccctccacacaaggccaacaaaaaaaaacacaagacggggacctactgtcaagcttgtactcgagaaggttggagtccttgttgtcaaggaagaccttggtgagcttggatccgtcggtggaaactcgggttcgtcgtccggtgatgtcggaagggaagacgaggtcctcgaggatggcatcgtggacggaggtcaaggttcggcttcggggtcggagctgcttgactcgggagtttcgggtgggctttcggagcattcgtcgctgggcgaggaagacaatgtgtcggtccgaaagcttcttctcgagctctcgggtgagcctagtagtcgagacgggtacgcggacgaggaacgaggaaggagtagaaggaaaaaaaaaaaaaaaa

SEQ ID NO: 2008 - DNA, 29587 bp, Xanthophyllomyces dendrorhous
aaaaaaaaagaaagaaaaaacaagaacacctgtcagtatcttgatgacaacaaataaaccgatctgaagtaggtccaaagaagaacattcttctttgggcagagaatgatccccatgcaagacgactctgatttctgatgtgtagtcgtctgtattcaaaatcgattccttgtctctttgcccacacgatccgatcacccctccggctactcctctcaatgacccagttctacccggcaccagcaccgataccaaatttttcttcccctttttcaaaagctagccagacagagcaaatgaaggctcacctctgctggaccttgtggaaggccttgagcatggggacgggaacgaagatgatgacggccttctttccacccttgacgtcgacctccttggcggccgagatctggagagccctcaactcagacttgagctcgggaacgttgttctcgaggtccaagatggcctgggcgacagtctgctcgacctcatccggggcggtggtaggggcgttggccgttcggagaatcttggactggaaagacatggcgactaagggcagaggggaaggagaaaagaaacgacgtcgagagcgtaggttttcgagacaagatgtcggaaggagcacaagaaacgcggctaaaaagacgaggaagtacgtttgatccagcgatttccacgtaaacacacacacacacaagcacgacaaggataatcccagaaggcaaacgaaagaacgcaagaatgatcccaaggaaaaaaaatccaagggcgaaacaaccaacacatcgtcgtaccagacagccagaaaaaacccgcaaaaaatcaaggaaaaacaaaataaatcgggactcgatcagcatctgatcatctcgactctccaaagagagcgacgacacggataccagacatctaacaaacagaaattgagtgtgcttaccgacttgaagaagagacgaccagatatttaccagggaaaaaaagattttcttcaacgcaacaggctggggtccgtgcgtgaatattttcaccagggtgggttcacgacggatctttttgttgagaattacgtaagtcgcctagatcaagccaggcctcagggtacgcagcagttttctagtgttgcattagggacgtgctctattgatggattagacaggtggcgtatgtttgtatttgaagtgtttcgtagtgttctactacggagacagactacaaaccatcctcttcctctgctacgcttgctcaaggccagctaaaggtatccgcaaatacacctcgtctggttctgtctgtgcgactgcttcagtatgagcggtaaggaccagtaaatctaggcttagtcaagttatgcttgagacaaccgacgacagagaacaatatgaacattcagcgtagaggctgtaagccagggttgatagcacagataactcactcagtcctttatcttatcttatgtgaggtcggccttctcggatgtgtggatgtgtgtgaatgtctccaccgaactcgtactttttgttctcaaatctcgcttttcacttcccacttactactagattccaactgccggcatgtaacatgctactgttctgagcgcatccatctcggcgtcttcacagagttctcccggctacatacaacagacacacaagaaaacagaatcattcatatcacgtgaccgtacaaacatcctgatctcgatcaacctttcgttcagtcccacctcgctcactctgctcacatctctctctctccatctctcctatggccatcagcctgcataccgttcttcctgcttcatacgactcctcgtctcctacgaattacatccccagatataacctcccctcggctccgaactcgctggccatcctcggtccgcttcctggatcgtccgctgtgcatatagctcttggtcttttgtctacagatcaaccaggtgatagccatgacaaggacggttccaagggcagtgtactgatcctctccaagaacgaaaacgaatggtcttcagctctcatgaaagatggaaatctttggttcaaaacagaggctgggagagctcgactgtccaaaacgctcgacagagtgaaggtgaggccttcggtctctcttctttctctccgagcgaaggacgctatacgtcatgcgtttgatggtgtatgaattcattagccatagctctagttacatcctagctgatcttcttgtctgctgctcccgttcagatccgatatgcgcctactgcgacgcatctggcacttctcctctctctcctgtccactgatgatacgctcgtgtcagattcgacgcgtaaacccattcacatccggtctgaagacccgacgcgactggaaagctttcctcggttgatcatcttacatgagctgtcctcattctttggagggtttgtggaacaagacggagatcatgagcctgagtggagaccaagaccaacgtacgcaataagtccttcctttagattctgcaagagcaaactactgataagttgtaacgtgttcgtctcttccaaaagggtcgatcaatcccaatatggctccctcctcaccctggctatctctacagtcgatcatctcaatgagcgccggccaccagagtaagtcttacacagctctcgcattcatcacggccgacatacgtttgatctatcatctgcctcgttattcttgtctcttcctacagtacacccgctactcaactcctcctgctagatgctcaagccttgtcaatctcactacccataatcatccctcccatcgatcaacctctatcagaatctgatccgttcactccgtccaaaagaaagagggatacatatccaaagctggacgtgagagtattggtcgagagttttgttgactgggtcggaataatccagccgttaggttagtcatgatcttcttgtagtctcaacccttttgcttgccatttatctagatcacgtatcttatctatactcctttctttctcaacctcatttacgctgcatcgaacagaacacacgccatcgccgacagaacagcgcccaaacctacctacccatcaagttatcgtcccctctttaatcccgagcccaactgcgcctgctgaaacgagagcgaacgtctcggcatacgtggacactttctggttctgtggagagggaacaaagatcaaagagaaagatacgagagatgaggggaggataggtagtagcccgcatgagacatgggtttggtgtgatgggccttgaggtctattacctgaaaacaattttcgcaaactcggccgagtctccctgtatccgtttccggaagattcagacaagagtgttgcacacatatagctcaagaatagggggaaaagggaaagaagggaggtaaaagagaaagacttcatgtatattacatatttcgatctataagttctgtttctttcggcctgtattcgagtattgcctcagaacccattcgagatcagcctcggtctgttcgatcgtgccctgtctaatctcgtacgctgtaaggcatcaatagagcagcgaagaagaggaaaagaggtgttagacaaatgtatagcttgtagttgatggaagaggacgggttgatacgtacgcttcatgtcaaatcgaggtccaacctcggccaactcgacggacttatgggacgtttttgcgaagacatgatgcctattttcgtgttaattgatatatgaagaaaaatcccacatgatcagttggtttcggttcctcttttacttgttgcaatgcaatgaatgaatgaatgaaaaatcaaaagccaagaggcaaagggagaagaaaggctgacctaaagctgataaagtcaccctcgttcgcaaatgtcatcactctcttcgaatcttccttcggcaccgggaacaagaacctcaaaacatccatgactctcttccctaatctgctctcgaaaccgtcaaagatcagatgagggtactgctccgaaacggtagatgtcgcatgagaagcaatgtcgtgtctaagaacaacgttgtggagcgtaaagtagacggtcgggccatgaggaaagtgagagacgatcaaggcgtctaacaagaagcagagaagatttgataagataatttgatggtttgattagcatgtggagacggaaagaatccaataaaaaatcctcgatggaggagaacaaggaaaggccttaccgggtacacctcggtgttcatgaacgacaaccagatcagtgatatcgtttgcccggcaagcctctgctagatccttaaccacgtatcctcctcgatttatacgatgcgaattcggaaggaccaatctcatttcctgattaaacaataaaaccacgtaaaagagatcagtcagcctgccaaaagaaaatccgtatgaggaaagacagtgaaagagagagctgactttagcaaactgaagaagtttagaggatggatcacgggatgtcgtcaggaggatctttgggtcgtacacacccgctcgggagtactcatcgtccacatggtccgtcgggtcttccaagcaccaaagagaagtgagcaaagagttagtacatatgtctttagccagaatgtctttattgacctctacttctgcctcctacttagcccagacacaccacatcgttgggtagtcctgaccccaccaacgcacacatacacatacacacaaacactctctctatggcgaaaacagcacgcatgcaaagcagagagaaccaactaaccggtttgagcttcatcatacttcaagtcttttccgatttccctagcctcccttctcaactctgtaggcagttgtttccccgctgccaacgcgtccttcatcttctgctttcggtcatacgtcgacctctcctgtgcctcatttgccttcttgtagatatactctctgcgctctctagcttgtcttcgaagctgttccccgtaagacatgaaatttcgtaagcaggggaaagaacaacatgggttgtacaatcagagaccgacgttctgcatcgaaagaagccaatccgatagattgtagcagacatcgaaggtaggcgtaccattttgaaaactttgttctagaacctcggaaacgaaaaggatgggatggattatacaaacaggaattgatctcttgcgaaagagttaagatgtaacgaggtgtgtgctgtgtgctgtataggtattgaagaggataggtgtccgaaccgtgtgggtcgatacaaggatattttatgaaggggtaatcgaaaattatcgggttgccatggtgatccgcctcattctctcattcacttcctgctctctaccagtacttttcgctctcctttgtaagaaacatcgttaggaaacacatatttcatatcagacactagtagtcaagatccgtgcctattctacaaagtcaaaaggctcggtaaacaaacaggttgataaatttcgaaagaaggaaaagaagcaagtttaaactatatatggccttcaagttcagcgaaacagaaggaaggaaaggataggcataaggagagatgaagacgaaaatgagcaaagaaagatcagagaaacaagcagaagagaatacagtagagcgacatggaaatcatatgagtaaagtatcttcaacctctcagtcaagccaagggctcagagttcgagcttccagcactcggcgtgccagcgatcaaagaccgaacatgagtcatgaccgaaggagggactaggtcgccgttagacgaatattgatcatcaacaagtcagttaaagagcgccttgagagaacacgatagaaacggagagatacgtacatagtcgagcttccattcgctcgcagagttcaacagcccgatgtctctctccaaaacctaactcggctcggaccatcgtctcatatgtagaaggcatcctataaacgacacctgcaggaacttcggtactgttggcagcaatacctatcatagtcccaatcaaaagtatccagggtgagcccggacgcgcttcaaaaccagaaagggagggaatcaggaagacatgaaaggcaaggaaacacatacccatggcgggatcttgcatccgctcaaagattgctcgtgctcgttcaatctgattctccgaggcaaatcctttgatcaagacgttctgaatatacgtcgtcgttttagcgccattagcgatcatcctgtccaagtatttctccaaaacatcaaatcgtttgctattcgagaagagaagcacgatgtcaggtaactgtttcatccatgccaatcgcaataaaatgatgtcaatgcagaacttactgcatgagcacagcgttgaagagagcctcccagcagacggcatcaggcaggacgggtgattgtcgtttaccaaacgtcggagcattcgctgttcgctgagtgattgaatcgaagatctccaaggcggtgtccaagtctgtcgattcaagagagaatatgtcactcaatcagttccggcctaatctgaagtaaaagagaaatttaaacgaacccctgttgacatttccgtggcagttgatcaaagttgcccaatgaattccctctagacgagcgtctgctgtaggagcctggatcaaggcctcaaacaccttgtgcatagctcgaagatcaacaggttcgatcgatccgtaagcttgcatgagtaggttgtaagtgtgtgaggttggtgatatatttgctttgagaagctcgtcgtagtagtacaaaacacgctctcggtccgggtgggaagtgataaagtattgcatcatcgtgctgtcagggcgggagaaaagagaccaatagtgagtttgaagtaaacgcctgaaggaaagataaataggatgaaacaagacgtacttgtaaggatgaacacgaggtttgaagttcgactgagaagtcatctcatcaaacaaagcaatcgctcgctcagagttcccaactcggcagcacgcgttctacatatcagcaccaggaaggaatcgtcagaattcaataaagaagacccctcccatcataaagaaaagatctgatggggactcacgatcacagctccataagtcacagtcgaggggctcaacccaacctctttaacctcatagaagagcgcgatggcctcctctgcctttcttgctttcgacaacgacgagatgatcgtgttgtacaaaaacaacgtaggcttgacgttcaattctttcgattccctaaacagcgctctagccacagcggcatcatccgtggtatctttcgctccgttgaccagggcggcgtaggcatcagcactaggtgctcctcctgcttgaatgatgtttgttctgtggaaagcggctcgttccatctctccacagtgagcgaaagcgatgattgcgttcgattcgatcttgacccagctgtcaagatcatcaggtttagtgaggaacagtacatgatgagctaattcaaggacttcaaccatcttctcgagctccttcgctctacccagcgcttctactagatgtgtcagacagatatgatgggcgacaaggttttttgccattcccgctcgtagggcctggtatgattgaacgggagtcaccttggcagaagatacacgatgaaggttgattactctagtaaggtttgagtccacgaagaacgttcgtcgggagaggtcggcgttgggagtatcaaatgtgggaatggttgattcccttgatcgctcagctgacgattcggctgagtcttgggtagaagcaaacaagctagacgacgaagatgccgatgccactgaagacccaggtacaaaaggagcagcagtggcctgtaaaggtgtagatgtagcaacgacgacaggagcaggcccggatgccgtttgttcgttcaaactgataggagcgctcgattggccctcagatgtttctaatggagagaccgcctcaggaagctcagtctcaagagcgacaggccggcccgcttcagaaacaagggtagcatcaacagcagagacggtgtcttggctctgttccgtggctgccgctggctcggtttggtttgtcaagtttggagccatatccgctgaaggcacatatgctgcgcccgatccgtaaacccggagaggaggtaaacccaacaactggagaacatccggtcctagaagcgccaacaatctagaagcgtattcaaccccgtgacattccgtcaaagtccttgccgccgaagcccaattgatttggtaagtcattccggtcgctcgcctagcattgatgagcgcagagacaaaaccgatggtattgtttgcctgaccagtttgagggaatgttgatcgaacatcttgaacggatgcgcattctgtgatggcccaaacagtcgatgcgctcaaaccaagcttgtcgagtcgaccgtcgacatcctgaacggctttgctgtagaggcctaggacccgttcggccacaccagggtgagaaacatcaagtgggacatcgagtgagactccgattcgaacgagcgttccgagtaggtccagtttctccttatcggtgtattcaacaaagacacctccttcggttgtcagatcatggacgatgttggcgaatattctatcttggaacctgaacgcttcagtcgaatccggaccaaagtggaggattgaccgacgatagacatcctcgaaaaccgttgtcttcttcaccttgaccaacaaagcgagcaaaataggagacaagtttggaggtaaaagatattctaactggcggtactgctcgcatttcgtaatcaaaccaagtatccgatcggcgtgctttaccattgtttcaagggtggaatcaggatgaatttgcaacagatggatctgaattccttgagaaatatcgacgggtcgaggttggaaaccagcaggcgagaaggttagagctgcaaataacgtcttgtcgtatagtgcccaatcacccttcttgatagcatgaacgaggaaatgttcgtaagcctgatgagtgagctgaggtgtcgatggatgtttcttagggctatcgggtaggaaatcatcgaaccaatacagggcagaagtgacgtcgttgcgatcaagtagctgcttgatcactacattcagagtggaagctcgaatggcgggggcaacgctcgtctgagggcttatacagccgtccagaagattttgaacaagctgcattgcgccgttgactcgaccagtctggaagtggccttcgatgtatctattccagaacatgatcctttcttcggctcgtccccttttttgtagaacaaaggaaccacggacaagtgaacattagcgatcgctaaaaaatcaaataaaaaaaagaaacacccagacgcctatccagaccaagaaagacacttactcttcatcttcagctatccatcctatcctgccatttatgtcatcgtctacaaagtccactaaaagttgtgcagctgagtccaactttcggtcgttgaagaaggcagagagcaaaccggtgtagatctgagtgctgataaagccagaggtaggaatgatgtctttactcatcaaccatcttatctccttatacaaactggttgccaatctagagacgttagtcgatctaccgagggcctcggccgctttaccgtacaagaacctagggaagaccttcttgttctcgacatagaacctggaggcggcgaaaaagatgtccatcgcttgaggaaggttgaattcgcggaccaagctttctaatggacgttgttgcttgaagttgagcgctggtggatgagcgaggaaactgcccggccgaatttctccacaacgcttctggaagaccaaggcgtccgagatctctagttctcgatcaaatagagtctcgagaagagtcaaataggtaattgggtctggagggatatcagcatttagcatccgtttgaaagtttgcttgatctcatctattggtgcaccaggtggtcgaagttgacgaagtccatcaaggatcaagttaatcgtctcaaccgtcaatttaggaagcgggacgttcgagtgatcggacccaaacggaagtgtttgagagtcccagtaggcgtcggcagctagacggaaagctcgttcatccctcgcatccatggcattgatgagggcgttctggaagtaatgttcagctgggtccatgttagtcgacgtcggtcgttgaatgggagggagaaggacaatttcccaaggcgctccgtcttctttaacgttctccattccgggtgcaggctgtagagaagaagtggaggagataaccgcatgagcttggctcaagttcagcgggtctgtttgggagattggttgaataggttggttgtccgtgtgggcaggggaagaaaataacggctgagaagtctgttcagatgcatcgaaattaaacgaatcaagcactacagcgtcaccctcatcattgatgacgaccgaaggaggggaaagctcggggtctgactcgccggcggaaggggtacgatattttgaactggtcgagagagagtgcgatcgacgaagcaaaggaaccgatgtgaagtcaagtcgaggggtaaggaggatcgtggaagggaagctagatgatcggactcttggttttgcaggagcacgaagaggagatctcgatcggacattcacttctggcgctctagagttcaactcggtcgtttcggttggttgttctgtactagcctcctgacggttcatcgtcggctccagtttattaattaccgtttcggtgccagagagcctccttagcctacttggcctcctatgcgcacgggccattgcggatttgttctcagaagtctgactgaacgcgcttctcagctttcgttgaacttcgggaagacggagcatcgtctcggaagcagaccgtggagggttggttctgatggtcgaagtgctggtcgagatcagactttcctccaaggtatcgaccgttctgatctcgatgggatcggcgcgatgtgcagaaatgatggtaggcagaatgggagtcgatcgagagaccggaccaaattgagaactagaagttggcggaacgacagcagcatccgagttggcctggcggattttagcaaagatgctgttgtatgtttgacagtcgtcttcgtcgagaaccgaggatggatcggaagatgaagaggtcgagcctatgagaggtatgccatggccctgtgttgggtgtaagtgatcaaaggttgaagaggatatattatgagcgattggttctatccagatgagcagtttatagtcaagtgtagcttgtgctcggaacgaggaacaagaaaaaactctaatagcccaggctatcatgagcgaacataggtatagcgagaaagaaaggaacactcaccttgctgtcgttttgatccttctttttcctccctgctccacctctgcctcccattctcggagcccagtcacctacatctaacgaggtacctggcctgttatcgatcttcgtgagggcgcctcctccgagaaggaaggcgttgctagtgaacgggccaccacctccaatgacgtgttgggatggcgatgaatagtcaaggtggacatttgcatgttgttggtggtgacgatgatggtggtgagaatgtcctgcaggtcccgaggaagtagaagaggagatggaaggtgaagaagatgaggctgtcgaattggacgggttgaggactctggaaaaggacgaaagtgtacggaagggatatactttggggaggatgagcatttatggaaggagacctgagaccgaggtaaggctttcccagccttattggtgtaagtgaattgaaggtaaaagaagggtagaactgttgtgtatgtgtgtttgagaatgcgccgatgtaacgagaaatccaacggagagatcacaccagaaaagagaaagagagaaggtaaaaccgtctgtgaggatgttgatgattcaaaagagggatgaaagaggcaatggaaaactccaaattcttccgtctgccgagcacgcgtaatgattgccgtgccgtgccgtttatgggttgccacatgatgttccacgtgtctttcaagcacctaagctggtgatacgcatcgacataaaagcggtgtcgagtaatttgtagccacttcgatcaacctcgggtcttgccacgtggcaggaggttgtagccaacgcataattccggctactttagaaccctaacaagtccgatggagcgctctagctaacttcgtaagccccccgtcgtttgccgtccccatcacttcgatggtatcttcgatgtcatgtatacagttgaggaggactggaggctgatggtacttgcgtgggagcgtttcttgctcggcgtatctatttggatacatctttgcagagtataagatgactatatggacaatgttgctgtggaagaaccgatctgatcatttctgaaggccataagtaaaaccccagaggtagatctttctcaattcattcatctcttcctcatcacccatcaccccatcacatcatcatcctatcatcctatcatcccattatcccattatcccaccatgtcaaatccctcgtctacaaactcatatactgtgaaatggggtatcatctctaccgggctgatcgcagaaagttttgtcaaggtatgttatcctcctttgccctcattagcgtcggaaagctaatggtccgatcactctcctccccaggacattcaactgaatcccgccgagtaagtgttgtcttaccacatgttgactgatatgatgtccgtttcagcctgcttacatcccacctatacgcatatacctatccatcatagacgaggaaccacagacatcgcacacaagatcaccgctgtcgcgtcgcggtctcttgacaaagcacagtctttcatcgaacaacacatcgttgataaagacaccgtcactccttatggaacctatcaagatttgttcgacgaccctgtacgcgtgatattctccttgctactgttacaaacgaatcgttcttttctcgattcactttgctcataggtctttatctcattccaatggcttcatcagaatgtccaatgcgtatacataggtacaccccatcctcagcactatgagaacgtaaaggacgcactgaacgccggaaagaatgtcctgtgtgagaaaccattcacaatctcggccaaacaagcgacagagctctttgcgcttgccaaacagaaagagctctttgtgatggaagccgtgtggacgcgattccaggtcggtctatcggctgtctcggtcatgttcaatcgtgcgttgtcaagactgaacggacgtcttacgttccaaattatttatatttccagcctatcgtcgagcctgctcaaaaagttgtttttgggggcgagatcggggaaatcaagcgaatcgattctcggtttgataaagatttcggaggtaagatcatatctctttcacgtacgtagatagctcggaccggcaatgctcgatttgactaataggataatctggtctatcatgttttcataacagatctacctcatgaacatcgactgctgaacccatcactggccggaggtgccctgtttgatctaggtccctgtacgttcattcctctttgcttgtcttcctctcataaatgaactgacatcagtatcgtcaaccggacgctatagactctttcctttggcctaccttgttcttattccagcacccaaagaatggacgaacaccacctacagatatcagtccgtccataattttcgatcccaggacgggtgtcgacggaatcacaagctatatcatgaagtatgagaagctgggagctcaagttcgtagatcgactttgtcctttacatctgttctactctatgacctaggggtccatattaatgatctgttccctctcccccttcacacgatatcttaggctacggtatcttgttcgatctcgactccgaccgcacctaacagtatcgttgtcactggcacactcggcacgttgactcttcacggtatatcttgctacccaaactctttcacaatccacttgtttgcgactgatcattctcccgagaaatcaactacgaggaattaccccatcacgtctggcagagggatgcattggcaggcagacgccgttggcagatgcctcagagatggaaagctcgaggaagaaaagatgaaatgggaggagacagagatgcagcaaaaggtgtttgacgaggttcgcatcggaggtggttggaactggagtctgaccgagtagttgttccccagacagcactgggtgtgaggttaatggatccgtctctttctgccttcccacattgtatgagttgtatacattgtatatatcaatacgtttcatcttcctctctgtttctttcttctgtataatccttgtgttctacatgtgtgcgagtatgaatgaatgtaggctgaacatgatgtgtttccgaacgcgcgggcaaaatgagtcttacacgggcaagaaagggaaaactccatctcgcctggagtgaaacaaacatcttgccttgaaccttctcttactctcccctctctcttgttcccaccagcatctctttcagtccttctttcatcagacatctaccctccaactcttcttataccccttccattattcttatccgactatttgtctggggttgttatcaatattgatagatctagatacttgaacgggatctgaagatggcttactcgaacctcaaaagtacgtgtctcgccctttctcttctatcatccgctcttctcgttctcgttctctatcttcttcttccctctcgagctatctatgcttcactagaggacgagctaagaagagctcaaaaaatgtcttattggcttcgtatctagctttgatcaaagctctccgagcggccaaggttcgttttttctttttacccccttcgggttttcacctaatctcttatatatattccaatcccgatcttagttctcacactttctcctaccttcattctctactcccgggatgtattctgctactatagacactagcagatgaacgatcgctcatcgcccaagaatctgctgccatccgaacggccttcaaagaggatgacgcctactccagacatcacaacattgccaaactattgtacattcacatgttgggttacccagctcatttcggtcaaattgagtgtctaaagctagtggccagtccaaggttcacggataagcgactagggtatctaggaacaatgttgttgttggatgagaatcaggaagttttgacgttggtcaccaatagtctgaaaaagtgcgtcccattcagatccttcctttctcttgctcctttgcttcagacttgcttgggatctcccttccatttagctctgactagtttctgttcatttctggactccacgactcctctttcttgctgaatcgggctacgatcataaagcgatatgaatcactcaaacatgtatgccgtcgggcttgccctctccacctttgccaacatctcatcagaggaaatgtcaagggatctttgtaatgaggtggagaagcttcttggaagttccaacacgtacatacggaaaaaggtaaagatagtctctttgtttctcttcaatatatgtgacgtgatttccgagctccttttgatttttcgttggataatttcctttggtttgatcgctctctataaacaggctgctctctgcgctctaagaatcgttcggagagtgcctgacttgattgatcatttcattagcaaggccagaagtctgattcaagacagaaaccatggtgtcttgttgagcggagtgacgcttgtgattgagatgtgtcagtcggacgaggaatgcaaaaatgaattccgaaaggtatgcttcccatctatgattttgacaagctaggtcagataattcatctatttggtcatcccggctttctcatcttcgttctccgtccctggcggacttcaggcggttccgctgttggtaaagcatttgaagtctctgacgaccgttgggtattcgcccgagcatgacgtatccggagtgaccgatccgttcctccaggtcaagatcctcaggctactaaggttacttggaagaggggatgccaaagcgagtgaggatatgaacgatattctagcacaggttcgtaaacatcctcgttcgatatccaggttctccgttttctttccatctaggctcagagcgttcgctaatcgggggctctttcctcggaaatgatgggtgtaggtcgcgaccaacacggacggatcgaagaatgtgggaaatgcgatcctgtatgagactgtattagccgtattggagattgaggcagacagcggtttgagggtcatggcaatcaacatccttggaaagtttttaagcaatcgcgataacaacatccggttcgtctattgttattcataaatatcatcgatgtttttgaagtattgacctaaaccctggaatactcaatgcgcgcttcaggtatgtcgctctcaacacgctcaacaaggtcgtcactatcgacacttcttcggttcagcgacaccggccgatcatcctggactgtctccgagatggtgatatttccattcgacgacgagctcttgaactgtgctacgctctgactaacgaacaaaacgttcgaatcatggttcgcgagcttttggctttcctggaggtggctgatgcagaattcaaactgggaatgacgacggaaattgcgttggctgccgagaggttcgcacctaacaagagatggcatatcgataccgtgcttagggttcttaaactcgtacgttcatcttattcttaactgagagaatctcctgtattctttgatattaggcatcttgtatagttggttgagatgaagagtcttttcttctttggtgcgcggacgtttctaggcgggtaactttgtacgagaagaaatcctatcggcattcattcgattggtctgccataccccggaacttcagacatatacagtccagaagctttatctggctctgctctcggacatttcgcaagagtcactgactttggcatctgtttggctaattggagaatttggagatgtcttgctcaaaggatggagggcggaggaaggcgaagaggtcaagcacgtgtcccagagcgatatcatcgatctcttgaattctgtcctcaactctccatacaccaatacactatcctctcaatttgttctcactgctctcgtcaagctctctgccagattcgcagaggataccccgggttcagatcaaattggacgaatcgcaaggttgttgaatggatacgaccacatccaggatctagagctacagcagagatcagtcgagtatggtagtttgctccaggcgagtgagatcatgcacggcgtattagagagaatgcctccgccagagatcaaagctaccatcatgggtgggactgcaagtgagcgccgatcagttggctcgacacaaaccacaaaagatacgtccacggttctcgacctcctaggcgacgatgtatctgaatcagccgatccatctggtcaaccctcgtcctcccaaccgtccgcttcggttcaaaatactcacgacctcctcgccgacatctttggttccggctcggccgccccggctaacggagcttctactgtttcttcagcccagccggcgtcgactcgttcagcagtagatgacatcatgggtctctttggaaactcttcttctgctacctctaccccctcgacggcatcgacattaccgccgaatgtttccggctctctatttgatactacagcacctgctcccactcctgcacttgcacctgcgccaccaaaaccgacagcaccggctcaaggtcctcagtcgtataccgcgtatgagaagaatgggttgaagattacattgacacctagggcttcgcctactcaacagggtgtcattcagatcctcgctaggtttacagctctggatggggttacaatccagggtgtcaatttccaggctgccgttcctcgagtccgtttatttttcctatactttttattttttctatttagttctcgccttctcctaatttagacaaggattgaagcagtgttttgaaactaatgactgactcataccttcctcatgaaacgtcttgtagacccaacaactgcaaatgcttgcgatgtctaacgcagatgttgctcctggttcgattgagactcaacaaatgcgaatcatggctcccgtcggtgtatgtctcttgctttcgctctctttttcacttctcatcaaccctcgattcgactaattcttctccttttcttttcttgatcggtcgaatggacttgatgagaatagagtcaagtcagacttcggttgaggatttcgttccagagagaaggtcaaccgatacaggatcagactgatttcgcagggttccctgcaaacctgaccagcgggggccaataaggtatccatctcattcctcatctttgcttcttatagctttctcttttcttcgtcatagagagtggacatatctttgcccgttcttccgtctctctattccccttctttcctgtggttctcctcccatctttcacactatctcgtttctttcgaaccattcataaatcaacgatcaaaggagattgtcacgatcacgatcacaatcacgaccaagagaaaagtaacgaacaaacagatatcctccgcgttttgagatgaggaatacatggcgtggacacaagggaatagaaagggaatatggaacgcctgagtttagtcgaaacatttcgtcatgttctgtgacacgacggatgcaacggagcggacggatggaatgaaagagaagggaatatctgcgaaagaaaaaaatagggagcaaaaagccgaaggaggagaaaaggatcgaaggagaagagaaggttggacagataatgaaagtgtgaaagtatgaacggatgaacggatccgcctgaaaaaaaagatttttgacggatggagagaaccatgccaagatttcttagaccaacagagcacgaggatgacctctcccccgtccttcaaacccaacaaaaagcgttatgtatgaagagaagagaaacaaaaagacggcgaaacactctccatcccgacttccgtcggtgagacagtccctcactcagattcaagagtccaccacgtgtaccttctcgagcctgtcttcgagatttctcccagaagcctctctttcgccgactgccgagggttctctacttgacggggtcgatgctgaagcagatgctgtaatactctctctatcccctagatgtatcaaactcgagccagcggtcaatgtggcgagcgaatgggtcgacagaggcggagacagcctgagatccagtggagagataaaggctaatctatgcggggacgagtgtgggtttgaagaagtaggtatgtacgaaggagggagcgcaatcgagttgaacgcctgatggagtgaatgggaggaggacgagagagacaaagggtgtgggctagctgggagagagtgaggcggagaaggcgacgaagacgtagagagaaactgagagaaggaatgattgagaagcagatgtcggtcaagtcttgaacttgaatctaatacgcgcacgcgcactcaagagataaacagataaataaataaacccacctcctcaccgagcgcactctgatcggccatcttgagatcccacaattctctgcctccttccccgagactcaacactgggcttttacttccactgccggtcccgtccggcgaagaacccaaaccaagaccacgcctcagtctatccatccctcctggagaccccgctctagaaggactcctggacggagtgactacaagaacatcttggtttcctacggctgagagagcctcaattgcatcgtcaagaacagtggggaacaactgatcggtggctgatattcggggtgtaggaacatgatgagactgttgctggcgctgatggtgttgctgttgctggtgatgatgatggtgatgatgagggcgtggagagtttggaccgacatgaactaaaggtcctgaagaatcgtcgagctctccggtcgctaaactgacaatctctccacctcttccttcaatatcccgctcaaatatgtcgcttcccttttcttcgtccctactaattccgcctatagagccaaccttggcagtgcctgatgagattgatgccgatcgattgagtggtgaagaagacaaagtgtggtgaccgacagggtgcggagagcttgttcgggagggaagaggtgttgtccgcttgggtgtacggatcttatggggtgaaggtgtggagggcggttcccgagggtcgagcgaaagcgggagatcaatagaggtggacgttgggaaggacatcgtgtatggttgtttctttcaggttaataattagtataactttggctgtcagaaagcatacgataaagtgatgagtgatcttattcaatcgtaaggtctgccggataaatttcccactatatgtcgagcgtcgagagaattaagacaggaaggttaaatacttacgattgaacaggatgcttgccgagctatcaacaagagatgccggatggagcaaataaggaggaaggtaatttatacgacgagccaagtttaactagacaagggcggattgaacggatcacagggaacagaaaaagaatctgatttctctagatgatggaaggtcgacccggaatgagccgatgagatggtgggcaaataaagagaagacagaaaaaaagatgagcgatcagcgaagtgttcacggataaacaagatacacacatgcttacagagtcagtctcagatagattcgttacgtatcctcatgtatctctttcctagagaccgtctaggtgggggtcgctatgatgatagttttggtgatgatgatggtgatgatgatggtgatgatgatggtgatgccgtcggtcagtcgtctctcgtcgtcgctgctgctgccagtgagacctggggcagctcatcacgtggttacaaagacgtaaccatcgactcagcctagctcctacttcaccctaacctagcctagccttgctcattgctattcgatactcacacttgtttgagtgaccttgaccttgaacttgatctgaatgattcattcacattatccatctcatcatcaccttaaccttgatggtgctctctccagtgcgtccttaaagtagacgcgcggttgtgcatctgacacgcgaccgattcgccacatgcttagctaacggatggctgtacataaacacgtgatctacaccggtttagtggcgccacttgcccagcccgattctcaatcgcttggccatctgaaacaaacgaaagagcatacacactcacacatacaatcaagaaaggaagatatggtgagtctgagatcttcatcttgctactcttctgactaccgatatgatgcagaccagcggatacttatatgttggtctgttcttattcttcaggctaacgcgtccagcaaacgcatcacgtcctccaatcaggcagccctaaagaggctcacatatactttcggtctcacacatgttcgtttaagccgttctttctccttcttaatacctacctcgcttgatctctttcttgtctgatttattgtttatgtactcatactcgccttgataccttaatccgacgtcaggctgctcatctaatcctccgttttctccttcgacctcgcccattcttctccggtccatcatacctacttaccctactcttcctcgcgaccggtttcgcctactcgtttctccgaactgtcggaaaaccaaagagggaccgaaacggtgttctcagaggaagtgtggagctcgaggggaatgagggaggcgtggttgaatgggtcttggatttgtttgtccttcacttcttctgcttgtctctttcttctcacttcatcttaagcaatatcatgactttttgactgtttcgtacatccattcaaattgttcggctacagcttctactttgcttgtggacttcaagcattgacacctttgttcggttacaaattctactacctcatcctcgttgtacgccccgctctctttttcatctcattcctttccttgtcttttcttcggaaatcaatcccttcctccgcctgatgaagctttccccgccctcacataaataggttcctgtctttgcgctctacaaagtctacacatttgcctctccccttctgttcggcagatctggttcttctccaactgtcactcaagccagagctggcggagatggcgctgggccaaatggacagaagcaggaagagttgacaaaaacccaggcaaagaaagctaaaaagatggaaaagttggagaggatgcagatgaacaaccgacgctgagagttggtgggtccagcagtttttacaagttcatttgttcatccagttggtcggtcagacaaaacttctcttcatcccattcctcttgatttcaatctgggcaattcgtgtgtagactgtaatttttgggacctaaaaagagattgaaataatttgagatttgtactagagagatacagggaaggaagcacgcgcaggagaaaaagttgtaagagaaaagttgctgtttcccagaagatcagataaaagtgaaaggtcgaaagaggtagaatgtaagggtaaaggagcaaaaaaaaagacctgaaaacctcaggtgaccaaaaacaaagagaaaaaaggaagggatacgaaagacagcagagacagacagatagaagatgaatcaatactcttcaagccatcggtactcgaatctgaaatcggccttctttcgttgcacccatgatgattcccaatcaaagtagatgtacctattgttcatgaggacgactcagctcccgtcagccatcggtcgtgtcattgctttctgccacatcggtgactgagaaggaagaaacgaaaggtattcaacttacatgccctgctcgtaatcttcagtgatcgcctggggttgacttaacctctggaaccaagtcaagtactgcttatggaacctccaggactgtctcttcagttcttgtgctgccaaccactgttcatacgtgttcgcgtggtagtaaaagatgtagaacagggtatcgaggtccatcttggaatatatcgtcttatcctggaacccgacgaatggctcctggggatagtacaacggggtctgataaggattcttgggaacatagtatcgaggcctttttcgcacgaatatgaagtaaagaggtcaacatcgtcatatgtacaaagactgaagccaaggaaagagcactcacttctcggcgtcctgtggatgaggcaaagcatgcaagccagcctcaagagcagagtgcatctgatcgatatttccgtttctcgaggcagatctctgctttgcagtctcgaaactactcacaagatcagccaacgcgttgggtaatctgttctcccctctgcttccagatcccaccggctgctgagcaagtggctgtgtttgaccaggctgctgctgccccaacatcggaggcggtcctactggcccggctccagatcctctttgtacttgagcctggatattcagtggcgaccccatctgaggcgacgttagacctgataagggagatgtgtgaacctgaccgcttgaattcggcgcagattggtcggtagggtacgctgaaggcggttgaagtgtcgaagaggcttgagcgggagtttgggaacttgaaggatactagtttgtttcaggaagagaagaacacaagccacaagtgacacggatgagtacaactctccaaaagagagagaagaaggctcaacaaaaaacgcacactagcagcagtatctgaggtgccaaccgtctgagcctgtctggcggactgatctccacctcctgacttttcttctcctgaccactctattgtagattggttgatactctgtgggctcaaaactgttgacatacccagggaggggctaggagctgacactgatgatgcaggcgccgaagttggtgcggatgattgcgcttgaattgaagcagagggtgtgacagcagcagcgggtgcggatgcatttgtcggcgtggatacggacggagcagcagtcggcgcaaaagtagaagaattggtcgtaggaggatgagcaggcgtagcagaggttaacaccggacttggcaacgttgcattggccggaactgattttgtcactgtaggagattcaactgatgatggagaggcgacagcagctgcagcagctgccgcatatcggatcgcaggaagaggaacagcattcgtagccggtcgaggaccagtgaaagaaggcgcagcggtggtagaggttggttgagttgatgacgtaggcggcgaaggtgtcactggtagacctgtcttgagagcggaggacatgggctgtttggcgaaattcggcgaaggtatcggaggtacggctgtaggataagagcaaaagtcactcgtaagcgtacagttggcgggtgttatttatttttcatctatcagagtatctcttacgctcggcgggcttcgaatctagtgttggttctgataagcgattggaaaagcaaaatcaaatgttagcagacatgtagaaaattagaacaagacagatccagatatgccatcttgtaagatatttacggcactcactttttgaaggtgttttctttggtgttggtatcgtatgctcatcttgagaatgcttcctatctttcgtcactccactcgacatacttgaatcgtcgtcctggtgatgcggtttgggcttcgaacttcgtaccggctctgatggatattatgacaagaagaagagatgcaatttgttatgtgtgaggaaagacgaggaaaactcacaaacaacattgaagccaagactgagacaaaccttctatcggctccgactcatgcgaagaaaccaagtcgtccccagctccatacatatcatcgtcttccgtaagttcaagctcatcgtagatgccctcgtcctcttcaaagtcctcttcctgtgaaaagtacgcgggtaagtctaccgagctcatccaaacatatgcactcaggaagaatacgagaacttacctgattagattctacgaaatacttgatgtcctcctgagtagcatccaccttgtcgacggtaattcccccattgtccaacatcctctgaactagttccattcggcctacatgccactttcttcgctcgttgagatgttcaagttcacccactcgctcaccacccgaacctttcttttttcggccctgagaggcagcaagaatctcaatttctgcttcagactgctcaatttgcctggctaactcgtcaatcatggacgaaagccagttgatagtgtccatcttggccttctcagccgggtcaagcttggctgcttggatgagaccctctttagaaaacgctttcgttttcatctccttctcaagcgctttgaagcgttccatttgctaattggaattcaatggcaatggtacgagagaacaaggtagagggtcagcacagtttgggtagagagtgagtcatggaattttattgaagaaatgatcaagagagggtaacaacagagattctgatggtagttttcaaccctgttgtttcaccatcttccggctttgtctcatccgtagagcatttatatcccagaaggctctctgacctactcaagagatgcgaatagaggaagaagttaaccacttgagactaaccgtttctatgagctttctcgtttctgttaatgaattcttgtccttgatctccgaactcgagatccacgtcttgatctggtctcgtagtcgctgaagtttcttgatctgagttttgagatcggtctcacacttctccttctgagtcgcgtttgtcgaggcgttcatcttttcaaatatggactcaaagagctcaacgccctcggtcacttttttgagtgtccggtcgatctcggctgaaataagagacaaccaatgtcattcgccagaagaagaggagaaagaaagaaggacacccaaacaggtaaggtttcagaaaaatccacccagacagatagctcaaatggtctttgatctctagtgatcgaccttgaatttggattgaaaatacaagagatgaggcacatacactgtagcttcctttgagccatgataaaaaagagaaaaggctttgaatgaaaagcaggttcaggtcgataggatggagcggaggaagaaagggtgggttggtgtcggtggacgaaagccgggtctaagaaaggacgaaacatgtaaccacccagtcaatgtgcactgtagatgatagctgcctggttacaacatcggaatctttggctcagagatagttacgttcgaatgtcactgtcatcagcgatcaggaagactatgttggaagctatcttgtcatatacagctagaaagagcgcgctacgtattcttcccctcatatttaatactaagcctggaggtctttcgttctcgtcagtccaacattttgaacatcaaacgtctgagcactactggcactgcacgggatgccagttgaatattcggctggtttttggctgacgctagcagcataatgtgacatacccagacgcacaattcattccaatacgtttgtagtgaaacacagtctccttcaatcagattcctgtttgttgcatactgtatcccctcttaatgaccatcaccatgactgaagaggcatatgaacatttaaaaacagctgatcagtcagctgtcagcccatatcgcctcaatctgaagaattttatctaagcatcacgactttcacgatagacaacctctttacatgtacattttgatattcgcgtgcgcattctgaaccgtctacgctgatttattattcgaagaacaaacaaagaaagccctgatcgatctatagctcctcttcctgaagtcatgcatgtgcatcactacgttgtcttaatgagaagcattcctcctaataagtcctatctagtgcgttctctatgtgtgcaataaaaagccggcggtcaatcagctgcattctgtctttcatcacaagttggttatcggggctgttctgctgttagtggttttgaaagatttctaattggatacagtgatagtactcgtcagagaagagaacaacacgtatggaaaaagatatgatccaaagacgtgtagaggactgtaaagaggactttatagacaacagcgaaacattacgcgcctgacaaggtttggaaactcttaagttcacctgttccactcaaaactccactacgtggtatgaacacagatatctaccgcttcgcaaagatcaacacataaagaatagagtatgcagagagaaaggtttcactgtatcgaaacaagagataagaaatagataacacaggtatcacgaactacaacgagccgaaagcgtaccaagatgatagaaactggactgtcaaaccaagttttaataaaacaaaatatagacagattcaacatggaaaagaacaaagacaccctcatcgaagacttattccatggcgcgagcgccccaagcgacatcccgcctgggtcctttcctctttctcgtctctttgtggtcgaccgtctccttctcttttccgcccttgattctcaagtagctcgccctaagcttcccctctgatcggcgagaccttatcggaccctctgaaagaggctcatcaactgtcaagaatgctaaagctacgccggctgctgctcgaccaggcgagggcgagggagcactcgctcgaatctttctgtgaacgtctactggtccattctgacagggataatagtctagattggaatctttgccgaccatggaaatcagtggaagagaacgatcggtatctatccagggttgagaagttggatgagctacatgctgaacgttttcttgttcttcaaaagtatccaagagaagtctagcaggagtgctcgtcatgggaggcgccttcttattgatcgtggcttgagatctgggaggccgaggtggtgactgagatgaaagcttgggttcggcagaaaggaaagggtattcgaacacagagttcggagagcggatatgatcgttcgattgaacagatgaacaacctgttgatagcgctggagttggcggttcgtctgaaaacagtggagttattggtccggagagggatgtggttgagataccaggagcgggctcgcaggaaactggcatgatgatattgctgatgtctagagaagaacatgacgatgacgatgatttatgattttcgacgaagggctcgcctatagatataatcaaaagcatacatcagattgaggtagttttaacagtttatcatcaaaatgtgactcaccgagttcgaccgatgatcgggcagaatctcctttcgagaggggttcatcttcgtcgcatatctctgtgtttatactggatgcgccaggtgcttgacccctcaaggcagtaaatgattcatggccttgcttcaaatttgtgacatcgatcgagcttcggagcggttgatagataacatcatccactgtttgagattcttcaaagaaacggtatgactgatcccatgtggcgcacagagcggccagttcttgatcataatatgatcctcgatgggatttaacaacttgtggaggagacgaagtcgacggattcggtgacgagaaggttcgatcgaaggtcaatggacttgagctctgggttaggacatgcgcggatcgcaagtatggacctatcaaagattcagaaatgaacaacaatggtattcttgtaagcattcaggcacagctttcgacatgaagaagaagaagggacgcggtttcgcaagatgataagaactacgaatgaatggacactcaccggtcgacacaagtctagcttgctgctctctagactcgcgctccctttggttcttcccaacgatcctctctaacgaagatctgattgcctgcgtaaagtctaaattatccaaaggaagcttgattgtcgtcgtcgccatcgtcgtaacagagatgtcggcaaatctaactctaggcatagacgaagacctctcatcctcctcctcatccgatgaaccaaaaaatagggaggcagaagcagaagcagaattaacggtcaatttgttccttgggcctttgttgaatgataaatgtcggctgccagagaagacagaggaggttttagttggattggaagaagaaaaatcggctgaagagtttcgacgttttcgatcccttaatttgacttcctggccacctctcacctcggccatggaagacattgaaatcatcttggtcaattcgttttgaggtgtcagagctgagaagaaattgccaatgaccgatcgtcgatgggtcaactgctttggtttttgtgatacccgctcaaacaaggagcttgatttgggtcgaagtattgccaagggatctgaagaagacccgctgaatggccgagaaggctcagcagaggagaaaataacggatgggtggccgagagtagatcggaagggcattatttgtacgattgtggagtatcaacttttcagagaacagaaggt

SEQ ID NO: 2009 - DNA, 22691 bp, Xanthophyllomyces dendrorhous
gaaaacgacagaatgaactgtgatcgactgccttcaaatcgtcagcagcagcagcagcaacaacaacaacaggaagaacaacaataacaacaactcctcttcaactaagtcaggggttagttttttgaggaacaagacaggcacggataaagataaaacagagccattccactgaagtcttcattgaaagactgtagcgaaaagcgttctaaatcagcatgtgttagtgagaaatatcaggatgattgctcaacaagagctgaatgaaaatatcgactagatggttaaggaatgtgaaggatgcaggaaagattgagtgtcgcaaaagaaaaaatctgaccgtagggtgaattgaacacccgtcgtccgcgactttgcgtttcatttgaataaccacaagcggaagtactgaccactatactatacgatcttaacggtttgaatcagtcaataataaattaattttcaacatgtacgcacatattgaagatatttaccgaagtcagaggatatcaagtggatttttcgttctggcactcgttcctagtcatatcctcactgctttcccacagccatatacacaccacccaggtatttcagtaaaataaattgagaaaccagggaatccgctaggaaccttatagctcttcgggaagagagtcttgggactccgcgcaatctgaatttggaggatgatgcctcatgaagaggtaacaaagtacagctgaaataatgtcaaggctgctgaacttccaacgaacactgttgagaatgaccgcaagaccgttggctggctcgatcactctgatgatcatgttttatacctgacacagggcgttcagatgaacaccgctgagattcgttgcacgtaactcgatcaagcatatcttctctgtctctttgtcactttgtctttgtcactttgtctgtctctatgtctccctaaaccttcatctctttgtctcttcgatacttgctgtcagatttggtggaataaagatgtgaacgcatcgcgcaacatgctgcacctagccctgcaccaggagaagaacgaaggggcaagaatgccgggctttgacgctgtttctagtgaggctgatgttgaggctgacacaaactgaacccataacccatggggaccttggtggtttatggcctaaggacacccaagtccaaagggaccatgtatcgaccaccatcggctgaggtaactctcaccatgctttttgcgtataggaacaattagaagaaaaagagaagaaagacaacagatccgatcgagagcgttgcaagaacatggcgtgatttgtgcaagatcatcagaagagatcaaggaagaagaaaagagttataagaagatgagacattaaaaactctattagaggaaacgagaagtaaaagaaaggaaagcccagacaagtgcgccagagacgatgggaagtgtcaggttatcgtctaatccagccggtagatcttgaatggcaaaagcaagacaatggatccgggttaatatatccccagccaaaagaggaagagctcacaaggaaggaggaaaatgtatacgaggactcacctaaagcctccacataagcggccacacagcccacaaagcttcctgtgaacgcaacccctcttctccattccaacactctccaatcgacctgaccacctcgactgcctccacccccgggtccaccaccgtagtaaccaacggcgactataagaccagtcatccaggcggcgacgaaaccggcaagggacttgttgggcgagagaggaatgagaccgaaacacactcgggcaggtaatcgagggttgtattttgattttgaaagcagtcggccgatagtcgatgcggcggtatcagcccaggagaggctgaagataaggtgacatagagttgcaatgcagggttagttgaacaaatcaacaagctagagagacagtcatcagataggcgcacataaggatagataaaaccgcaacatctcttgggtagagtgtcaggacaaagatgacgccgacaaggtaccaaatgacacctgttggtcgcgtggagggaaaaaagcaggaaaagcaagaaaatcagatcagattcgagatcacgtccaagcacgatacacaaagagagcatatcactgtcgagaaacctaccattccacttgtgctgaatgagaaggtagagaaaagaagaagaaaacaaccgttaggatgttcaaaacacaatcaactcagtcacaaatcatgactagacgaaacaacatatcttaccctttccgaatcgcgcatgagagggccaaggtatgcttcataagtcctttaaagcaagaaaaaaatgagtaatttatgaatcagcaaagatgatatgatagtagaagtaggcggaaacagaattaaaaccgaggctaactttgcgaatactggcgatttgaaccgtatgacatcagcaccggtgacgatgacaagtccggccgataacgataatatcaacggcgttaaagttggtgggtcgatggcattgaggatcaatgtgacaacacctgagaggaaatgaatcagaagtgattggttttgaagagaatggtcagcttaaaggtaggaacgaggacgatcaaggacaaaggcggccagtgcgttgggctcaatggacggcgaggatacacgaacgcgacctgtgaaggaagagaagaacaacacgaacctatggaagaatgcaatagctttctcggaacttcgtaagtcgcccaaaacgatctcggcttgatcacattgacagcgctcgacttgagctggtccttgatagagtcttcctcgctcaagactggatgatgaccgttcgttgttgtttgaagaggcgagccatttccggatccagaattagtaccgttcgctaaacgagctgaccgacgaggggttgccatagtttgagagagaacaaaacgagttgaagaatcttatcaaagatacagtatattcttgatcaaaagagagtcaaggagaaagaaagaagaagcgagggactaatataagaaaaaaagaagtaagtctttccctgcccatgggacgattactggagagcgaaaagagaggggcgccgagggggaggggaccctgtgcgtacagccagaagctacaacacgtgcgtacaaggtggttacagctgtcgctttggttacgcctttctttttcttcaattccttgattctttccatcagcaacggcatcagaagaagcagaaagagcatccagagtatacacacacgctctgtctctttcttccagcagctcttgtactcaagttcgttttggtaacatcatccaaaggatggattctccttctcgtcggtcagcccgttcggatagtcggtcttcaagaagaacgacaaactcgccttatgcaaggtccgctgtgactcgttcgatgccgaccgcccccgtatgtcttcttgaatctgaaacgttaaggctttggcagaacatctagcttctgttgctctcctgttccgttccgttacttacttcgacgtctatcctttatttctatccataacatacctctcatggcccgctctactcattgcgttccatccaggcggccatccctcggacgtcttccatccggtcactcttcaacctgatctcgtctccgtttcgatctcctgatcctattgctcccactcctggcactcaggatgatggacctcactcggatgagaacggatcggaaaatggaagtctagaaggttctgacgggtttatgagcggagaagatgaagagggagacaaattgaacagagagcaggaccgtcgtgactacgaacaacaagtcagttcaccttttctttacctctcacctgcgctttgcttgcccttcttgagtttgcatcgtccttcgaaaacttccacaaaattaaacatgcaaaaatctcgtttctatctctcagatcccgtcctctcagacagtcagcaacttccgactgcccccgcctcccttgtcctccaaagagtggccaacagacgcttccgattctcgattcctttctgcccatgcccctcttccgaaacaaccttctatatttcaaactcaaccaacatactctccatcctcatcgtcatcccttgcatcttcacagactgacttccaatcttttatgagtcgatcgcaaacaatgccctctctcaatggctccccctcttcagtcgtaggagtacttggttccggcccgacctccaggtcacagaccattctgcaaaaggcagtgaaagatatgggcgagggcagggatggactttcttccgaagagcttgaagaatgtcggatgattctaagtcataacaggaatttgacaaccaaccatcaacccgccggtaagttgacgagtcagtgcttcgacattcttcgaaataattacgtatcaatgctgatcttttcgtttttctcaattttgatcatgttcttacttcttaaacgatgttcatagctactaaacaccaaccgttctctgcggctagccccctcttccacccaggatcttctattgtgccaactcaaaacgggactcccacccgatcaacctcctccggtctgacccgatcgacctccaacctttccttcttgtctccgtctcgattacgcccctcaaatataacttcttcattcacatcttctcctggtatcaacctctcttcatctactcgctcatctaccggcactcctcgtagacgccctatctatcttggtccaggctcgggggcaactcctaggcgacgacctgatattggccgttctttcttggacctcgagtcaaaccaagacacgaagttggcaatggacagcccggggaagagaaggcggttggataatacgacagagagcgcggatgaagaggctgaaaggaaggaggaggactggatcgtcgagagggcgttgagtggcttaggcgctgccgcttcgccaagatcttcgtccaaggttgtttcgaatgtagattcatctaccccttcttcccctttcacgttcactgtcccattcgagtcttctgttccttctactggtgtgccatccttctcgctctcaacacctcagagctcacccttaaagctcactccacctacaagcttgggccagaaccagtccatcagaactcgaacgtcgcttgcactctccacaaagtacaaaaacccctcgctggtagcgccctctccgctaaggcaaagtacaagatttgcggactccccggagggtaagaaagcggctgtagatgcaggagcgagcccaaaggtgctttcaaaaacttcaaagatgatgatggatctgattagggaagaaaacgtcaagttcgataatgtaggttccttctcccgatttctcagtatgatgtttcacagctgctaagattttcgaaacacttcacatagccttcctcccttaaatccacggttgaggttgtgtcaactccgtccactccttcggcatctcatcgacagattaatgccactcgatctgcttcctcgctcgcttctgtatcacccgcagatatcgataatgcgctcccttctcctgtcgtcagtgtcgctgcatccactatatacaacccatatcaatcttctgggattgttgcttctagtccaagaaggaatcctaggcgaagtatcgcggccacttctcggagtcgagccagtatgaactcgcccgctcgatcaaccttacgtggtattcaaacccaggatcaggtccaggctgagaaactcgaagaaaccaatgtagaatctacgcctacatccaagagacagcgaaacgaattgtttggtggaaagaacgctgggtcaaaaaggaaggtcgatgaagacgagacgaaagagggagataatggagagcacgacgacgacgacgtgctcgtgcttgatgatttgcgtactataaacaagccgctgacttcgatgtctagtccatccataccgaacccttcgtggacgaccgttccctccaaggtgttattcgcaggcgatatgtctatatccggtgaaaaatcgaagcaatctgacgtccagatggatgttgatgcctcacctactagggaaacattgaacgtgctgaaaaatttggagtcaccagcactgaggtcatccaagtcaagtccttcaaatcttgccagttcgatctcatcggccgtcaagcaaagatccataccagaaagtcttacttcttttggcaagactggctctttcggacattcctctggatcgtctgttaaagttgtatccacaactgcaccaaaagcttcgtctccttcgatcatgaatggcacccgaagtaaggatccgcgaacgatcgcactcgacactccttcgtttgtccttccgattttcaacttccgattcgccgcccgactttctccattacctaggacggcagaggagagtaaagcgttggtgaatgcttcaaaggtcgaagctgatcgactaccaaagattgaccttttgagcaacaagaccaagaagaccaaagtcgccttatcgtcctcttccgctacaggaggaggctttaattgggcagcagcaggcttaaaaccaacgacgacgacgaccgataaatggatctgtcctacttgttcgatctccaacactttgagcgcttccaaatgtgtagcatgtgaagaacctcaacctggacccaaagcccctacacccatcgctagcacctctagctttgatcctgtctcaggcacgaagacagaagcaggggtaggaggaggagggttcaactgggcggcagcaggaatgaagcgcgtcactccatcgaccgacaaatgggcttgcccaacatgcggtattctcaatggccttactgatttcaaatgtctagcctgtgaggaacccaggtctgcctctgtttccacctctatacctacagcggacgttcagctggcggcggctgcagcgaagccggctacgggtggtttcaactgggcagcggcgggtatgaaagccccggagaagaagaaaggttgggaatgcggggtgtgcatggttcaaaatggagaagctgattcggcttgtgtgagctgtgaaactaagaggggttgaccgagcaggagtttctttcgtttctttcgtttctttcgtttctttcgtttctatcctttgatttcctatatgaagcgttggttgtctcgttgtctatgggatattgaaaatcatacttcaagggtcttttgtgaaaagaaggaaagtaggatctcttccctaagagttggaagagagatatgaaggaaagaaatctagatttcaagtgttcatcgatcacgacaaagacactgagaaagaagaagagacagaaaccgagatcgtatatgagagacagggaaaaaaatgagcgaggagaccaagaaatgagttgtgtttagggttaagatttgaacaatctgtggatgagtttatgattgatagggctgcgagtaatcggaagaaaaacgacaagaaaaaacgatatgggtgtgacagcattgggacctgatcagagtttcacccggttgtctcaaccaagacaacagagaggaacaaaacaagaacgtagaaggggaggtatgtcatatccggccaagcctcaatcagagctttccattttgccaatcatccaaaaacgcagagagtcgatccttgacagatccaaagtcatctaaagccggtcggatgtcgaggttgaagttgggggatccatccggatcgtcgggagcagagtagtaatcgataatgtatcggtgctcggtggaagtggctggccgtctgatgatccagtcatgtctgtcgaacggaggctccgtgctagagagttaagacaaagcggatgtcagttatcgagactgatgacgaaagactaggactacgaaactaacttgtaagagtcggggaagaaataccctaaagtaaggtatagttgagctttcgggcttaacgtccccggtcttcctttaaactttgtgagttccacctctgggtactcatcctctggcatacccaacctacggccttcccaccgaaggacctctctccaggcgagctcattcagaacgttgtgaacaaacaccatactctcgatatcttcttctggtgcttcctgaccctttcgaaggagcgcgttgtagaactgctgagcagaagggtaaacccatcgtttggaagccggatcaatcgtggggtcttcgtcagaagtgagcgttcgaggaatagttgaaatttctcgatcggtcgagagttcaatctgttgagaatcagaaagccgagactgagaaagctcgggcatctggttcaatggattcaagtcggccaagatgtcagtcggaggggtatataccaagcgagacgaggtggaagaagtggtggtggaagacatagaggaatggtcgatcggacaggcagcagcccctttaggcgcagaagaagtagaggtgattgtagaaactggagccgaagaccctttgagcttggatggatcgtgcatcgggcaacccgcaggaggctctcctgacattgggtgggcagccggacgtggtggagaaggagcaggtacgggcgtgggggcactcggagcgaaagccggattggcgtgcatcggacatccaggcggaggcgccttcatagacccatctgaggttacggcaggtgagatcggaaggaagtgtgaaggaggaagagaaactggatgagaagatgactggcccattgtgaatgagtgtgcagctgggtgtagggatgtgtgtgtgtgtaggtgaaggtcggtggatgagtgagtttttatgtctgttcgtagtaaaagacaagttgggtaagcacagaacccaaaaagatttgacaattaaaccacatgcacaaacaagacacaccgaccaaacagcaaaaggcttaacacaatcaaacaggatgattgtcaagaagcaaagatgaggtgagcaaaacgttgagagctgcagactttgattgagcggcaaccggaccaatcggataaaaagcaaaatgtcgagcgaacgcgccgtcatccgttggtggcgtgtatacaagctgtgtatcacgtgaacagcctggctatacaacctgtgattctgttcttattcggcaacctcattctccttctacagctgatacaccagcttgacaacttgcagtagccatcaacagcgctcgtcttgatgccatatagaagtttcataccagcatgctcttatcaatattgatgcttatcctcatgcccgcatcgcgagttgtgtttatcgtacgggtcgtaaagcctatgattacctaattctcttcgctgacataatcgtttcctatccaaccttatcctgcctacgtggttgcttggttggtgtttgataaattgtcggaatatcaagagtcaatgtggagattgaccactaacttaaacaatcatctccattcccgtcgcatccttcctagaactttcggtactatgtctgcaattcccaatgccgcaaccgccaacggaggacctaaagccaagcctactcccgctccgaaggtaccatatcaactgactcctgaacagatcgcccggcaagaagctagaaagaagcttaaagcacgaaaagcagcagagaaaaaggatgaaccactccgatcaaaggagcagatcgaaaaaggaaaatttctcttgaggacctgggtcgatcttcagcagggatctcaagatcgtcaacctgatgatgctgtcagagtgatgagttggaacgtacgtccgatcatatgggatctaaagaaaatgcctttgagcgaacaacaacgtctgatgatatgcttcttttgcttctcagatcctcgctcaaacactgattcgtaggtgactcttcgcttaaagttgataagaatgtttgttactgtgagcaaactcactgaaatccttgcgcgtgcctcatcgaacacaggccgagatctcttccctggatctggtgagtcctatcacattctctatgatatgcgtttaacatccttactctgaaaacaatggctgatctgactatcaacgcattcttcacaaagactgcttgaaatggaccgaccgagaacaaatgcttatctctgaacttgacgcatacgctgctgatattatctgtcttcaggtagggcccattgccttatcggtttgaagttcagccgttcatttgtgctaactgatttgatctgtcgttcttcactcgcctcatttaggaagttgaccggctagagtctcttatacctcatattcccacccacaaggttactaaagccaagggccatcggaagcggcatggacttgtgatcctccaccgagatgcactgttcgagaagctggcagagaaaaccatctatttagacgagttagagcccagagattcggcaacagaagcggaagcagaaggaaaacctccagcttggaagcgagggggaactagagagaccaaaaacatcggccttttggcctgtttgaagaggaaaaatggaaaaggcggtgttgtacgtcgcttcatctcattgttctgtataccctacatattcttacattgatcactgacctgtcttttctctctctttcagattgtttgcactacccatacattctgtaaggaagttattctacatcggccaactgctttctttctcttttgacaaatctggcaactttcatcttctcaaaatagggcatccgatgtatttatatgaacgaaccaggcagctgggtctcctcctccgggagaccgcccggttccggaaagcgggcgggtgggaagactggccttgtatcatggctggaggtaaacattgtcgtcattcatagctcaagagtccatgtcacttacctcaattcttcatgcgcaccctctcttcgtctcagatttcaacacacagccatttgagccttcgtacactctcctccgaaaccccacttctcccttatctcctacacaaatagccgacattcaaaattcttcggtcatacactcctcagttatcaatgttcgttcgcctatccagttagacaattcttcctctggaacaccagagtttgtatcgccaaattccaaaccaagtgacttatcagacgatgaagagggagatagagagggcgaggccgagaccgaacaaggcggtagtagagacgcaggactcatgaagggctgtcgacgagcaaccgaacaagatggattattatccatcgacgaacttcgagcactctttgcacagtctggcatcgagccgggttgtctactcagtttgtatgactcttgttctggaattgagcgtgcagacggaaaggatccattagagggtagatcgttggaaagccgacggtcagagactgagcagaacgagaagaaagaaatcttgggtagcggtgaaccgaattacacctcctacacgccgtgagtactaaagcatatcatactgtgttgacccttctttagatacaaagaaacaactttaactgactagaaggcttcttcgctatgactgtgtaattgtttgtgggatctgaactgataggctatggcatcttaccttaggtagagttccccttgtttcatctttccttctgctctctatttataatacaccaacttacccgattcatccctttctttttcttttctggaaacagattacatattcctccttccaccagcgacaagaccggattctccaccaaaagtaattcgatatctccttccacatcaagtctcggatttggagccagggttacctcgaaagggaatctccgcctcagatcatgttatagtcgctggagatatcctcttgcacgaatagaacggaccgtccgcgtcttgcgaaatagaatggaacaattttgggatggtaatgagtatttctctcatggtcgaaaagggccaagagtcggatagaacgtagagattgaagactgttttcgttcgtatatattgcatgtgtgtgaccgattccttgactgagagaacatctgcaaagaacttgaagtcctggaatgaattcatacagatgaacgaatgcaaagggggagaaacaatgataatagattaaaaaagcgaagaaactatgaggagacaggaagacgaaaacttatggcgaagaaaaacgaaaggttgaaaagaaacaacagatcgaacgaaacggattccagagagacccatctccgataaaacaagacaagaaaataataaaatagtaagacaacgctttatgcgctttgaatcctccggcctgttcgttgtttaattagtcaagattcctccaccactgccacctccagacaagaaccctctaagtccaaggacgtgtctcacatcacttgtgaaccgaagactatccaatacgggcaacaggtcgagtaaagcctggtcgttcggatcagagaaccaaccgtctatcggtatcccgttggctgtaatggatgaggagtccagagagcaagactagagtaagtcagaagattctcgaccggagagttttggaagaaaaagcagggacaaagagtaaaaagactaccgtacattgatggaaagcatatgacactggcgaattgtcaatcaaggcgaccccacctagatcttcttctaggcaggcaagatctttgacgtacgctccgttctgatgttgaacgcacgactgaccgaagatgagcaagacggaggaaagacgatatcatcatcgtatgattagtctctggaaacactgaaatggagaatgagttcaacgctatacatacctctcgataaagtcgtttggcaaacatatttcgaccgccatcaagccagtcgatcaccgggtcggcatattcctgcatagaagccgtgaagataacgagtgtgtaccacgaagagacctgtcgaacaaaagattttgattttgttagatcaagcttgaccgtattgatggtatgagcgcgaatggactgagaatttacaaaatgcataacataccttcttcaaaaagtaatccacatagggccgtttgtacacatggtaaactgtgcttcttccgcccaaaaagacctcaaccatgtgtccttcgcctcttcctctgccacctccccacttgccagaagtagaaacgatcggtctcgaggttgaatgaataagggtctcgtctaaatcgaggatgagcgtctttggtttgtggaatggtgtcttcttgatccggactggcggaggggtgatatcgaacgtgttgatacctgcaccagaaccaatctctatagtcgtagagctcgatagcgttgaaacaacggaagaaggaggcgcaaggaggagactagattgttggccaaggcccgacgcgagcgagctattagagatagacgatgcagtgagaagtgaggatccaccataaggattcatcaacaggcgtgatttctgaggtcggtcaagtttcgaatttgaggaaagatcatctgatacgggtgaggattctgtgattgatatagatgctgatgagtgtgtggacgatgctggcgtctgtttggaaggtgttgaaggggtgggtagcgatggcgttgtcagtgtagatgaatgcgatgtggatgtggataatgtattggggtcaatggcctgtgtacgaggatctatgaatgacaacgacaggtcggccggattttccaccgaaagaggaggcactcccaacgagttctcgctcattcctgaactctttccttttcccttctctcttcttcgcaaaggagttgattgactgctgccgatgattcgacaccatatcaacagaccgagcacccatgaccaaagcttcagcacaattcgaaagaacccccaacgtctcggtcgaacggcccgttttttccgagaattcgattcatccctagcgagagtctgttggggagagacagatgaggccgatgaggataacgaagagccagatggggatgccaacgttggtcgacgtcgaattgaacttgagcggcgggcccaaaggtcggtctcggaagacaacaacggcgatgaagaaggaaccggtgaggaagacggtgaggccgtagagccgaccgagatggatgccgacctggaccgagctgcaagaggggacgaaggcggatgatggggtaggacgggaggcggtctgaatgtccgagagagaaacctatcgattgaggctagtgaattcatctgtgctactcttcaggcaggctagacggaagcaggaagtggaagatgtcgaggaaacaagctagaacggaatgcgggaacgtgtgttgatgggggcagggaaaagaaagcagccggtgattgccgacctggagtcccgactacttttgtcaggtcttcgttttaactctgcagactacaaacgagcggatgaaggctgataccaacaaccagtcaaaattctatacgagcagccgagtagagaagcgaagatgatagcaacccggagtggaaaggaaaggtgatgatggccaatgatggtagcggaaaggtttgtgttctgatctctcaagcactggggtgagagtaaccccagccgggtccgccggcggttagtcacccgtatttcttagccggtcgttctttaacatccttgttcactttgtcaatatgttgtatgattacagcctcgtcagtgtgccgagaagcttatgaatatatatatgtgtttaaaaggaaaacatgtcgattgcgtccgatagcagttttatgcgtctactccttcttggcattccgctttccagcggccgcactacttctcactcgactcttctttgccttgaactctggcttcccgcccttcttcttgccgaacgatccaatcttgacactctccctcttgctcgacggcgccgcaccacctgctccgtgctccatagcgactctgttcttcttcttggcgagtcgtcgggcaagtcggtcggcatcctccgatttggcggcctttcgatcctccttcgagagatccttcagcttctcacccaacaacgggttgccctttggcaccggctgtatcgttgggtaaggcgttcgggccggtttcgacacggcggtgctgtttccgatggtaggagtggtggaagcggtcgaggtgcttgccgtaggcttcttggaaggaagggttttgcatcgctcagctcgaagcgttcgtttgctgaactgaagatgctttttgtcaagcgagaggacaacgtcgacggagtgtcggtccttggaaagaaaagagcgaacgttcaagaaagaaagatgatcagtttatgtctggaaggaagagtatcggtcacatacattcacactcaatcaaaacaacagatacgaagaaatatactcactcggaaggatacgtaggcaaaacctttgcctaatccagtagccgcgtctctgatgatccttacacctccaacccacctttcatcctcaagtactgcgcctccttccgttccattctcgattccctcagtgacgacccctcgctcctccctcatgaccgcttcaaaaaatgcccggagatcttcctctttagcagccaactcaagattaccgacgaatacactcttcttgggatccgagccggccacccagagggcggatgtagctcgtgcagtcgaagcggtcgaggcggatgctcggatcgaatcaactcggatggttcgttcgaggaaaacggtgccattacaggtttgaactgcctgagtggccgcttcgtatgggttcaaaataggcgcaacattggctgatcggtccggagcggggtgttcgaacacgatgtaggcattgatgtgatcgacttcgggatggaactgttatgaaaatatccagatgatacaacataaatatcagaaccgtgtcgagcagcacgaaaatctcgtgaaaatattggatcaacgatacaacgtacatcttttttgatgaaagcaatcttcttcttctccttaggatcctgataaaccttgccagcatcggcctccttctcctcgtctttcttgccaccttccttctcctcagcttccttctctctccaggtcttggttcgttccttctgtcgtctggctctggtaatctcctcagcttcatccttagcaggcaactcttcagtcggagcagcaaatgcggctgaacggaaccgggtagagtcgatcttggcattcggaactcgagagaggatgtgctgatggagttgatgaaggtatgactagtaacgggtagatcgaggcaaagactcaatatacaagaaacacgcacaacagatacgaaaaaaaggaaagaaccaagaaactcaccttgttcttagctacctcgataggcaagtttccaacaaaaattgttcttgaatccttctgttcagccgtttcgtccgccggaacgtacttggtcttgtttcgtcctcgatccctctttggcttcttctccctcagagactcatggatcaaatcttcctcctcctcttcttcctgctcttcctcttgcaaatcagttttctctgaaagatcagcctcgatacccttgatctcagtagattctactttagaaacagagtcttcaaccttgaatttcttgcgctcgtaagcgccctcaaccctatcgatatcagcctcctcctcttcttcatccgagtctacttcaacaaccgcaactttcttttccgagacctttttcgatgaaccggaattaacaggagcagtagaagaaggatcttgacgctttcgcttggctggttgagaggtagccggagcgtccgtagaggattccgatgttatgggctgaacaggcttgggagtgcgcttagctttgggagctgaagccggagctttcgaaagcttttcaaaacaaacatttttagaagactccattaagatcatgtgcttctgacaggctttcaacagcgtaaaccatgcccagcaaactcactgtagacttgaagagagaatccagctcgggatcagcaatatcgaccttgggatcggcttcctcctttgtggaggaggcctttttaactttcttctccttcttcttgatgtccttcttaggctttgagccttcaggttgagatgactttgtggggtctacagaactagacattgcgtcaatgagcaagcaggatgatgatgatgattgtatgaatgttactcgaaggtagagcggagaggcaagcgaagaagtttatctgggttaaaaggttgaaattcgacgcagcagatcacgtgattatctagcggtgctacacagaagctacaaccgaacgtaatacccttgagagttttttcgtaatcaaaacgccacaactcctaatgcttttccgacccccttagacccgtacgggcccctcccgagtttatacccaacgacgtccatcacaaaactcatcactagctagagcattggcaccatctggctcgccatctgttcatcaacaccctggttaagatggcatacaggcaacagaacacaacatacactaagccggcccaaaataagactctcagtctggacgagtgggagtcaaatgctcctcttgggcagacagaactcggttcggtgagctcagtcagaatctcgtgcgcccagagacgactgccgaccagcctcgtaaggattgtttcaattgcatcattcttctcttatcaggcgatgatggtgtttgatggcaaagatgatgataatgagaagctactatcttacaccggtttttcaatctcttcatagaacattgccggcaatgttcattcagtctctcgtccgtctactcctcttgccggaggtgggcccaacaggtcaaagcccgtacacccgtctcttcttcacgccgtgctctcaccttcttctcttcgatcccttccttctactcgacctggtactccgcctccaggtcatccgtctcaaagtggatactccacaccgccagctctccatatatcaaccgctcagcaattctatgactggttctccaaattgactgcctcactcgaacacgagcaggacgcgctgtacagagaccatctcgccgagattgcagtctatagagaggcttgtgaagtgttgatcgaggaatgcactgatgccgaacgggtttgtgcagagatggaagagtgctttcggtttgtagaggagagaagtaaaagtcttcagttggcatgcgaggagttgttagaagagcaggtgcgaatcttcgctctccgtaatatatcttactccttaattagctctcatgacctgttgttgatcactacagaaccgactattggccacgtctgaagcactcaccttccggttgacgtacttttcgtcacttgagccggccacccggatgctcaattcgccaggctctcatctggtcaccaacactgacttcttaccaacagtggaccggatggaggagtgtctggcatacctcaaagcgcatgtacgcaaaatttacctctcttggtcaaccttttctttatatctctgtacaccatagattgacaatagacgcaacctttttccttttggcgacgtagcgcgactacaaagacgcagaactctatatccttcgatatcaacaatgcttatcaaggagcatgacgctcatcaagatctattcaatctcacaattcaacagccttgggcaggatatctccaaacgtataggtgaactcaacctgtcagaaacggcgctccagacgttgctataccaaaagccccgaacagtagcctctcatctccggccccttctgctcgaactagagtatcgatcgaccaaccatcgaaagactacaaaccgaatgatcgatccagaggccgaagataccggaccttcgctcagtgaatgccaggatgcctggttggccgtcaggcaaagcttgttggcgggcattgtaagggcagaagtgttgaagctagatccgagcagtgaagatctggttgatctggttcgtcaaagttgtttactggtagtcctcttgccctgttgtctgaaatgacgattgcttgtttgggaactggataacagacacgtgcaggatgtgggtacctgaagagattatgcgcggaggaatatactttgttcagacaatttttcgagacaggagacgatcgactcatgtacgttttcaacatctcgcttcttcctcgaaatcttccttcatgttcgctcatggccccggttgtctatttcttgcctaccaaacgaaacagaccattcttggagacattgtgtgattacttatacgactacctacgcccccgaattttacacgaaccttctttgactgtactctgtcaagtctgtactgtacttcaggccctcatggtactagacacaatagacgatgatgacgatgaagaggagaaccagttcgacacattatctccctcttccaattacttctctcaggaaccgttaccaatcgatcaatcggctgttgctcccttacatagtccaaatcacattcgacagaacagttatcccggcctcgtttattctccatcattatcacaacgatccttccactctccaaaatctagattctatggaaaccccggagaaagagccgaggcgagaactgagaggaagagacagctcagttcgatgttgagtccagtcttgatggatgctcagactaggcttgtgttcagagctcaggcggtcgttcagaccagtgtaggaaggttcattccgggcgagaaggatttagactatccgggtaaaatcttggcaggtttgtgcaatttttctagtcttcacaaatcctcacatgacaaagagaatgctgatgcggcagtcatattgacattcttctaccatacggctgtagctaaaccggtagtatcgtcgagacaggctgtaaacgagttgcaccaagaggttgagaacctcaacgacctttcagaaaaagggtctgatgaagatgatgatggagctctgttccgattgccatcgagagaagttcaggaaacctggtatccgacgctgagaaagacactttgggtgcttgaagagctccatttctttgtagacgtaagtaacttgtccttatccatcgtattagctccctgttacaacatcaaattgacatggttatccctctcatctgtttattggtgggtgctggcttacatacgcagccggcaatcttcgaggacattgctcaggaagctatcttgctctgccgacaatcgctcgatgcagcctctgttcagatttcggccaagcaaggcaaagctgacggtgcgctgtttaagattcgtcatcttttgatcctaaaggaaatgatgggaagcgttgagatgatcggaaaggatttgggtggtgaaatgcttggtgtgactggtaagtatttgttgttcactggtctcgcgtacaagtacaactcaatcattgtctttccaattgacccgaattgttctttccagacgcgttctcggctttactttcctccgccatgtcgttcttgccaagcgcgttgacatttggttatggcgggtcaaccaacgcgactcgttcagatacccggatcgtcgatactaaaatggtacgtattgtgtcggctctatatgttctgatagtctgccttgaagatgattgcccatcttgacacgttgctctggcaaaacaaacaattaaaccaacaggatctggaccgtagcttgaaagcgatctgtgaagatctcatcaccatagcatccatagcttcgaccgcccctctccaaccgttcatctctcaagcttccactttcctcgctgcctctcgtccttctttaaattcatcctcgtccgacgtttcaaggtccaaaccgacgtcgaacaaagatttgggcgcacagccgtgggccacaccagaggtcgtgttgaaactccatgatgacgttaaggaagtaatcaggaaggaagttgttgattgggttggtaagctgaggatttacttggaagatggaaaagcggtggacgttttaattcctccgatgcaggttcgtctggtttgacatcaatcactcatacagctcttcgttgcacttggtcccacatggtcacttatatctgtgatatgctttcactcatgataaaacagtctagcatcatagaatcttatcgacagttccatgagatcctccgatcagaatacgacttttctgtctcgtctgttgtatggagtccggtcaagatgtgggactttttgcgggagatcgtcgagccatccacctcgactggaagaaaacaggacgcctgattgaacggatcgcaggcctctagtatctgtggtgccattcggtccttctatgtattgatatatggtagattttagaagttgttggtgtacatttaggccttctcgttgcagtccaccggggtctacctcagatttctccgcatctgttcttcagtaagagccatatgaatcgtctgatacttcattctttcacaagatcgatcagtctcaactcgatctttaccacgccgggtttggtcttcttcccactttttgattttcctttgcctttactagaaccatagcctagtaaaccaccgggcaaaacctttctacatactgggcatgaaccttcgaggtttgtttcgagcgagactggttgaatggcatgtcgatgtgccgattgaggatttgcgagcagtgtatttcttaaacaagcgaagcacactaatagaatacgaggaaaacatatgagaacactaaaggccgtgagaaggaacagagcagaggatgatgaatgagacgaacttaggtgtccacaaggcgtaacacatgcctccgaaggtggacagagacaaattggacaatctgtcatgcaataacaattcagataggatcaagacaaatgaaattaccatgtatagttcagcatgggtctaatcttgagccaaagaccttttcccaagtgaaaatataggtaaggaaggacggtaggaacatactgtattctgtaatcagctctttcgatgcatcctccccttctagatcaacaggaggaggaggaatcacccttctcttgggatgcacccttccttcttccgtcagttttgttgccgacgtgaaattggcctttgcgtttcgtttgttattatcgttattctcgctttgatctcgaagatcgagatgtattcttttcctaggcctttgcgaccccggcccggtctcagatggggaacaggtatcatttgtgagggtctcgaaactagctcttgttctccccgaacgcgtgaatgttgatgggccggcgatagcagagtttgtagtagagcctgtggctggataagaaggagagatagctcgggtgggttcaggcaggttcgaggttgatgttgttgccgtcgatgttcccaatgcaaacgaaccgttcggaggtcgctgaggtcgaggaggaactggcagccgaggacgattcatatctgagggtgatctggatgattcagaagtgctaagcaggatggctgttgttgtgaggggtggcatggcaggaaggttgacaggattgatgagaagtttgatcgaaagagtgtatgtggtgcttgagcaaaatgaagttgtgaaggtcgattcccggaaaatcggagtggtgtcgtcactttcggtcaagtcctcattcacctcattcacccagcatagcaggtatcgctgcacccacaaaatgaacatattgctagctcatccgaggaagcggaaccataagtcgtcagcctggtgaaaccttgattcgtattctcaagaacatagattc

SEQ ID NO: 2010 - DNA, 18185 bp, Xanthophyllomyces dendrorhous
taggctaattttctccctttatctcttctcgttttggctctatcgttcctcgttggatattgtaccatttgtttctttcgcttcttaatttttaacgtaattcattcattctttctctttctgataaagatcgaagcggttaactcaagatagagccttggactgtgagcgagatattcggtgaatatccgaatgagtctgaccaacccagagatgaatagaaagctatattcatcagagtttactgctgactaagcacggtgtatgttcacacaagcacgccagggtagccaggtcaaaagccaagaaagcgaatatggagtcgataaggctgaagaatgtggatctggctaatgtacctttctatgtgggtatatgctaatggatccgtgcctaatgtttcctcacttgtttacttatctctgtgtttcttctacaagtcagaagatagataatacttagtccaaaacagattatgatcatcaataaatctcacgaaggcaacttgaacataaacaggaagagtgcttacgcccacgatatcgacttggatccaacctcggtacagaacatgttggaagtcaaaaatcgtgataggtaagactgacagccaagaagctggtcatgtgcatatataacagcaaatctaagcagacggtgcgtagagagccttctgatcatttttattttctttgagatatatatatataactttgaatcatattcaatacaaaaccgagttcggatgccaatacaatagcaacaaaattcgtaagagatggagagttgcgtatggtgagaacgctatgtcgggcgactccttcagaaccccgacgaaattaacattggccagtgttcggataccaagcgtgtaaagggagagtcgtgaagtgtgctagctcagattcgatgaggaatcgaagagtatcaagggaaaaatgaacaacacgttttaacaatgcaacaaatttcttcgacacgaagattgtttttgaaaatgaaatgaaagtgcaagctgcgatgaacgtttcagaaacataaaccacgaatgatgagtgaagtcagatattattcaacagagtagcgcctgtgagaatcagggaacactaagaaagaattttaagtgaagaaaatcacatccatttttactcctcaggaggatgtcaaaatcagagcgagtgagtagacggatatggatgcgaacatccgtgttcgatcttgtcccgaacattctgtttagacaaactatgatcagttgcttcatctgtaaagaagagcgccgatttgtgtaacaaagggatcagaatgaacttcgtattgacgacctctgcgccatatgaacagaacccttctcgatttttatgagattgctctctctcttgctgacctgagactgaacgagtcttgtttgtatcacccaatccattagtagcacccaatctcaatcgcagaatatccaagaaagcttggggtcaatgatctaatatgaggggcaatcagcacgaagacagatacactgatatgcctcattcattgaatgatggtcagcccgcgcttcggggcgtgcgcctctcaacgagatgtatttcaatgagtctgcgaacgcgttagagattttgctaaagaagatcaaacgggatagaaaagtttgggaaaacccaaaaaaatcggaacagaacagatccaacggtttcagaaaaagggccgcccgtcatttgaactttttgacacattgcatgttcttcgatcgggacggaattcgatgaatgatcgagtacaacgtggcatttcaaacacgttggatgttgttttccgaactagttagctatactgttctgctcacaaaacgctcgaacggatacatactcgtctcgtacagaatatgtacaagagagacggtaataattgagatgaacgacgacgtgggtgttggactgaggttagacaggtacttcaagacgaatgcgactgacgaaaccgaatggcatgagaagactctgaatatgacatgagccagcactatccccgggtttggctctagtcctaacctagaccatacttttggaatcaaacaaagaggacgttcgacctgggcaggacatcatgaatgcgcgaataagatgagattgagctctattatttgatcgtaaggaatgagactcttggatgacgtcggggtcgttaaggacgatgttgatggtagtggcgatggtcactaacggagatttgacctcagccttgtttataaatgacgtccttctgctatggtcatcttatcaaatggacaaatggaggtttgaaagatgttttccctttttttagcaaagcagataaaggatagggtcagtcgccggaggcgtgggttagtttacttttagcttcgattttttcatgttccgagactgcggtgctgcgaacacaggtccacgcggcctggttttgcggaacaattagttaggaaaatttctcctttcttaatcaggatcattgcatttcttaatttaccagagcttgaaaaagtaaaaatcaccattggcttaattaattttatctttttttcatatcatcacccacgagttaaacatcagatttactggataaacatctatcgtacctaaaacaatgctgtcgtcttgaggggacgatcccgttctcccgtccttctcacaaacatgctcaaacctctccctccatacatacaaatatgcatacaacattcgccctgggacgggtctctggaaagcacttcgtcaattcagccaaatttaggtatttaatgtagccttcatctaccacacgcattcctctgcatcttgtggccatcttccggtaggtcactgtgagtagagagatcttctgatctgtgattcaatgaattatcctgttcaagaaagatttacagcaagaccgcgcaggacagcaagcaggatggattggaaaagacaataggaggaagtcgtaacagtagttgtagagagaagaagctaggatgagtttgattgttctgcgatcaagagaataaagaggccattagctttcttcagtaattgtataatcataggattgaaaaggcccgaaagcccttgcgacccctactgaaacaaaaagaagaaatagcaaagcgtgaatcagcatacggtcggttttgatctcaacgaaacagatccctctgctgatgacaatggatatgctggatctacttgagcttgagcttgttgaatttgttgagtttgtggcgcagcctcaattcttcttatcctcactgttatttccgagaggacgcgggttgttggttcgggtttgatcaactagtcattcgatgaggagtgtgtgaatgcatctgattttcctcgcatgtcctccaaactgattgttaaattgatacatcatcatatgattgaagagagatacaaatgagctcgagcaagtggtcagtaccttggacttctagaaaacaggagtctggtacgtggagataggttgaaaaactctaaatatggctgaagaccgcccgttttgcttatggtctggaaacgtaagcgccagataaagaacttaatgcatttgatcatgcaattatatatcttcttctcttttgacaacatgtgcccaattggaaaacgacataaagactgggcgggtgagtcgatctctggtggtatattccccgatggatgacaaggacgatggatagagagcagaaggcaaggcaaagatcgacagatatactagcccagatcatctctttccgtcttttgcccggaagtcgtagttaacttaaggtataactttttatatcctccgctctgttcctgaccctgatcctggccggcgatcccctggcctaaatcatttttcttctcacctatcgcctctccctctccttcagggctgtctggcggtgatcttccgcttcgatccggttttgtggtgcacctcaaccgagagaaccccttccatcctgcaatctgaccaggagcaccccccatttgaatcctccaccccatctcttttctctccctcggggctctttttctcttctccttctttccacccttcctccttctttcctctctccttcgtcattctttctttcgtccctcttttcttcctccttccacttcactctccaaccattacacgattgaaaacagagagaaagaatgggaaatcaatccatgtcattcgaactatgtcgccgaaactttgaacaacgtctaccaggagtggctgtgatattgtcttcagcatttggtacgtatactgtcttccctccatcgagagccgaagcatcatctgttctaatgccttgtcggctgacaatcgtccgtggagcgcgcgtttctactttccctattcatctcatcctctagaacctctttctactatggatggttcaacctgtcgatccgatcatagttcaccccgttacttcccatacagtcttccaagtgcgtggccacattctatctcgatctttgtacccactgaactaacccagagattcactcacttgacaaccaagcacatctagggcctccaagaaaaccgtgtatcgatcttccgccagaacagaatccaccgagagaatcatcttatagccattgtactgggtcctttgtgtcggcaggtgcgcagggcttcgaaccgagtggtcttcggcatcaacacggtgaattccacagacagagctcctcatgctatcaggtccaacctccttggcggccagatgttcctggtcctaggcttgaagttctcaacaacattgagccacgcgaaggtagtcaactcaaacttcataaacagtggccagaacctcagcagaaacagcacgcagatgaaatgcgtgttggcttgcaacgaattgagcctcacagatcgaacgacgaacggctcaaaacaacattgaacgatggtactgaccgatcgtgcttatcttatatctctctgagcaaaggctctgtccctctcttttctaatggcccaacgcctttccgagacgcccttcaaacttctatcccagctaccgaatccacgccatgggtacactctcagcttccacaacagagtccgaaatactggcaagattcccatcctaatccacatcgatatcagcccggttcaagatggcattttagtggttcgatcaatcagaccaaccgtactgcatttgatcattctgatacctacccttcccctcgacagcaactgtcagcattccccccctcaatctctccaccatactctgcagttaggtctgctcttcctacgatcggtcacgtaccgttgactcctcatgagagcacaccagatccgctaccagaggagaaggtcacagaaacatatccctcgcctccgtcgactgatcgttcctttaggcaaatctcgtcctttgcgcctctacccctctctttagaggaccttgtcgacccagcacctgtcaagagcgatactgtggatgatgatgttcggatgtcagggcagatcctcgttggcttggccaaaggaagaacgccggtattgggcttgggagtgggatctgattgcccgccaacgaagatgagcagcgtaacagtgagtgcagatgagaccttgaacgaggccgaagcggctggtgaaagggacgagtcggaggacggttcagagtcaaacgacgagattgttcgttcattccattaattaataggatttgtagacttggttactaactacccacctgtgcgtctggttcttctgtctagataccaacaactcgaacgccatcccctatgcccgtctatcggtcagcagaggcaactctgacccagttgaagcggacaaaaaaacgggcaagcacgttgcccgtctcagcaaccagtacagcgacagaacctagcttccgacgatcttggaccaggggccttccttctgcgtccgggtctgtatctacacctgtcaccaagacggcttcttcatctcagatcccgatagaacctacagctgtcacttcttcaggctctgtaggaacgagttcttcaggctctgtaggaacgagtgatagatcgaccaaatctgttactccaaagaattcgaagcggaggacgaagaagccaaagacgaaggtctcgatggagaattatgaccctgaacatcctcggccgtttggatgtgatatgtgcctcgagaggttcctgagaaaggttgttatatttcagaaacttgtccagatatgtttctgttctgtttaataggtctgacaatgaacttgtgtttttctcttcactttcagaatgactatgtgcgacaccagcgcatccatagtggcgacaagccctatgtttgtcccatctgctcaacgggtttcatgagaaagtaggttcagactcgacttgtactcttcatcttatgcttctagtttctacagaatttatccatatggtggtgggtggctaactgtttgataccttgccaatctgctgatgcttagtgacgcccttcttcggcatatcgaccatacatccgtgtgcgcggctcaggcaccctctcgcgaggagtatgtctttggtttgggtggtctgaaaagacgaaagtctttctcgatctcgactgcttcagaatcttcccatgcacgaaaccacaagaaacgaaaggtttaaatggagtatacgtatgtatctacttcaagaggattttctcttggtttatcttgtcttatttttaaatgtcttgtcttgtcttgtcttttcttttctttcctcttcttctgtatctcttctctttatcttttgttcttttcaatcagggattttcgtatacataaggaaggttttggctttttcagttttcatttccatctttcatgatctctcttcttttcacttttgatctgttgcttctctctcagttcattctggcttctatcgtgctcaatgtgtatctctttcaacctcttatcgagaggaaatctgtccatgatatcgtatatcatcctctttcatctttctattgttgcatatctcatcgtgtctcttgtccatcgttatatacctctactatgccctttcattttactttctgcatttactttctgcctcctttctaatgctttctgctgtatatcttgtttgctatgttcgagaggcacgaatgaagtgaaagaatattgaatttcgtatcggtgaagagaaggcgcgctgcgtccaagactgaggatgattttgagttgtcggttgtggaaatcattttcgcttgacagtcgttctttctaacccgagacacgctgtaaccgtctcggatagatttgatcctgacgcagccgctgtttgaacgttctcatactctgtccattatccttatttttccttatatgttctgagaagagggaagagatgtctcggttgagtcggtatctattttccttgctttctacccggacctttcaggtaaacttgactggaaactataaaacacctaaggtgactaaccgtcgtatatacctgatcttaaactgagagtcctgccagacaatctagctccttccaacgtacgtctcatctaacatggtaagcaaattcatacatgcatcttctgtctcccctttgtattagatggcctaaactaatcaagttgaaatttcaccaatcgatttggactgtctcaatcgccttgactcgatatagtcaaagatcaaagatcttcaacttgatttttgcttcgggactaccaaaatcctctttccaatctctcgtcagccctctgccccaacctcgtcatcttctgtggttcgattggaacagtcttactgactttggtctcgaccccttcattcctttcaactcttccatccaacctagctaactccacattaagtcaacttcatcaaggtctccttaatccactccaatgtgcggacctaccatacggtatcccgaaaaacaaggatgatttcaggatatgtaaaagacaagaagtcgaggatggtgttttcaagttttttccggtaaagaacgggaagagctcggttgttggaagtgtttttgattccaagaccaggtgagtttcttctattgacctcttaggatgcatagtaatcgtttctgatcggtgtcgctgttgtccgtcttctagagaaaacctgtacttagtgagttctcacgcagagattgaggccatcgctctcgacgcttgtctctgactgaacgcctctgggtcggttttcatgtgttgtgagtggacaacagcaatttaaggcgaacggtgtctggcagcccatctcggtgacggtacctacgatagaagacacggatgatccaccagaaccctttgaggatgaagtactgagcgactaaatcaaccttttcaaacttatccttctcttcctccagctgatcctataaaaggtgtatcaaacgtttatctctgtatgttcgtagtattctttacaagaagatctctgcgactagcctctgcgacatttagcaaatcctcggttgattgttgatcgagacgagcaattcgctcgacagaacagcagacaagagagaaggatatatgccgaagattctcttacatgttttttcggactgcttacctgatcggttatctcccgaattgctgtctttagtaactacaaccttgatcctcatatccttcgaccttcaaatcgttcttcgctcctcatctactcagaagcagacatctcttgttgaatctatgcatcagtgcgaaagagaagaaacgaagattggtgtggagaggtgacgagaggccttgcgatccagtgttccttattctcccgcgtagcgtgtgcattctatatggtggttatgcgctagataaagcagagaatagaataacgccagaagatatagttgggtatattaaattggctaatggcaaggatatattcaatatccagtcctctatattcacttgtcgacataagcttgaactaggctggagaagtagtataggcatgattgtctctgtgcatgataaataacaaacctgcgctccatcgttctctggtatttttcttttgtctatttcttttttcgttttttttttttacctaacatcagaagaagcaatagtcgatcgaaaggacgatttgccattcttagcgaacataattcgagcctggttgctagtccatttatgtcagcgaaaccgagttgatacttgattctgaaaatacgaaaacagagtgctgagactcagcgagataacagaattgactgccgataaacttgctcgtcatttctgtgagcaaacagattagatgcagacgttcagacagcaactgcaaatgattcaaatttgggccaggactttgctcgaaggtaactagaaatgagaacacgatgtacatgaattgcatatttttaaatgaccctctccgctccagcaggaatgatctatcgttccgaccaaccaagaagacaaaagaaggaagatccaatagtgtgtcagtgaaggtcttgatatgaaacaaataaacagaaaacacaaagaggaggaagtgaacaagaataagattttacctggttcctgccaggcgaaagagtaaccctcctgagcttgtcggccaactttgccttttccttcgcccttctggccgccttaatctctgacttagtcggcccatgcttgtctctctgccgctgctcgtacgccaactgattagccttcatcctctcgaccgatagctcggcatacctcctccttgctgtcaacttgacctcctgctccgtcattcgtcgacccactcggggttccaggcctagtcggactcgggtttctctcaaacgccaagcctcaacagcctggttgatcatctcttgctcctcaaccaatcgggcagcaactcgggccttcatctccttctcaagcttcgccctggcgtaagggttggcgagctccttgccaacatagatttccatcggcaaattgttcaacggattcttgagatagagatccggaacgaaattcgacgtagccgagatgttggtcaagtcttcacgagagggaggtgaccacgtcttggcggcgaccacagacgccggcgtatcgacataggtgactggatggagcagagaggtgagaaagagaccgagatgaggtggatgtaccctctcaaacaaggaaaagtaaaaaaacataactcactcttggcgggctcaggtacctttacctccggccacggcacattgaactttcttaagaactgcggctttaatctggggaatgtcttgagggctactcgcctgaaagtccacttcctgggcagaccgtaagcctccttttccagatcttcaggattctcccagaagtgcactcgatcctttctgtcaggacccatgacaccatatctgcctattcggctagcgaatattctgcaagtagtcatgatagtaggaacgtggtagtcctgtcagaaacgaacttttacatcaattgttgggatttcgttgaggaaggagtcttactgtttaggcagccccgggatgtgcacttgcttctctccgttagggccttcgattgtctcgggagtcacaccattctgtctggcgagcggcaaaaaggtttcggtagggatcaggagctgaaggttcgagcagttgatgctgatttgaacttttcgcgttctctcgaagggaggatgaccagcaggaggttgttggagaggatttattggaagcgggttcgaccgatcatgctatcgtgtagaaaaatccccataaaaagagagaacaaagcaccagttgacttagatcgttgatacaagccgatcgagatggacaacagtaaactattgagaattttgacgtacctcgagtccctccaagaagacccgattgttcttcttctcgaaggaggcaatcgtccaaatcttgaattctctacgcggcctgataattccatcctcggtaacgacttctgctgtagaagaatcatagtcctcatacagcattcgaggagtaccgtgtcggattcgaaccttatcaccaacggtgaagttccagaacatgactcgattggtgggatgagtccatttggcaacatgtcgtcgtcccgcctagaagagattgaggggtgaatattgagaaaagaaaggtacgacaaaagggagacaaggaatgatcagcatttgggcatggaaaagtttgatgggtcttctcacacaacaaacaaacaaagagaagaaatcgacagagaagggcagggatagagcaaggaaaattatgtccagcggggtaaggaaagataaatattatagaccaaagtatgactatacaaaggcaaaccaaaaaaagaatagaggaaggagaaaggagaaaaaggaagaagaaatagcctcaccaaacgtttcctcatcttgtagaatgtgttggacaacatccaagggaactgagtctcgagttgtctcctgtttgctctgatcaacttaataagcttgttgttcttgatggtgctatccctgacatttggaagctgcttcgcgatcacagggtggctccgcaaaggctgcgagaagccatgcttccgatggatttttgtccttcggaagatatattcggcaaagaaccggggagagtgaatgaacttgaacctcatcgcacagagacagagtggagagtgtgtgtgtgcctaagtcttgctggtcgtcgttgtgggaggttgcaaagaaggcaaaggaggtgaagaaagtgaaagcgaaagcgttctgcgtggtcgtggttacaggcacgtgtaacaatgtgatctctaatccttctctcctcttcaaaggtatatggttggaaaacattacatagagaacggtcaagaaataaaaggcaaacgagcacacgcagatgagaacacagagagatacagctaataacgaacaaaaaaaacaaaaaaaaaagagaaagagaaaagagaagagaaaatcttcaccactcgctcaccaacgtgcccaggccgaggcataactaacgctactatctgacgggttgaggcaagccgaactctgtgcatagcgcacaaacgtgatctctggctgaatatctgaagatatttgtagctctgccatcgctcctagcagtactccgattgggtgacggccgcagattgtatttttggtcctcttgagataccaagcaaagtctcgatggacattgctcatcctcccttcaccttctagaatgtttatcgcctctttatcaagagcctcgattgactgataaatcggtcgatccgggttcaaagctctatgtgaggaaagcgagataaactcgtccgatgaagcggagggggtgtagtgagtgtaacgaaagcgagagccccttctcagaaagataaccattcgataccacacattggtctaaagatcagctcgaggtcgtcacaacttccttctgtattagttgttcctatcagaagcgcacttatagcttaccaatgacagaaatccgacgagactactgtgaatgtctccggatcattgatatctgcccggttcagagaaacaatagcgaatgatgcatcttgccattagccagacataaccatctgtctttctgcagaactggaggagaatataaacgcacatggcgcaaggatctttccaaatcgattctcttccgatagcgagattgaccctaccagtacggggacgattttgatggattgacttatgaatcaataaaatcaaagtaaccaatcaacatgactgaatcagcagttggagcgatcaaggcgaacatgataaagtatagagaaagaaacgtgaaagatgttccgtactcttgaaagaccttccggacaaagggaagatgcatttcaatcgaatgctcatcctcatcctgatcccttgtcatttcctcgaattctccggtctgtttgagctgttggataactatgccaacagatagtacatacacagtactcccatcagctttccaggcttccaaggcggatatatctccttccttccacataccatctaaatctaattctagagaaccgactggagtctcgtacgtcttacatctagataacgcgcaggaagttaagtagtagtgatgagatggacctagaataaacactcgtttgctatctcaacgagaagattggttgtgacgtttagtggtctcatcatgattctactgtattaaagggaaaccgatgagcatacatgccggtggtatcaatcgaccggtaggcccaaccagcctatacatactcatcagcaagacagtatcatacatcagattaaaatgagatgagatgtcagagtaattgtttgcgaacaagggcttgactgtgatggaacgacaggtctgactgactgtagggcccgaatatgagaacccagcatgactggtattttgccccatgactcatcgtcagtctcatcactcatatcttttgatcagcttctcgagggaagggagacatcaaggaaacaaaaaggacaccaacggagcaatcaccgctttacagcctttaacaggaggttcaaacaactctcctctatcgcctacggtcgacgatgaaggaacatttcccaaaaatccatcaagttctcttgataacgccgaacctaagaagagttcatcattgtcagtatatttatatgttatcgacaagcaagtccgagcagggtgagttagatgaaaatcctgttctcataaagcagatagagacacagaagatagcaggggaagaaggcggctgtaccagactttgtataccaatctccagcatgtgaggcctgtcgagtggacattgcttctagttttcagagttttttctgtgtatcttatttcccaggcgtatgagtttgacggatgatattcgcttgttgtcaagatatgttattttaagttatatgggttgagacggcaagaaatgagatgaaacgggatgaaatggaagaagatgaggtcgcgcgcaaattacccgtcgtcgtcatcatcgttgtccttcatatttgctctattcgttacttgcttcgcactctctattgccgcctattgaagcaagtatttactccttttctttacagggacagtcacaaagtgagaaatgaatatgtaggatgttttcactcggattgcttatccatcgttgcgatgaatgaacagaggaacgagaagcaggatgaaacgaatgatcatacaatcgaactataaagtgggcaagaggaaaataaagccacctaggtctactctactcaatcatgaaggaagaaagggaaaagagaaagatgagaaatgtatgaagaggaagataaatggaagggagatggggtaaagacagaaggatgaatggagagaggagaggaagaagatcatgatttttattgaaaaactttttagatgtcggtcttctatgctttacttgccctttcctcccaacttggctttctcgatagcagctgtaggggaaaacccggagagtgtgtcagtatgtttgatagaatatggaaaccacgaaagaacgagaagagaagaaaggacgaaccctgcgatcgcttggcaagcatgttcttgtagtcaacaatggtcattccctgcttggtcaagttgatgatatccttatccttaacctcccaaatctcctcggcgacctgggagataagtcggaagtcgtgcgagacaatgacaacacctccagagaagtgcttgatggcgtcggccaaagcatcaatcgactccatatccaagtggttcgtaggctcatcgagaagaatgaccgaagggtactccatagccaactgggaaaagacaactcggtttcggagaccatcagagagctggccgataggagacgtttgatgggctccagagagaccgaatcgaccgagctgggatcgccagaactggatgtccttatctgggaacttctggtggaacaaagatccaaagtgctccaaaggagacaggtcgtaaggaagctgatcggcagagtgctgagagtacttggctaacttgagctgggtgtgtcgaccgatggtaccctctaccggagagagctcaccggtgatcatgttcaacaaagtagactttccggttccgttgtctccgacgatagcgactcgggagtccatatcaataccgaaagagagatccttgtagaggtagtccttcgactttccggagtacgagaaagcgacgtcggagaaagcgatgataggcggcggcaacttggagacatcctcaaacttgaacgagatctgcttgggcttggcaacctcctcaatcaatccagcggcctccatcttgtcgataatctaaaaagagaaacaaaggcgataggaaaagatgtggcacgatgagtggtggttcgtttcgtgcagctatgagaggaccactgaccttctgcttggacttggcctgcttgaccaagtttgcataggtaccagcggaagcactgagaaaggatggcggttgaaagcgttggtctcagagggcagccgaacgcttgatcaaacaagcacaaaaaagaagaggacgtacatgaacttcttgatgtgagcaatttcctcctgttgcttggcgtaagccttcatctggttggtctcgttctcggccttggttcggacgtaggtggagtagttacctccgtagtagatgagcttcttctggaaagtgaggtccatgatgttggtgcagacagagtccatgaaatcttgcgagtgggaggtctgaaaggaacaaagggatgaggaaagagagaaaggggtcagcgatgcgcttcgacaccagtgcagtggaatcgacaggtttgacgtacgaagataagaatgtggttgtaagtcgaaaggtaagcctcaagccagacgacggctccgagatccaaatgggatgtcggctcatcgagcaacaacaagtggggcttgatgaacaatgctcgggccaaagcgactcgcattcgccaacctccggacatgtccttggtgggcttagccatcatggcctgggtgaaaccaagaccgtggagaatggctccggcctttgcctcgaacatagaggggtccatctcctcgatctgctcgtagatagcctcgagggcgagctcatcgacggagtcctcagtcgacatatcctcggcaagcttctcaagtcgctcgaccttggccttagcagaggcaatgatgtagtcaagagcgttggtatcggaaggctcgacggctcctcgaacaaggtagatctaatcaaaattacccaagaatccgaccgcaacaggacaggatagaataaatgttgggtttagattcgaatgtctcgcagatagaaaaaggtacagaggaaaagaggaaaagagctaacatcaatgtgatcagggatctcgatatcccgctcagcgatggattgaaggaaagtggactatgaaaccggaaaaacgatggacaggacaaggatcagcaaaagaacaagacacattagttgtatggatgatcggctaacctttccagatccgttctctcccaagagaccgtatctgtatggtgggatgtttgaatattaggatttattgtaaatatcatgcatttttagatgataaaatgacctaccgctggccgtagctaaagaagataaacgaagaacaagacaggtcagaacagtgatttcagagctcattgttttaacgctcaggtagcagaggagaaacatacttgagggtaacctcggcattctcaatcaagacacgtccgtggaaggagagtgaataagagtcgattcggatatcacgacccttggcgtcagacaccaacacaccagtggcggatcggtcggtggcagcggagagcttggccatggacatggccaaatcctcggtagaaccgttggccgaaagcgaggtgagaggagtgctggcggcggtagaggtggtggtagaagatcccttcttagaggcgcccttagcggcctttatagtgtggatgtgtttcagatagagagaggcaagaggggtggaataaataacatttgatgaggggaatgggttgatagagagaaagcaaacgcagatgaatcgattggaggaacgtgcgatcagctcgagtgacctaagattcgcttgattttgcaccaaacgagctggagaacaatatccagaaaagcctaagctcatctggcatgaaatagtgatcatcttaccttctccgcgagtcgctacagaggacgagacgttcgagataggaaaaaataaaggaaagaaggagcataaagtgattagccaccgaagtatcttcttcggttgtcgccatacgatcctgctttcctctctatcaagacgaaccttagccttagaagcagaaagaggagccattatgggttacttggatatgtaaacctgtggaaagagaggggaaaagaaagaaagagaggagaactgaaagaccaaagggtgacttggagttggtcgtttgtaggtgttctctttttttttttctctgatgatgttggggaaaaaaatgcgtggttacgtaatcgagttctggttagtgttagggttgggtatgtatgaaatcatggtccgaacgacaagagagagagaccatatgcgcagagacaagtagcggaacacgtacaagatgtcacttgaggtaggtagacacatgggaacgctaacaaccacattttataacccatgttgttgacgctttgaactgatcggtcgggtgattgatacactctgtttgcagcttcctccttgtcggtgttggtccaagtcactctcttgagcgagtccttgatcagacagcttatggtgtaaagtatcagacggcggctacaacgatgttgaatgaagaccatagaacctttctaactttctccaagagatagtgtccgagttctttagtacatgagggatcgatcagttgtataacagatccatgctctcgagcgcttgtgtttgaacctttcagccatcaacgcctctttccaggagaaacttgaggtcttcaaaaagactgcaccaactgatccagattgacttgattccactacgtatattaaaagatctgtgattacttgagacaatcttctcagaccagatgttcagatcgccaaagaaaacgctctaactcgctcaaggagcaagcaagacagttttcagagggtgagagaaagcgatcagatacgtcccacagccccgatgtcgtccgtcggctactctgcaagcaaagaacgtcaagagtcaatccactt

SEQ ID NO: 2011 - DNA, 75223 bp, Xanthophyllomyces dendrorhous
tcaacgtgaaataaaatcgagacatcgttcaatcatgaaacttgtttcatctttctgtacggatatcaagtaatctttaaccaaacactctgcttaggctactcttgaccataccaccgacaacttggccgcccaaaccactcataccaaacatatcgcccatgcctccagacaccgagtttgcccatcgggctttggcatctcgatccgcatctgcaaatgtttgtcgaaagatgatatcaatattaaaatgatgactcagaattccatattccgctctgtccgatataatcaagatattaacgtacatgtaaagccgaggacgttggacaggttgaatactagcgctagcgctacgatcggcaagaatctatatccagccagacccattcgatcaaaaggatgcatgagcaagacagaaagacgtggtatcaattaaaggccgagactactcacgatacgctaaacttcaagagggatacaaagaacaagacagcccacccaaccgggtatacataaagcgcggtccaaaacagtttggagtcgactgcgttggaagcgacagaaggctgttattttggtatcattaggaaattaagatgaatgaaggtataaaactgtcagaaacaacactttcagaagactttggagtgatgtgtgtatacatacgtcgcgagactcaaatacccaagaagactctccatcttcatccacttggttccagtaccttaagccaactaaagttctgcctgcaacattctgctctcaaacaccacatagaaaacaacaagaaatcaacgcgtgaagtttcagtaattgagcttgagaatagagaggcgatatttttgtatcaggaaagtctcacccgtgtcacccagaaatccatgctaagcaagacgacaaccagtacaattgacagaacataattgtcggtaaacagcccgcagagaacgtaaaccgttatagcggctgatctgaagaagtagagcgagaggagagccatctgatatggtttttgagatatgaagttcaaattgaattcagcttgcgaatcggctccgcaaacaagttgggtagcgtcaagaactgaaacataccggatgactacttcgtttgatcatgcccactatcccttcgtctccgttgtttccttcacttccgcttcccagagaattaacgggcggtggtaatcctccatcggcctgtctcggaggtctggaagaggatgaagaggatgcgatgttacctgaaggaaacgtcctgggagtacctggcggagagtttgagtccggctcaatgtctgcggaaagaagcggtcttgtggtggattccatctctgattgactagatcctctcgttatactcttctatctagattgtctaagttggtgaaggtctgttgagtgtgtcgttcagaaagagattgcaagatgtgagatgaacggtcgggttgcttatgtaatcgaccgaacttcatccacacagcgctatcatctcagattgttgaactttcaagtagcatatctcgcttgccaaaggactgcttgaccaagatgttgtatgcagatggaggtttgaccaacgttatctatgcaggagatatgtgctcagattaagtgccaactcatgacataggcaaacctgatcctcggcgcgctctcatctatttccgatctctgtttcacctcatatcattttatttcaatgtctagtttgactttaaccaaggaagttgaacacgaagaaatgaaggataatgctggcaaagcagaagtcggcgaatgcactatgaggtccgggcgtgtatgaaagtccgatcagatgacctgataagcattctgtttgatgaacgttgacaagtgaagtgacaaaatattgtcaggacgtaccgttctttagatacagcttgaaactcggagttcgggttgacctttagatcggcgggtatagacgtagtgtcaggagatgtagcagatggtgaagttgatgtagcggaagaaacaagcggtgttaatgtcgaagaggaagccatgatctgagctcgcaaaccagcgaggagaacaaattggccagcagccgaggcgaatctgagatataaacatcaatcaccaacgagatattggaattagttaaggtgacaattattgtctctcaaacagatgcacgctgaagtgcgtctgcacggccgctcaatttatgcattgtgagccgggttcaatttggaaaggaccagaattctccactgccctctacagtttatcacaacaggcgaaagctgcatgtatgaaaatgaaaagccatgaagacaaacaaaggagactcaccctcccaggaaggcgttgtaaggaaagctcgtgactccgacgcagtaagcgaactgggccaccccgctcaacaggaaaaatagcaggaagcaatcaatgagtttgaccttagatggggttgttcgcttatatgattgaaccagagtgttgactgaagacgagagggctgaggaggtagacgatccagacgatgtagagccggttgtctttggattggcctgggcggctgcctttttgagtcccttgacggatctgagcgtgagtaagacaacaaaaagtcaacttggatcaagaacgagcggagagaggctcaatacagagccagatgacacctacgtgggtgccatgatagaatatagatctatgcgagatggatggtccaggatagatgacattcatgtcgaccagggaagatcagaagaaagagactgtaaccatagacgctcatggctatgcgtaaccagactcctccactcccgctaccttcagttgcttctatcttgtctgcgactgtgatctcccggttctctcgcaattctatctttctctttatcggctctatcttgtccattccggctgatgtttggagttcgtcccttgatgacttgctatatcttatgaacggaagtctaacctaccgatcatgaaatagtggctgactgttatttcctcatttcgttttattctgttcgaccccattcggcaaacaagcagcttctcagattaggtctggatccaattcctctatctcacatgttttcaacggatcactccgaggtaatcttctcaaagctgactgaactgatcaatatccctgaaataactatatactctagctttcgacgcttggctcatcactggcttcttggccggcttgaggcgaagcaccggattgacgtgagtaacttgcaatctgtactcacctctgtgtagttgtcagatcagacgctcaattatcaagctttgcaatcttttgggtttctcattttgtggctcattgaaaccgacgttccaacaacccatgctgcttcgcgcggggcatcgcttgtacatttctgcctggttaggccagcgatagcccggattcctaataaggaccttcagagtgcgtcaatttagtgcagccgggctcatggctcgcttgttcatttggaatcagcaagttgctagaatctgatatttctgcgtatgatatggtttgtttagaggccatcggatggtacctggaaatcggagaatatactctaggtaagtgtgtgataccgcgtctcaactatgacgtggaaatgcatcctaacactactattctgtcatcatctgtatttcaatcagatctcgcacaagtctttcttggagtatgttcttgtgactttgcttcgaagatctgctgacagcatatagaggatgttaatctcaatattttgatttctactatcctcctctagagatcgtcctttttcgttcgagatcgagatcagagcggcagatagaataaggatttagttgactttcgagagctacccagctctttcgtgtcatcggtttctttttcttgtatccactggtttcttaatctttcctttccattgttctctctctgaacttcgtccaacactcccactctatgtgtataacctcccatgctctcatgacttatgacgatttcctatcttcttcctctgttcaaacaaatttgtgtctcccatcgtaagctagcaaacaatacgaagatgtccgtcttgatttggttcattcacgagattttatttgaaacacagtaaagaaaaataacaccgccctcaggggttcctatcgtttaatctgaatcattttctctacttcctgccagggctgacgcttcgtcttcttcctcctcctccacgggcgtttgagggggcagcggtagagggcttgacgaatgcaaagtcgctgttatgcgggataacgaaattgatataagcgcacggagaaggacgacaaacaagaaaaaaggcggagaaagacacataccactcgagctcttgctctaaaagagtcgttccagtagcaccgctgatggcagcctgagcctcctcaatggtggcgtactctaccaaagcgtatccctaaaagcatataagatttgtagtgtgtcgtaagaggtagaaaaaacacaaaaaacggtcaggtgtgaagctttttgttgtgaacgcgtctttcggattcatctctttcaattttctacacgcgacagacaccttcttctaacaagaacactttctctctggcttcctcgttgtctttgatgtcttctaggagaaacatcaaaaagcaaccccacaaccgataagaatggcgaaacatagaaggaaggaggccgtaccttcacgtaacccgttcttcgatccaagttcaaatgcaaattcttgatttctccaaaatccgcaaatttatcctgaacatcctcctcagtcgcttcctcgtgaacaccagtaaccatgacgatatatccctcgattgctgtcagatggcagttatcccagttaaacgcgttatttcacgtatttattttagaatcaagtcgccaaggtcgataacaggagggaaagcacacaagccaaatcgagatcattaatcatgtcagccggagacaggcgaagagctagtcaaatcaaaagaagacgtacacctctgggccttggattccgacaccttttggtccacgctacgtgattcaaggccgtaccatacatgaagatataatgcgaattgaacaaagcatattgaagccacacagtgttagatgttaattcttgttttaatctatatcgaaccataggttctgataatggataagcatctggtacgatatgaatcaggccaaaatctttagcgaccagacaaacaattgaatgagagaagaggaggatcacgagaggaggacgaacatgtttatctagccaattgggatatcattacttgccttttgctgacgcctaaacgttgcaataaaatataatcccccgaatttaattcaaagaccaaaagagaaatcggtgagctcgaaaatatctctttcctggcagttgtcctacaaactcggatggacacaagaacaccgaagaggccaccggatgatagtttccttttcatccgaagctcgtctgtcccgccacatagaaaccaacatgtgcatatatctcgaactcactgttatcgatatccatgtcggccatcgtatcagaaaaaaaagagataaacagtggtagagaggttggaggtgatgagtttggaaagagatgatggcaggagtaattagtctgatcataggcggctttagtttttgatttattttcgattgtctcatggcacttaagtcttaacactatggggttttctcgacacaacatatatcatacatcacacagatcacagatcacatacattggattgacggctagggtcacactatgctgttttgtctggaagcaggtaaagatccaagtgactgtccaccaggcgaagtatttcccgcatcggcaacacttttgtccctacagattctctctgtttagcgcaacgcgtttggggacgaagcagagaacagagatgaacagatcaaacaaagagtcctgatatatcagattggttggctacaaaatgcaaagatgataaccagaagaaaagtagaaagaagaacgaacggaagcgaaagttgttccacggacaacgaagttccatatttccttgaacgaagaatctgttttggaaactccacgctcggctaggcactgcatggccacccgtttgatcgtctacatagccatttgaatacgaagaaaacaatggtacgattagtagtgaccgaaagaatgaacagaagcatcacaattaccgatagacaaactcacagccttgttgtcgctctcatatgggagtgttttcttcatccctatgcttcccgcttcagacggtttatcgtcctcgaaacctaacggcatctcctcttccatctcccataatcctacacctgtttcctcgcccaatgcttcccgcctaggaataactggatccgatctcgatcctttagtagttcctaatactggcgccactattgccggtagttttttcgattctgtcgaacgaactcgcttcataggttcgcgcacagcgagacttgcactgttacaattgcctgttgcaagattgctgttggtcgagatgatcgattctcgacctcgtttgtctcttgtgatggcactttcccgatctggatttcctattggcttgcgtttcttcgtagaggaaaaaacgtcttgagtcggatgcatagcaaactcaggaacctgacggggcgcaggatcgtctgggcgaggagcgcgcggagtggtagatgggttggcagacgaaagaggaacgtatcgaccaacgtggagagtaataatatgagagttgcttgagcggccatatatgatgagattggtacaatctaggtaatgagaggagtaagaaattgttagtccgtgaaacagtgttcaaacatgaaaacgcctttaggtaccaagcgtttcgtcccctaggccaattaggattccgagttgtgttcgaccatcttcatctacagtatcgttcggattcttggaccatgactgaatcagttgtcgcttgataaagttgtgtacaagaggacagctcggatcggtatatctaagccagcacacagtacaccaagaaaggagcactgcttaatcaaaagtaaaacacgagaccaatgagaagaagtatgagtcttacagccggacttttccttggccttcgactactccgtctatagttccagacccctcttgatctgtgggttttcctatacggactatgcctcctaaccggacacttggacgacctctcaagctttctagagcaagacttatctcaatatccgtcgtgaaagcgaaaccaaacggtgaggttagaggaatcgttgaaaactgttttattggtgtcacggtagtgcaaggctcttcgatcacttgaggaagcaaaggtgctcgcctcccagcagttgtggaaggtttgggctgggaagagcgataaatagatggtgttccagaagtacgtgacgcttgaccttgatctgatacaaaagttgatagggatgttgaggctacaagtgatccgagagtgataggaggatctttagtcttctccttcgtggtaggacttgcttttgaaactaaagctgttcccatcatgccacctggggtggaaatggcaccgaggtgcgatatgaaggcaattccatcaaggaaatagtcttggggcaattctaaggcgcctctccaaagaagtcgatatcctgaggcattatagcttaacgaacgagggcccgtcgagttatttcttaaagaagcgagcgatggtctggctggagttgaattggccatctggttctgatgataccacctcaactatgttcgcgtgtttgatgtaaacgagacggtgagtctgggcagttgaagaaccacaaaactcatttaaacgcatcgacgcgtcgacgcgtcacgacgcgttttgactttctttgcttcttaacctccatctctccatccgtataatgaacgactttagatctttttcggcttccttaccagacggagactcctcatcacttattaatctgatatcagataaactcctagaaactcattcagacgctaacaccgtcgccgtgcttgaaagcttcaccgaggttctagattgggatcgtgatggttcgaacgagcgtattgtcagtttttgcttgcttcttctatccattctcgctacaacttgtgctgatctacacagatctgacagacttaaatccttctacttttctcctccagtcacatatacttgcttcagcttctctcgagctcgttccgctcctctctccactattatcacggccagccgaagtccgctcactcgctaatagtttattaatcagaggggttggaacctatggaagtccgagagaggtaatgcttgctgttggcgaaagaattgaagcaatgatggacgaaatagagtaccaggaggatgagactgatgaaagtagcgaagaagaagaagaggaggaggaggaggaagccgaggacaaaagcgatgcagagaatgagagtggacaggggctggaaagcgagagtcaggatctcttagatgaggaaggctttgagtctgaagaggattatctccacgaccatgaccgctcttctgcaaccatgtctcgtccacatccactcttattcgagctgcctacgctcttgaatctcttggttctctccatcccaagacttacgactaaaaaatctttagcaacatgcatgaatctctccactttaatcccaccagtgattcagatgctaccagaatcgacgccagggttatctcgggtagtgatggaccaggtgagggagctggtagatgtgacgagaatgtgggctgaaggaaaggatgattggagtttgaaaggagaacaaaacgtgaggttatgacattctgcttccccaacagttaaacgaatagtctaactcagtttgaacatctgatgctttgtagtcaattcttctctcgatcctcacttccagtctagttcatttgtatcctaatcttgatgttcaatctgcaggttcgtctatcttcgctttaattgctgctatagtacttcgacgctaacgatcgatataaatccatagaatatgcttacgcaaatgaccgtccagacatacgcagagccggcttcggccagaacggctatcagtctgggatggactctatcttggtaagtacgtcgattctcagaggccgatcaacgcttgactaaagttttctcacgacggacactatagcaaacagcccttcggtttattcgaccgatctctccttccttgtctgcatcgtccgaatcaccaaaagctatcgacatacttcctctcctcacctcttcttctcaaggaacatctacctttgcgctccttcttctctcgcatcacctctccacgtctacgatcaccaattcagaattttttgcatcagtccctcccccctgtcctaccagtccatctagttggttggagaacaccttagaatctgggacagtccgttcagctcgttcaggcggaattgtctgggttcggtgttgtctttctgccatcctggattcttccccatcaacctcagtttctccgtcggcatctgtggatgccaaactaattcgatcattatgggatatttaccttccaccaatggcaacatcgccatcgtctatctttcgacaactgctcttcgacacgctgaagcagactctacatgctcaaatcctggactcgacaagagatgcattggctatcgttcacgatttggtgaagaggggtggagaggcaggtccaatggtcaggatcactggagttcattttttgagatcattgattgtagatcgtggcatagagggaagtgattctgagtttgaaagaatcggtaaggcgttgcaagatgttccgtttggagaaaaagatgagaacgagatgttttgctgggagacaatggaggatccaagaggagagacgtggattagaggtcctggtccgttctttcttcttacttctctggatgatttctttcggtgtcgttgatgaataatgtatctctgccgtaacacaggtccggctttcgtcgtcctcacactcggagtttaccaattgttattgaataaagatccttcttcgcttgtcagtcttcaagacctgtatttcctctcgctcttatattctgtcttcgaccctaatctgacgtatggctgcccatccttgacccagccccagactattgtcaaccaccttcgagcgcttccagagacgtacctccgtcctcttagggcgcagcttgatatccgatcaattcctaagttaaacgatacagaatcggtcgatgcgtttgaaacggtgacttttgcgctagagggtgtcgaggacgtttggaaatcatggaacaaaaactaggtgactgttaaaccggtcaagagctgtgataaaatggattggacggcatgaagcgaggcacgagattggagattgacagcacatctcgatatgaactaaagatatgttacctcattcataaatatgagtagaagaggcgaagcaataccattattaaggtaagcatcggatagagaggagtatattctattcggatgaaagaaaaaaaaacgatcgatttggccagttacagcatgattgtatgagttgtctatcgatatatctaacgagcctcggcctctactccccatgtttcctccccctgtttccaatcccattctctccttccaattcgttcgcctcccagctttctccagttttccagccctctcctctgtcgctccttagcaagagcaacaaatccagtcgggccgaaccaatattcagcatgctcggtcgggccatactttggccaagtaacggatccaccgaaggaggattcaagttgagatgtaggggcgtgttcggctatggatggagtagatggaagaataagctttgaccgggtcactaagatacgtacagaaccaagaaatgttttatttggtggtgagtccaatgtcaaaagccaaagccaattggcgaggaggatgtagatggaagatggacaaaccaggatcaaggagcggggtgatcatcttgaagaatgcctggacaagccaaggaacattgatcacgaacgctgttccaagtctttgaatcgaagttcaagaggaagatagaaaggatcgatgatgtgagtggatttcctacgcttgaacattttaaatctaaaataagaaagcagaagagctatacacttaccgctcagggtagtggtcttgcaggctagatgtcggacggcgcaagagaaaagaacacaagcgcaaagttcagccaaaacatttgatctgcataaaagaccgaacgagcgacttcaaaaagggccaaacgaacatgcgaagaactttgatggaagtcgatgttgacggagatttccctcgagcagcgaaattgatggccagcaccaatttctcgactcctgccagacatttcacaagaaagaccatatgaaatttgagatgatatatcagacttgagtgtcttctctgaaaccaaaggcaagatgtgtgaagaaaaagggcaaacctcgtggcataaggtgttcacagagcgacctgatcagccctcctagttagttagatctaactcttcacagcggctctatactttataatatagcaagatgatgagagatgctcacatcgtgtagaatacatgagcaatttgtctctctgattcggctgtattctgaagaccgggacgcatataccaaattggtcttcgctgattgtcgaatccccagacgatctgcttgcccgtttcattctccggtctaaatacaatatttttgttattccgttgagaggtgtcagtcaaaaaattgaatcattctggttacagtttttgtatgaatgagggatcaacaatcaggacagaacaacgaaaaggaaaatcgagggtgaaacgaacgagatatattcctgtgtgaattgatcgaccccaaactctcgtctccagagcagcgtctggctcaaccggtcggtcgcatccttctcgttccattttgtcgctctaagaaatctgagcaagcactcttctgacagccacatttcttccagctcatgcaaaccctcggtgtacccgagatcgatacattccgaggaagagaactgctttgtcggcagtggtactttaaaggctggcgaggcaaaatgtgctttaagatttgcgagcgacgttttctgcgctggtgtcaaaagctctaccgagaaaggagattcggctggcgccgatggaagagatgagtccgggtgctgaggaggtagatagagagacatggagatgatggtcgacggtcaaactggctgtgcatcgaaagatcttggtgaagaaatgaaagattagtcttcgcttacgtgatcatacgcgcccgaaatctcttttttctgtgttctctctcttccttgtccctcatcgtcatcatcaaaccaccatcgttctctgttctctgtgatctttctgatagcgggtacttcgtcctcaagtataaagatgacctcttatcatccggatagtaatcatccgtcttgggaagtctcgatcggtcgggatccgataggttctcataggtcggataacgccgttggcgctgatggaattccttcggataatccagaagacgaatcaaactcatccaagaaacgaaaaattcagagagcctgtgaggactcatctttttcatatatatttttctttgcgtccggctgagtttgatatatcggtattgatgaccgtcgacatttcttgcaggcgatgtctgtcggcggcgaaaagtgagttgctgagcgtatcttggcgttttcaccatcgttctatccatcgctcgtttcttctactatctattccgctcttttgttaatccaaataaagaaagcaagggttgattcgatttatcttgaattatcaaatgcgcactggatcgtgtcgtagcaacgatgcaacggctttgagatgcccgattcccgtgagttccgctccggcctgtcgcgtgtccggtcgcgtcatatgcccggtcggcttctcaaaaatgatctatccgcatgctgaaactcaacatcttggccatttgtgttggtttggactgataatgccttggttctcaggctgtagcacatgtatatcccttgggatgacttgcacgtatcaggaaacaagcaagaagcgaggtccgccaaaggggtccgtatctcatactcatcgtactcttctttcggccgaatttagtcgtggatttgttcaactccgttcgctaactgacaatcgttgtggttatggctgatctgtcaaacgttgtctatagttatgttgagagtctagaaagtcgactggccaaatcagaacagcttttagcccaggtaaatcccacccttgggacgcgtcaagatcggccaattctatgcttatactgaactcccatactgatactaactcgatattctccctatatgatcaaaaagctcaatccaagcatagacattgaagcagaactagggagtcctctcgatcggtcgtccttcgctggccaacgaacttccaaaaagatgcccaattctcctaacgaaggacaaactcattctcctaccccggatcagccgtccgctcaggtacagatctcacactcgaaagcagcagtatgatttatcttaaataagcaagctgacacgtgtgttccttctctcagccgttgaaacaatatgcttcccgctctcaaccataccaaactccttcttcgtcttcctcatcttcagccatagcgccacagcatgtcaactctctctctaccgaatctttgtcgcattctctctcagatcacccaaacaaagttccagtctccaacaatcatttcgggtttgttgaaacaagagctgcccctcatagtaagcccaaatcaggaacaggagatgatgcggctggaggcatggtggatgaggaggcagatttgaagtcgttcgcgcagctgcatcatcgagatgaacaactatttaaaaggtgagcgcttcgcaaacatcatctgtttcggggcagcagcaacgctttcggtcatcacataaaccggtttcgctttgaaataagcggacttctgaagcaatgcaatctttcttctgattctatttacctctttcatccaggtttcaaggaaaggtttgtcacaacgcggtactattcatccaataatgatatgatagactgatgtgcccgctgtcaattgtttcattcttcgggagaggagattagtcctccggattgcctttgctatttgcagccatagggttcaaatatggagtagatgcaaacagatgtaagtcatagattattggtcgctcacgttgaattgccctctaagttggccccatatcttgcgttggtatggacgtgtttggcactctatcagatggtcaggaaatcaagttgcatcggacaacatcgcgatctagattctggaggattcgttcgtcttcctcctttactcgtctgacaattcaaagtctacgctcaaacatcctgttccaaccttgggtatcttcaatagctccatgggaatctactccaggtgtcttttcctcaacttcgaaaatatcaaagcctacggaaacacctactccaaataggaagagtcttaacggagataatacaatcctcgaagattcaatagataaaccaagaaatcctcaactggaggctatgatgtctgcgaacccgttcgcttcatggcccgatcagggacttgattggagattaatcgaaggttacttcaatagcgttaatatgacactgcccttgttgcataggccgacattctatcggttcgtgcatatccctgttttcttccatatattgaatctgttgtcggaacggggggcagacatgagagattatctgttctttttgtttgtctcgatgttatcgatatgtttgagcaatagctgatttgattgatgatggtgggacttgacagacaatacgcttctcaactatacaacactgaccccggtttcgccaggatctgtctgctcgttttcgccattggatcttatcaatgcaacgactctagagtccttttcccaaaggaggatggagaaggccattatggaatcgattctgctggttggacttactgtgagtcacaaagacttattatgttttacttcgacgaatgtggttggtgcttactaaatcgatcacgagcagaccatgcgttcggacggatgattaggcatcgactggcacccaccgaactttgggatcttcaggtgtccgtggtaaggatacccctgcaatctgagttcataatacaacgattacactctactagtttttatcttctcatatgcatatttctcgtgatttttttttcagctgcttgttcaattcgttcggtttgtcaaaaattgcatacatttatcgaagcttagggttgccatctccttacctttcctcaacaactttgatattcaggcattcatctcagccaggcgcgtgttggttattagtaggtgagggattaagatatgcccaggatataggagttcatcgaagaggagtcaagaggtcgtcagatccagtagagaacgagcagttcaagcgaggattctggtggttcgttcatctgacccttctatctccgtcaaccagttcttggttctgacgcagagtagcgccgcctcacgctttcacagtctatacctacttgaacgggagttttcggcttttttaggacggccaatagctctagatcaagagtaagaatcggaatgtttcttgccctcgatagatccattgtttcgatatattgacgagatctctgcgttttatccacttttgatgcgaatctatcacgaacagtttcgacgtcggtttgccagcggaatgcgatgacgattattggcagacgggtgacccgttaactgctttcactcagccagccaatctgccttctttggtatcgtcattcgtgatgaatattaaacttcataaaatcttgtctgtagccttgactcagctagtacgttgatgccatctctctccctgccaccttcgcctatctcttctagatgatcagataccaaccgattttgctatctgtattactgttctcccagtacaacatcaaaccagtcagtcagcaatcaaagacccctgtggatgttgccgcagagctggacgagcaagcacacgaatggttgctctcggtacctgatcagtaagccgtatttgaaccatgcgcatgatagcaaggcaaaagtctaacaatgggtgtcttctgttgaaaattagtttgaaatggaatccagaccaaccggactcgatattttaccaacaatctgtcgacctccatctgaatttcaatatggtccttgtaagttctcctccagtttttttagtctgataatatggttctctttgtcgagctcatctctcttgtccattagacatatatacaccgaccattcctcccatctccaagagcgccagtatcaacatcagtcccatcgttcgtggcttgcatagcagctgctagtgctgctgcggacattatcgatagctattaccagaagatccgtgctccttaccccaatgtgttcaatgctgcctacgtgagtttgttttatctaaattctgtgtcgcatcttggacccctaaaaagaggacggtcagtaatgtgaagactcaattcattctttaattatgagatgattcttgtttcaacagactaccgcgctgattcttctcatcggatattggacggctcaaccgcttggcttgactgatgcggaccttacaatgaaaggtgtcgaccagtgtttgttttcactcgcagaaggcgagaaggtgtactttggagttggacgagctaggtgcgtttttttcaattgctttctttctaattgcttcctttttgtcggcaaaccccacaatatataacaaagcacagaaattcactcctaatgatgtaaacttgctccgcatctactattctatcaaacagagatgccatcactgtgttgagagctcctcggatagatagttcctccaacctgcagcctatgagatcagatggtaaacgtacgagcacatctgccccctctcataagcttgccgcctcccttaactcgtccgatctatccagaacttcctcccacttgaatgcgcctcttcgctcctctcatctgaaaggcctgactgccgagtctgctgaatcttccgatcagccttccttccaccagtccctctctgatcaaatactcaattcttcgtcatctgatacgggacagaaatctcgacacatagcatctgccgccttaagcacaacatccaatcctgctttcacccctccaatattctctccaggttcgacaggcagcatgtatcatggatcaacgccggacctaggccgaggtggagggccagcaggttctttccttggtgtatacccggacttcttcagttcgaacatggaaggcgaagatggttctgtggaccgaacgatgagcctcttcccatcaggagatgatccctgtttcatctctgatctctacccctcagaacccaatcggccggcccaaccatcggctccagccttggctccaactcagactcagtctcaaccccaagtccaacctttggagtcgccgcaaacagcagatcaacatcaccaaaaacatcacttacaaaccattctacactccacttcggtcggcgaccaatcttcatacagtcaagattctcttgaccctgctccatatagctctagcctgcattctatgcatcagcctcagtatcattatccattgcctccaccgccaccacatcagttgtataatcctccaccaagaacgctcaatcaactgaaccaaccgttggtctctcaacagatacaaagctcgaattccccggcacattggatgaattagacatctgatatctcaaactttggtagcttgtgatcgaaacttttaaaataatatatttgtcccattataacttccgatacgcgcttctccttgaatccggattgttatagactcgcgtctagccataaagatccccgccatttatatcacaaacaaggaagctgcggtggcgttagagatacatgttgaaaatagcgaacgagcgagccatagcagggcgaagatctgctcatagttttactttggctcagtaaaccagttgacacccaaaacgcctgtcgggaggcaaagggaaagaatcaggatacaagaggtggtatatgtcagacaaacatgttacgatagagatgcgtgatcgtcagggtgagaattgcttactaggttcatcgagagtctgcgaacgagacgtcgagtcgttcatgtcaaccaagcaaaaatcatcagttcttttatcatattggcagcagcaataatgaggataaaggaatgaaaagagagcatactccgtgctggtatccgagcagagtaagtcctccggggtcagtcgagaaattggttccagctgccaaagggaatccacaccaccgactatacgcattgagccccagtatcaaacaaaaaaaaaagcggagagaattattgtaacatgatcggaaggttaatttgtttcttgggtacttgcatgtttgaaagccacaaagaagaacacatacgcgataaagactcgactaaagtggccgtgagagacgatgcagatatccgcgctatctcagaaagaaacagaaaatctgagcttggttacttctccccatcttgtggcatggtagatatctttgtattgaccatgaagagcgatgaccagagtaaaatccagaaaaaaatagcaaacacgtacctttcagccaacgaccgtcgctccttctgggacaactcactcttcccctggcaccctctgtcctcagcctcccgatggatgtttctaatcttttcaatcaccctgtccactctatcttgcatctcctcggcagtctccccagcgtgcttgtcgtccgaggggcacctgcgcatattggaaaacagggttacacgacaaacaagctcgacttggttcagagaacccggaaagaaatgaactcggaacatacccatctcgccagatcttccatcctggtcgaatcttctggatctcatgagtgtgcagtccctcgaaagctccgtacctgtcatcagatttagggtatgaggaaatggacgattctttcgattcagtatcctcttcgaaaaaaattgacgtacttccattctccaacctcttcctgtgaattaaacaaggattcaagatgcatggatgtaagcttgcgcgcagaagtgaaatggtacaagatgaagactcgcgcgcaccgaagtctcccaatgtttgatgtcgaactcattcttgcagtgttcgaagagcaactcggccgtcttttgagctatgaatttagcgtttaatgcaggtccagtgtcagtttcatattctgaagggctaaagacagccgtaggcatctatggccaagacgcttgccagaaaggaataaagaatatacagacctcggactctaggactgacgattacgtgtgtcaatgtcttcggatcaatcaattctattgttgcgataaaagagaagaatgaattgaacgcaatggggttgatgaaaaaagaagtcagcacgattataccatctatacatatagttgcgatcaagtagatagagactgactcccaggtccggtgataagaggagcattgttcttcatgacggtctctccgttctgagttagaggtatatcagagactccggtctgtgtcgttgtggttcatatgtgaaaacatcgagtaagcaggagtcaggcaagagctttctattttgaggagatggttgcgtatcctaagaatcaggaaggctcacgtgtcgaccgttgattgaccattccgtctcacctgttgaatacgtcaaagtaaaacactcgagtttcaacacgataatttttacattccctcagagacaacagttaggataaatctcttaccgtgacctatatgactcaaggagtatcagagagagattgataggcgagagagagatatatgcccgaggatgccagaaagaattgagccaaagtcgagatgaaatggatgggatcagctctccttgcaagcattgattgttaagtatcagcagatagacatagaaatatcgaaccaacgtacggataaggtacactctaggcattcgaggagccatggttaatatatgtgttcgatggttgaggtagatgaaggaagcaaagagacaagatgacagacgagaaggttaggaaggagaaaatctccactctttttctaataaatctcgctctcttttcgtatgggccgttgtagtgattcgacgaatattctctaatgccttctgcaattgtacagtcatctctcacggcttaaagctcgtaagcttacctttctcatcaacaatcactacggcacatccatcttcctcgttcaatcttattcggctcgatactacactctatcatggatcacggagatcactcgggtcacaatatgccctcgatggctcagaaatgtactgtttgtattggactttccttgaattcatacttgctgtctttcgacagaactgattgaactcacagtttgatcttctattctcaaatctggcgttctttctggaaatttatgaattgacaacgtacgcagatgcacatgctattcaactggcaagtagaaggtatgcttcccaggaaagcatgtattcccgaattgattgttcatttgtctgatctctcaccttggtcttatcagatacttgcgtcgtctttagatcgtggcatatctcgaactggcttggaatggtcatgtcttggtaagaatcttttgttcttctcatccatagactcgcagtagtttcgactgtaccctgagaatgtattcctatcggtagcctggctatcattctaatcgctttgggctacgaatggacgaagcataagctcgctctctacgatcgtcgggtggcagcttccttatttccggcaagaacttctccaagtcgaacctcatctggaatgagctcgcctactcaagactcgcccacttatcctatcggatacgtgtaagttcgacatctctacaaagcttcttgtttgccttagccagttctcttcctggtcgatggtccgattgaatcgacttgcttttggtttgaatgatctccagtgtgggtatacctccgacagcccggttggttcgtgccacaggatatgctctatctgtttttatttcgttcttcctcatgctagtcttcatgacatacaatgtgagcgccgttcgtttgactgttctgttcctatcgatactgatcggtattttcaactgattcatacagggatatctcatcctggccaccgttgtgggagccggagtcggacactacgtttataaccaggacatggaacccctgtaagtcaatccgatcttgctctatatatttcttgctcgtattgcgtgctgacttgatctaacaaataccccagctccgtcttaaacccagcactttcctcttcaagtcttgcctgtcattaggtctttctttaagcaccccttcttctgcattacttcttcttcggattattccttcggcatcacagctattcattcaatactctgtagttgggatttgttatcttctgtccttttcggtagtagaattgtgtatgagatgtgttagtattttcaaaacgaaatgtttcgctaactcacggccgatggaatcatcggccccatcggcttcacccgtcttctatgaatttatggcctcggtatataactccatgacacttacacattcaactcgcaactctcaagtttcaaccaaactcttctctgtgcacggccaatcatgacacctacaataacaacaaaagcggcaatgtcgacagtatcagctgtgacctctgctgcgaagccagctcggaaggctatgcgttccggattgcagcgagaagtcctcaatctgttcaaaaagttcgttcgctttctcattccctccttcatcccctcttccgtcttttttcatccgtccgttctacattcagttttagctcggttccaatgtctatccagatcagactatgtacttctttccattcattcgctcatgtcttaaactccaccttcatgcagagcgatcaagattagcaaatcaaaaccgatcgaagcccaacctcagttccttttactctctagatggagctttcgtcatccggcgttgaccacacgagacgtggctgctatcgagcatcaagtacgtcttttgtttccttcacctccaccctggactgtcgacgtatcagaaagacacacttttgtcttgctgatgttgtcaagttctttccgaattgtcgacggacgaccgatcgatcgatcagatcaacgagctctctccagacgtcatgctgattcttctcttcttctttttttcttttgaaccttacgttgaaaatgaataaaccttatagattcgaaagggcacgagaacgctagaaatgctttcgtccccctcgatacgcaaagtcaacacgacagaagagatgaggacatggtgggaggattcgatcaggaaaaagtatacctagagcccttcctctagatccagagcgatggcgacaaccttgaacttggccaagatttctcgataggagaatggaaacttaacgatcgataaattccggatagatatatgtgtgtttgccttgtctgtgtttcttttttttcttttcaagtatatgtctccatcctgtcttggacaatcccatgaacgagggacatctcgcattcggccttgctcagtgccgcaagcaaagacagaatggcccattccaagacagcgtccatagaagcaaggatcattcagctacgacccatttcatacatatacaagagcagtctgtttggtcgtcagagaacagaaacattctgcatccgagtgaaactgccatatgaacgaagaccaaagagaaaagtctcaagagagaatagagagaaaacaaagagatcaaagaaagaagagagaggttccaccaataaaccaagacgagtagagcttgtctactcctcatcaaacgtctggtcggcctcagctccatcgtcctcctcctcctcttcaatcccctcggacaaaccggccttcttggcagcctcggcggaggcatagtccacagttgatcgggtcgatcgtcgggatgaagtaataattgctgaagggtcaatctcggaaaagtcctgtgaagatacaagatacgcatcgagtccgaggggcatgagtaaggtgaacaaggacgaggaaaccccagccttgtttggagggcaaaagaaacgataaatacctcctcatcttcatcatcctcatcatccatctcctcgtcatcatcctcatcatcatcctcatcatcgtcctcctctacgggaacctacattcgattatcgtccaaaacattcatccatgacgaacaaaaacaacgaaaaggcaaacgaaagtcacgggtatcagaaccagaagttttctttatgtcagaccatcagatcgatacattcttgacgcatatatgaacccaagttctgacaggtatcagcaaagagagattccgcccgtacctctgcagctttgcctttacctctaacactatcagtggcgttatccagagcaggagtctctccgacatcagaggtagggagagtagtagcgtttctgtcagatgccacaatgtatcagaagaaaaagcaagagagcggacgaatgggagaacaagttagggttttcttttgatcaagttgtttcgtgcctggccatattggcatgaactagaagggatcttctcatactccctttactataacatcgccgaaagtgagatgagaatgagaatacgcacttgatttcctcagacatggtttttgaataaatgatacgtaaagatcaagacggaaaagggtaatgaattgatgggaaggacgagagcaaggaaaagtgaggtggttggagatttgttgatcgagagatctttccggcgcgcaaaccgagagcacatgcccttcgacgcgttcacacaacaaccctaacactcgcaagctatcaatcggttcgtctattcatgcctgacgatcatcatacatccgcatacggatagttttcttacagaagtagataggtagacagaacaaagtaagacaggtaaaggaacggatgagaccggtcggtcaaataagagtaagatattcatgtccgcccatgaggtcatcatatgaagaaggtggggcaaatgagaaacaatgggcgagaaaagaacaagcagtgtcaagagcaaaggtgctatgttgagtgtagtattaagaaaatatgtgatgcaaaagaagtgcgctaccataggccacttgaggaaggacgaaaagaagacaaacatggaacaagtgatgcaggatgaacggaaggttaaaacagtgatggaagaataaatcccctttttcagcacaaagaaggcaagtttaaaaacgtacatgaagaacagaaagagggaagaacaaaatggtattaaatgtatacaccaatcgccgtagatcttttctaatggatacatcaactagctggatggcggtggtggcgacggtgttccctgatggtggtgattatcagcaaacgaggcgatgtgagaaaacgaaggtaaagctgtcgtgttgaactggcgaccagatgaatgagaattggaatggggcgaatgagggtgagaatgagaatgagatgggtcggcagtcggacctccctaattgataataaaacaaggatcaagatttcacatggactaccatcagtctcttttttgttcatgtcttactttcccaagaatatggaggcggggaaacgactcactacctggaacatcggattgatgtattccctttcggataaattactgctcgatatactaggcaactgtagactacttcccgataacgcatctatcgcgcccgtacccgcccccgcgcccgagtaccttccataaggatcgaacgaccctcttgacgaagacgatgcaagtgactggacggacgaataaccaagtcggtttcgatgtttgaaattcttgacgagttcactctcaacagaatccgacatgtgcggtaacgagtataattgtggggacgatgtcgagccttgtgaggaaactgagtaggcgtcagtaccatagccatgcccataaccgttgctatagccggaagcgagtgatgaagggtattctcttggtggccgggctggtcctggatcagaatcaatcgactgaaaggtgagcactgaaggtgactggaaggatgatgggccttttcctaaaccaagagatgacgtcgaatgatcatcatctccatcccgacgacgagatttatgtcggctcagcaaatctttcgacgacactccgggctgaagatgagagagagatcgagaatggttcgaacttgattgtgggaatgagtttgcgtgtgttagatgcgccggcgctgaaggtccggccggtggatgagcgccatacaccgacggtgattgtccatacccagtaccctccgagtgcttctctcctttctcaattaccccagccttgacagcatgcttgtgagaaacctcctgttcgaccaatcggtctctcttttgcatgactgcccgagcacgttctctggcagcagcagacgccgcctctcgtttcgcgagctcatactgttttgcctgtcgtttcgcttccttctgtgcggtctttggatcaagagttatatccccgctgctgatcgaggcatccgtcacgttcgagatcgattgggttcgttttagtgggacagagggtgacggtgcgaatccagaaggacccacacccggacctgtagctggttcctcaccaacagacgagagcccatgttcgtgcttcgaatcgttgtttcctccaaacacggacgccagaccaccccacttcttctttttcggtgccggaacggttggcagccctgtggctgccgtcgtcatagtcgctgaaggtgctgccttcgtcgccgttgctgtcacaggggcatgggctttcaaaggttgcaccattgacggcggctgcggcgacggcaacgggacagtctccgaacgtgtctgtattggggggatagattgatgcacctggccccttgtcgatgaactgaccgataacgacgacgtcgccagggttgcaggattcgagagaaggtcaacgttggctgaactggcgtagaagctggagttggctgtacttgtcgaaccattagaaagggcatagagttgggggtcacccgatgtggatttacagtatcctccgttggaaggttctccggcaggttggccataagactggctgttgctatgagtgtgacggtgttgctgagattgggaatgatgtggctgttggtgatgattggacggcacgtcggctggcgaagcaggctggggggtggtggaccagctcggagccgggttcaatccatgggcgggtaaacgtttaccatagctcgacaggtctgccgctggaagatccaacttcttcaactgatcgaccaaagccgaggcgccggttgttcgacggccgttcgccaaagaagaagacgtcagcgatcgatgatccaagcttggggactgatcgtaaggcgccctgggccccgcagaatgatgggaaatagaggacgacgacgaggagggcggaaggacaacaggcgaggtcggatctcggtattgagggaagaacagcgctctggaagggattggtgaaagtgagttggttgaggcctgaggggcgggtaaggtccggctggcggaagcaccatctaccaagctgagtggtaagttcgtcggcccgaccgacgggccgggggaatgatccgaatggggggtcgttcgggaggatgggtgcgatgggatcccggtttctacaatggtggaagccacatttgtcgacgatgcagccgacggaaggtatggttgatggtccgcattggatgggtttgacgatgacgggggagcatccggcatagcgggtatgaatggagtcgcctgaatctgggggacggtctgtcgaaagtatgcatgctcgaggcaggctcgtgcggtgattcgatggcgaggattataacgtagacattcggctatacaatcaatcaatgtcgatggagtggacgcatcgaagaacgaagaaaacaaaggcggtgacatctgaaagaaacacattgaaaatgaaatcggccttagtgttaccgagtcccgactgtaaactgaccacaattcaagactcacttttggaaagccaaaaccgacggcgtgtgccatcttgatccctcgatcccatgggcctcctcctctgatcttgccttgttcatcgaggccatactttctgctcggatcacccaaaattgcacaaatcttgtaaacctggtcgacctcggactggccgggaaagatcggctttaagttgacgatctctgctagaatggtaccgagggcccaaatatcgaccggcgggccgtattccctacttctgaggagaacctctggggctcggtaccacctggtcgagacatattcggtgtagggtggcttggagtcaatctctctggccagtccaaagtctgcaagcttgacgatgacgatgacgtcagtctctgtgcgtgtgcccggtggaaggggggtctccctgacgggaatgtagtcttgaagacctatggtggtgaccaacaggttttctggtttcatgtctcgatgaaaatagccggccgagtggatgtgatttaggccagagatgacctgatgaaagattgatgcgatcaacccgccagccatgggtcgaccccgcctggattttgtgagttggtaaagattgccctccatgcattcgaatacgaagtacagctctttagacggctgcagaaacgcgtcgtataatgggatgacgttaggatgtggcggaatgaaacgcagggactgtcgagagaaaaaaagatgaagaccgaagtttattacgtgcaggacgcaaagaaaaaaaaacaggttgtgagaaaacagagaactcccaacacccgagagaagaagaggaagagaagcacatgaggaacagacagacctctagttccttcagttttgctgcgtcctcccaacctcgttcccaaacccgtttcattcgtttgacggcgacaagtcgtttgccgacccattctggacgcgcgcctgctccgcattgcatcgggctgagagtggtgcctggtggaagaggcgagtgccagtcacatagccagaccgtaccgaacgaaccgtcgcctacgagtttcaccggagtatacgatcgtggggcgtctggaggattaatagatgggcgagtcaggaagaaagttcattgggttgttgatcaaagggaagagagggaagagagaagataatccaaagtaggaaccggtcaattcaaaatacacacaaccaccaagtgtagaagcaagagaaagcatcaaggatcaaagatcaaagacatggccctcggattgggcatcagaacgacttaccaggtggtaacactccccaagagtgtgtgctccttctggtttgtctcgaggaagagctctctctgtgtctccggcccgacaggttttcctcacccgaaaccgtcactgtcggattactcctgtggccgtcgggcaacgaagacagtggtagcgatggtggtggatgaggaaaagagggaagctggtaagaggaaggcagctggtgggcggaaggttgatgagaaggtagctgatgaggagagggctgatgtgatatagactgctggggagaaagaaccaaggatggggaggaggaagaggaggaggaggaatggtgatgggtttgatgggccagtcggccttcaggcacaggtggtgcgaggagggacgagttggaaggctgtctggcgtgtgtgtggtgaacgtgtgggttttggtgaagggtttgcctggatgaggatgtccagttgtcttctacgagggacatgtcctccacaggtcgatcctgaagatcaccacgcagagcaaggtaagccacggtagagagtagagcagacgcagaggagtagagtgaagaacgactgtttgtgggcgaaacaagagcagataggccaagactgatcccgatagaaagggaggagaatctaggcgtccagaaagtagttgatcgttcgtggtttctagtgttcgaggtgattaatatttggggttatgtatggcaaaggacgaaaaccagatggtcagctacgctttccacttgccgagtgtgagagaaagtcaagaaggattctaggccagagcttgctaagcaaacgaaaaggagagagaccagagactaaagaacggaagagagcagaaggagagagggagaaggagaaagagagagagagcaaaagaggtgctaagcacaagaacgggattcgcggctatagcctaaaacaaagagagaaaaaaacatcgcgtaaaccttctcgcgggtccggaatggatcgactaaagtgcgtgtgtcgtcacctctccttctttccctctctccccggatcaatcctcttttctattctaattctctctgtctttttgtctatctgcttttgtttcctttattaataataaaaagaacgactatgatccgagacgccaagtagaagtttgatgtgggttgaatctacccagacaaagagaactataggactacgaagaaggacaagccgaaaggatgaacagagatttcagactcaccaaagttgacaccaggattttcttgaaagcgaggatttttgtttttattttttaaaaaaggagcaagataatatagaaagttagaaggagagtgagaaagaaaagacgagagaataaagagagagagaatagagagagagatagtgagtgaggacgagaacgagaacgataaaaaggaggtgaatgtgagtgtaagtgtgaatgtgagtctggattcgggcgtaagttaagacgagggagaggagaggagacaacgcggaaacgaccgagtttcggcttgggtttacctgcgtctggtcgggtgagttccagaagggattgtggccggtgtgtgtcgtcgactttaccctcggcagcctcctcacaaggtttaagacgtacgcgagacgatgctaaaccctcggtgtttttaaggggcaggccgccagaggttaatgcgggcgtggtgtggacacagacactaaagacaccgaaggcatatacagagaggtaaatgggcgaagatagttattacgcggaaagaacgatcgattacgaaacgccggggaaaaaaggaagagtttagagagaaagtatacagtaagaagaagctgtcagacaaaaggcctcgaaagaaaatgacactagaatgaataccaatacaatggataacaaacaaaacagcgtggatgtaccggaagcgtcctcattgttgtagttctcgctttcccattgatcaacactcatgatagcacagccccgttcacccagtcacgattgtatccctcccagcttccgccgccacaaacgccacacattcatacacgcacacatgaacctctaagcctcagtcgcgcccccaaagcctggactgtcggtgtctgagctttcattgtccctggtccctttccagtgtcgcgttctctgtgtgtgacgcgattaaagttacaatctctttttagttttccagcgtcattcacctcttttgtgttttgcgttggaacccagctggcgccccttctttctttcggttcacgagactgcgcttacttttcacaatactctcgcgtctgtgtaggctgtcgtcgcttgagctcggaagaatagtaacctcgtctgttacggctgatctgactcatagctctgtccgaccatctctgtgtctcttttgtggaacacacagtcaatatggctaccggtttaaccatcgtattggtcctgttgctgtttccaatatctgtctatcttctggtctaccgaccaccgagatcttcgtcgcctagccctgcagctacatctacacattcaaacacccctcctgccactcttccagcgagactgttcagttctttccttcatccggccgaccaatttgaggacgaggacagaccgaaatggagtccaagtccagaagaccagctccgggtgagaaatctcttactacacaggcttcccccagagctcgttctgcccatcttgtcgattgcgcagtaccactcggtcatgtcgatcacccggaccgatctcgtcaacatcaggcgagttctctctctgtttgtatcttgtcttacatgttcccttgcccgaactgatcaccgaggccattgttcttctgcgtctctaggaacgcgagcgtacggtatctcgtatccgacccaattcctatacatggtcgtccagaagaaatcagacttgggatcagaggccgagaccagggctggagtgactttccgcaacattatggtccgtcttttcggtcaaggctgagcaacagtatccttgtcaccctttccgtctcccctctcccctctccgtctccctcctccctcttcgctgtgctggtttgtttctagctaaactggctgatttttctccatttcatacactcataggcacgtatgtaggtacatcctcatactaccaagtctgtctactgcgtagaaacccagatgggaactatcaaagccaagatcaaacagacttctggtcagaagatagcttgaccacctggtcagaagtcgaaaactccagacaaaccgttcagtataacgtccacgccggacaatacatcaaagctcatcatctcatcttctccaaacgtcagcctgaccaaccgttattgttagcagcccggcctggtgaccgaatcgcgctagtcagtaatcattcttttttgaaagagcctcgtccatcaagttatctgttcactcaatcccggaagtttcctttctttttgctcttctttctctctcccttttccggtagatcgcaacagcccaatacgtaggctgggaaaacagagtctcgtgcgtttccatcctatagctacctctgaagttaaactctcacgaactcttgcccattgacgaccctgatatgcagtgcggcaagaatagacgtctacctttctttctacaacggtcttgcgaactcatgaaaacaggcatacgattccggagtatctcacttgttttttgtattgtgtcctagtacttgtgtgtgtgccttcggtccttttccatctgctctgcgttcctcccattgccaatgcacgcgttcgaacgcatctttcccatcatttctttcttgtattcacctttaatcatcctcagcagagggagagactggttcatctgtgaacgttccgcctgtgttagtaacaactcggttgatactagacggaagcaaaccccgccatccaatccgatcgaagagcaggtcagcgagaggcgcagaaaacaaagctatgtctatgaataaagaaaacaagatgggcacaaactgatggacgagaggtcgggcaatggccatgactcgtaaaatctctttttgaaaatcgggctgggtgacctgttcgtctgtgtaactatgattataagacgcgtacagtatagatccaataaacgattcagtaaggggaaaatttaagccacgagagtaagaagaggatgagcgcactgtttgatcaccgctatacttcgaagcttcaataagtcgatctcagggtgatctttcgggtatcccataggtgccacttttagttccttcataaggccgggtaaacatcacataccaatcatcagggaaagattcaaagggagcacaggaaaaacgaaggaaagatgaaaacggggagagaagagagacaaacccgatcgcctccaaagacgttcctcctcctggatggcaatggcacctcaatcttttgccttttaccgcctttgttttcgtcctctgacgatgacacagcttccgtccctttcttcttgccctttgatttggctttcggctttggtttgagaaccgcgggaaggggggaaggctccccgaactcggcgacaaactctggggcagagatgatccggcgaaacgtttttggggcatctgccatcgactgtctactcacccgtatgaccaaaagtataatcgggattaagaaacccaactatcaggaacaaacacgcggggttgacaggcccactcggtaaagctcaccgaatcaatgcgagttcctctttcccaggctcccatacaccgacagccaagatcgactgatctcccggcttaactgtgtttggattggcaacatcaaaggggtggtcggcctcactaaaagagcttgcggagggtgaatctgatttcaaacgacttactagataggtggtagtgtccaaagatccctttcctacctgtcctagagagtgaaacactaaagttcttcctgtaaataccgagaagatgagaagatgaatggaaggataaagtttagatcagttggtgacaatctgtcggaaaggactatatagtttgtccgatcaaaaacatacttatatggagtcttgtcattggaaaaacgaactatctccagtatgattcatcaagtcagtctcacatgtccgtcctatcgcacgaatctgatctatcaaatggttctgaccgtctctatatatccggtgctatttatgatacataaacgaaacagggatccttttcatcaaattcggcgcaggttcctgaggtctcgacgaaaggaaggacaaaaaaacgcaacacgcacaatgatatccctagcgggcaggaaaggaatctcttgatcgatatccatgatgcctggtacaaggatatctacgaagtcgacaaactctttttgcgcctgtcgaaagacgggatcgtgtagtgcgaacctgacaagtacgttcagacgcgtaagcctgtgaatacccctatcagaaactttctcgcgacaaaccattgtcgatcgttattctctggaatggccaacttggctagaaacttcagagtatttctcgagatatgaccaggaggtactgtggtataggtgacacggagaaaaccacatgagacatagagaagaaatatataaaacacaacggaatgatgaaagatgatcctgttcaaaaattcgaaaccaacctagtccttttgtcggagctttggcgattcgaccgacaaccttgattccagtctcctcatctgtatcttggtctgccacatcagaactagaaccctcgtcatcagagccatcgtatgtatctccatccagagttttggatctcttgacctgtctcaacggcttgtgcttctttcgagccttgccgtcatccatatcggacgagtccggctcggatgaaatttctgttgaatcagattccactggtggaggaggtacgtctcgggcggcccgatgaggacgtttgagaactggtggatctggcatgatgagaaaacccaatggaatcacaataggtcgttgagcaaaaggatgatcgagctggtttgttggctgagtgttcgaaaaaatggggagatcagccccccccccgcaccacggaaacaaacgtcattgtatgattcgatatatttatgatagctcatcacataggtaacatttcgaacccttagtttgttcgaagcttcggctctattcctccatttgccttacaatcgctccgatatctatctcttctttctttcttcctccttctctctttttctcgacaactcttggatgcttgaacaaatctacatcgctcgtcatggcttccgacttagctggctcactaataattggacgacacccacaaaactcgcccgagatcctccactcgcagcttacggtttggaggttagtttccatcaagcagagctgaaggaatcggattaatctttcttgctgatcgcagtatatattcttgtcgatcgttccgttctctgggatgtgatctactctttgaatcaccagcaagccgctcgattagggacacacatggcgtctcctccagatggactggtcagtgctttgctctttcgcatatccttcaggattttcgtaaagtaaattcatctattctattcgttcctccttttcatcctttacagcccgttccagagcttctcttctcctctccattttacagatgcgttcagacctcactacctgtagctcaagcactcggtgtgcccatccgtttggagcatggtttgggagaatgggcgagttttggtcgttatctcttaagcttcgatatctcatccgacgggctgacattctctcactaccatatcgtatacagtactctcgaatacccgaaacacccccttataacttgcatcctcgtccatcagggccccgggagctgtctcagcattttcctgccgactctatttgcttggattatgattcgacatattacccatccagaaagggagagagcctctcggatctgttagaccgtgcatccaaattcttgatcgcgtttcttaatagaatagaggtacatccatgccattgcgttcaatccgtcatatttgtagcgatatctgaagttatgaagcaacgactaacgacaagcaacttcttatggggatttctcaattctaggtagagtttccttcggtcaaatcgatagttcttgtcggccatgccgcttccgtcattgctctcgggcgggcgcttgttggagatccttcgctcgagattgtcgctggatgtgcaagcttctgtcggtataaattaaaaaaaggaaataaaggcacggttggagattatgatattgcccagaatggagaggccggttatctagagaagggcgtggaacgtaactggacggtttgtctctaccatctgtactgatttcggtgcctgtcaggacgataacatccgatctgacatgttctcatttaacagtttgctgacgtggtgttaaatacagacggcgaagtcattgctgtgagcgaacccttctgtggtcttgttgatatgttgatttcactggataagagctcaagtttgattcatcccctcatcgataggatcccggagttcccggtacaagcgatcagaaagactatccatgtggaatcgcgcctggtaaggagcattacctgatgtctttatcgtctggatcatccttggtttcaagtgcattatagtctttcatcaagttttgaatacaaggattggaaaggagtcggaggttactgtgttatctattcagaaaaattattgttttgcaatcattcctactctcactcttgtctgaaagacatcaacagacatagacagaagatacagtctgtatgatcagagtatggagaaaggatacaacagacaaccaaaaccaacatagtcgacgaagctttgaactgtttccgtcatttgaagtgagcagagagataggtgatctacctaaatagaggttttgtgaccatgtgagccgtgtaaccatcaacctgcctggcagtaaccaatcttcctcaactaacgtccctcacccgttttcacttgtccaaccaactccacccaccaactcatctagtttcgttcgcttcggtcttcctcaactctttctttcttctatccaaagaacaaaatgtcttctgaactttgccctgtctatgctcccttcttcgtgagtatcgtctttctcgattggcattgcctctgttgttcccctcttttttccctttttgagaaaccatcaggggctgatcgatcgggcttacgcctcatccgttttttcttttctcatacaatccagggaaccatggtttgtgtttttgtttctctttggtctgtacgcagctacagatactcatactcttatctatcgtatttcaattcttttgtagggttgcaccgctgctattgtcttcacctgtacgtatcaacgttcttgaaaagatgggaagaaaaaaaagtggagatgggaatttagattacctgcagatctccagcttggctatcccctttgtctctatcgcatcctttaacccatcaggctacaagaagctgatccgcttgtttaatccgatatcttgtgcttgcgattgaacaggtatcggagccgcgtaagtcataatatctcacactggacgggagggatggttggatacggatggtggcgatcttgatgatcaggatcttgttgggttcgaggatcaactaaactccttctgtgttctgtgttctgctttccgtctgttgcagttatggaaccgctaagtctggagtcagttcttcgatctcctcatatgaatcgactgcgatgatggctaataatttctgtttgaacatgttttgcaccctcttcgtttgcttatcgtcaggttggaatttccgccatggctgtcctcagaccagatctgatgatgaagtgtgtggttcccgttattatggctggtattgttagtaatctcaatttatatagggaggatgtatctccgactatcgagcgtggcttgttcgtcggtgagacgtgatcggcatcatagatgaactaatttttgtattgattgtcgaactccaaccttgccatgacgacagatcgccatttacggacttgtcgtttctgtcttgatctctggtaacagtatgtctggggatacgcttcttgatagagtatctagaccgaaatatatactgaacatcatcgctaattcggtacgaacgttttgttagtcgcctcgcctatgtctctctacgctggattcatccagcttggagctggtctctctgtcggtttggccggtttggccgctgggttcgctatcggaatcgttggtgatgccggagtccgaggtaccgctcagcagcctaggttgttcgttggtatgatcttgattctcattgtacgtaaacttctttcttatacggcttgctcgagatttggctaccagaaacactattaaccagacaattccgcatacatctatcactagttcgctgaggtgctcggtctctacggtttgattgtcgcccttatccttaacacccgaaccagtgatgctcccaaggtatgttgacaatcgcagttattgactcttaggacgatagatttctgaccgcatttaccttacatgctacagtgcacctaattgacatcgctcatacaatggcttctacatgacgcgagggaaacggagaatggcagggcgatatggttggatacgtggtcttgttgttctctcttacgccgagctctgaagcaaattttcctttcgtagtttagatcctttgagtgatagttgtgaggaaagaatgccacgaggagagttgtttcttcgtatcttttctttccttctttttctcttcttcttgccattctttaccttatatcaattcgctgcatttttggttgccggaactgtgcactcattccctcttccaacctcacgcctgatattcaagacacagtgacatatctgtacactcagttcatttgttgatgtgtctaggaaataatgagagaagggtgataacggacatgttcttgagatggaccggaagtaccggattatagagaagtggttcaacagaggcaaggtccttgcacgtgtgaactaattgtctcttgaccttcacacaaatattctattatagatgagatattatcatctgctcatcttccatctctcagccactgtacaacccgacatacagcctcgaaggccttatctttcaagttcttcatggatgatcagtcgtgtatacctcgggctccaatcacagatgatcatgctcccgcagacactgcccctcacgctcagctggtttccagttcaggtctcgagcctcctcttgtggtagacaatcttactttaggtgatgaacttggctcagcatcatcactttttaaaaagcctccaacgaaacctaatcctgtattgggactcgttcgaaaaatcaaagacaagagttcgactcgacctccgatgggctcatcagaggcttctggtagaggagcagaaggaaaggacgaatgggtgatcgttcaggatgaggccaacgttcaacacgagatgaccgtcaatcaacagtttgcgcaggagacggacttgattcgtgagaaagatcaatctcgaagagaatcaataggcagtattaggcctggaggaggttgcgtgtcgtccccgtcgttcccaagctacttcccagatcatcaacaggctgttccagaagagcctccctctgctaaccctgaagccgattcacggcctggtttatctacttgtggggaaagtcctttggtctgttctccatcaaccgccgaacttcttccttctcatcgcattccgcccgaatccacgccagacatcacacccgcatctgcatctgcatctgctttagaaagtcacgatcatgtcgttgttcccccttcggaccaggccgtactcgatatcaatgctcctggtcgtcagtttgaacctcgccccagcctattacaaaattattctcagacaacagcatcgtcttctatgtcaagctctctaatgaccacggagggaacagtgccgagactcttgcaggagggagtttcaatgctcaaagtttcggccaagaaagttcagcagaccattttcaaactggatggcgacaaaggaactattgaatggccaagtaagaaggggggcgtcagtgagtatagttccttttctatcattcttgtctcgactgagaagagtatgcattcgctaaattagaaaaaaacgtcgtctttgatcttgcgcgctttttctaaacgtagtcgacattgaaagcatccgagagattcgtttgacaaactctgcccaatccttcatcgatcagttctcgtataccactcaactttcccctgcgcatgcctcgcgttggattacgatcatctatacttcaaccgctacttcgaacaataagctccttccttcctctccgacgacgtcttccggcacgtccgtcggaactctcaaatggaaagcacttcatctggtagcactcgattccaaatcgtttgccgagtggtccacagtacttcaatccctctgggatgccagaagggagctcatgggtggaattggaggactcggcagtggattaggcgaagggggctcgatagaagagaagcgtaaagctgtttggatgaagaaacaatggagacaggcagaggtagcaggagaagtcaagctcagaggtccatcaggtgagacggagagaaatggatggttggactttgagggcgttcttagaatatgccgaaggttaaatattgcaagtagtaggcgagatctgtatgcacggtttcaggtacagtccctatcttttgtggtggttcatcctcttctaattcactcgatctttgaaaatctattgaactctcgatttgtctttctataggaagcggatgttgacaaattaggacatctggactttgctagttttcagcgattcgttaaaaagttgaaagagcggaaggatatcgagagactacttggaagaattaccaatggggctggactagatgaacaggggtttcgacggttcctccgagaggagcaaaaagttcggttttcgtcaatctttggtcttctgatttgtatcatcgaggatcaaatcgaattgactttgcgtttcatttatacttcaggtagatcttcctccctccgagataacaactctctttcttcgctatgccgccgaaatacctgcggatagtacttcaacaacaaaccaacccctcatcttgttggaaggtcttacatcctttcttctgtcatcagacaatagtgtgatgtctgacagttcatcgaaagtatcgcacgacatgacgaggccattaccggaatattttgtttcgagctcgcataatacctacttgataggtcatcaactagtcggagacagcactgtcgaaggatacattcgagcgttgctccaaggatgtagaagtgtagaacgttagtcctctgttctcgagcttctctcctaactatagtactatgaactgataagacgagctcacatgtcgtttgttcatgcatctcgccaaagtcgattgttacgacggtgataatgagccggtagtctaccacggaaggacgctgaccagcaaagtgcctgttcgggatgtcgttcatgcaatcggcaaatatgcgtttgttgcctctccttaccctatcatcatctctgccgagattcattgcagcgtggaacaacaagatgcgctagtgcgaatacttaaagaggtactaggcatccgattcttgagtgaacccttgtctggatgggaagacgtggcgggcgtcctccctagtccggaagatctcaagcatagaatcttactcaaggtatgcttcagtctattgattcagcattcgttcgaactacagttctcttatgagacccgtgtctgtgttgtcaatcatgcaatttcaggcaaagattccgatccctaacgagaaagactcaaacgcggtcatcgacggtcctttgtctacggaaacggactcgacgagtacaaattcagaatcagggtttctagaaggtggtaagtacattttttcaagataacacagcgatctgcttcacgacaaagctctaattataacattttatcctttctttgaaggtttacgaaaggcttctgctcttgtctccggagtgaagcgccatgtatcccgtcgaaagagctcgagctctgataaaagatctcctccaccttcgagtaacacaaggccccaacactattcgctctcttcaaacgatcgatctactcttcctacagcacctcctctgaaggctgctaagcccaaattttcaccagcactcgctcaagttttgatctataccttgggcgtcaaatacagaggcttcaacaaaaaagaggtctatgatccttctcatatgatctctctttccgagcgcactgctaacaagatcctcaagcaaagctttcctgatgtcgtgaagcacaaccggacccatctgatgcggttgtatcctagtgttacgagattgggtagcagcaattatgatccaatccgatactgggcagctggagcacagctagtcactatcaactggcagagtataggttcgctcaatgctcttcatacatctcgtcaggttaggtagatcactgaccatgtatatctcacgttcggattacccgtagacactgcgtacatgctgaatggagctttgttcgctaagaacggacgcagcggatacgtcctaaagcctgctcctttaagaacaaaatctaaggatgatcaaccgaggatagaaaaattcgttcttcgaataaaagtatatccgttcttcgacccttgcccttcttctactattcctcagctatgtacacagcagagttaactctcgtttttggtcttatcatccgtttcctgagatcatatcggcccagcaacttccaagtttgggcgattcggatagacaccccaccatcgatccgtttgtcgaggtcaccgttttcttccctgatattcttcctgcgtcagcaagcacgtcagcccctttgtcaccaaatgtggtctcctcgtcctcttcagcgccactgcaacttccaaagtcatcctttaaagtgcgcactaagacagttgacgacaatggattcgatccggcatgggaagagaacctgactctgccgttccggtgcgctcaagacatgcttgatctggtgttcgtaaagtttgatgttcgaagagaaggcacagtagtcgatgcgatggatcagactatagcgtcgtattgtgtgtccctgggaagtatgaatcaaggttagtgtttcagctactgctcgttgtattaacgcattactttctcgcgctgttgcgggtttcgccctattcaattgctctgaagttgatcgaatgccatttattcgtacaggatatcggcatctgccactactggacaaacaactcaatcagttcttatttgcatcccttttcgtgcatctcaacttgagttctggataggcttttatagcagcatgttcgctctgctttgcactttacttcaatggcatatacatcattgcttgctctgccagttcaaccaaacatatcagaatctatctcgtgttctgcttctctactttcttcactctcatctcattgatcaagccattcttgaataatttatcatagtatatatatcatgcgcagaacaatatatattttctctaaaaacattaccacattagaaacagaagggataaagagttttgattgttggtagaagcgttacaacggctacatccgcgtctcacgcggctcgatcggctcagatctaccatctcaaaaacacattctgtctcgaacttcatcagagctgtcatgttcaaacacgtcttctccacttggagtggatctacaatctctctccgacctgtctgtctgcctcggtcttatcagctactcagacagtcatcaatccggttctactctactccttcggactcttccgctttagatgaaactccagatccccttcattaccacgtccttccttccgtctctcgagtcgcgctctccttcctctctacaccacctgccatacctacatcaagcaccattctaggctatcttcccctcagtttggcaaataaccaagatgtcgggctgaatgactttgaagagaacaaaccatttgtaggaaagctgcagcaggctgtgagagagtgtctggaagaaggggaggaaaggataagtgcagaagcttccggaagaggagaaggttgggtccatgtgtgtggtgaatatattccttggatctttaatctccgcgatggacgatttctaatgttgacacttcctgacttggatgtttggtttggtggacgatatttatgtgttgtagacgatcggaattaccccatgccttcccggaccggagagccagaagatctcatcggatcagtctatgttaaagatgggaaggtagggcacttagtcttcctcttattctatctatttctcttctttcgtctcacttttgttcgaagatatacgccgactgttgtgagtattgatgctaaccactcgaatacttcatactttatcaggtcgtcccatcaacttatcaaccgatgaactcatacagagtccttactaacaacggacctcctcaacctccaggaatgatgtctaagcttctccaggttctcgagagaacccacgaggaagagtcaaaatcagaatctaattaagatattctcatataaataccacgagtacatgcggatttggttcttatgatttcgtcgcagatagggtgtttggtctttagccttcctcgttgtcttcttagctttacgcatctgtctttcctcagattgttaatgtccaatggctgttagatgttcaaagccagagtagaacgcagtctttcaagcgattactccatattatccacctaaccgtagtgccggctacccattctcgattaagtgacgacagcccagacagcaaggattagagtcttctttcaaaccaagttctgtagtctgccaaagaaaacgctctttctcgttcaaagaacaatcaagacagtttccacagggtgagaaagcgatcagatacgtcccacagccccgatgtcgtccgtcggctactctgcaagcaaagaacgtcaagagtcaatccacttcatcgacggcctgccttggttcgtgagaaccaagagcaaaagaccgcatgtcctccgtgaaggggtgtgggtggagtatcagcatctcgctttatgtggtgtagctagtgtaaactagcaagaccagttatatctctatagaaatgaatcctgcagagtctgtagagtggagggaagacgcgtatcaaagcgagacaaggtcagctattgaaggaagaaagcgaaacccatagggggaggaaagtgaactaacgtggtcaatgaagaaaagcaaaactgattgggcagaaactgacgaatttataccctgggcggagggaggtccgagcgtcacgcacgtgacattcaaattcacgtgtttcgccagaactccgacaaggttcttgcggagagtacccatcctttttgtatcaaatatctcgttggcaatcattgacaaaagagagaagggcacaactggtacaactcttatatctgtaagaatagctgggtctgagattgatgtgaccttgaaacataactggtaggcgaaccatcatcaaaatatacatttctatagcacaattgaattctatttgatctcgttgacgaaactcaacacggccttctcgtttcgagcgccaactaaaggaggatgaacggtcagaaactggtttcgtctgcctcagcgcactaacgcttactagtttctatagagaacacttactaaatcggctgacctcctttcctttgcggaaagcaacgacagtaggaagtgaggcaatctgaacaggcaaattgatcgtctatttagtcttacaatgtcaatccaaggaacaagtaacaggtcaaaacacatgtaccttgtacttttgagcaacttccgtcagctcctccgtatccactgatgatgcatcatcagaattacgagtcagtgaccaaaaccatgaaaaaaatctagagaagcgacgaatactaaccagtcacaagatcacagtttgcttctgcattgtttgccaccttggtcaagataggcttgagcactgtgaagagaagaggaagtagtaacagaaagttagtaggtactcaattcagctcggtttttatagctacatgcaacgaatgacatactcttgcaaggtccgcaccaactgaaaagacatattcatcagacaaagtgaaaaaaactccttttcagcatactattcaatagataacgaccccttcttggcagatacatcgcttactcggcgtagaaatctacaaggacgactttgtccttattcgcgttgagcacttcagactcaaacgtcttgacgtcaacagaactgaagatagccgaccgaagaggtgtgaccgagaatgctcgcttgggggagccggcaaggttgttgcggagagatgatcggacagcgttcaacatgatgtaaagcaatgtggtggtggatagctgttggacgaatgtagaggttctaaaggcgatggagtgatgatgaatcaacacgtgatctaatttgcaattgttacgcttgcacagctttaaccctaacattccccaatttcaatctaccatcgtcctcctcacgttctgatgaacctatcggtcatctcgcactcattcgttgttgaatcctcttacgtcctcacgcctcggtagcttgtcaaccacactatggccttcgagatcccttctcacctgaggaaggctgtctcgacttcagatctagatgctgaagcctctctcaccccaccggcttcggttcatctcgaccggcttcttgctccgttgatcaatgagccgtgggacagcctaagcgcaaaacaggtggccacgcatctggatgtcgtcaggatggacattcaaagcactcaggcatgtctgttttttacctctatgtttttattctggccttctcggaagatctcgagaattcacaccgaggtgcatgtgggtttacatattgacttgtaatacttgatctgcttcttcttcccttctgatggacgcgttgaaatggtttttttagaaaagcattcatagtctggtcaccgaacgatacactcaagtgtctagtttgataaatggaagtgttaaagtcaataagagctcagcgatcctaaatgaaaagcttgagaagctggagtatgatgtagacggagatgaaacggtaggtacgcatcatctgtacagtgaatagattatctccgctcacctggttccatacccggttcaaacctgtcgttctcccagtcatccctcattcctcatttactcgagaccatcaagacacatgcccatattcaacatgacctttcccatgaatctcatcatcttcgctttctacaactactatcaacatacaagacgaccttctctcaacttttgtcgacccccgggccgagccttcctcgatcggtagccatctgtctagaatgttccaaacttttgaggagggaagaatggacatggactgattcgcgaggtgtccgtaggatggagtcactgagacaagatcttgaggagagattgagagttattaaggacagagtgagcgaacagcttggccgaatctttgagggtacctttgggttagattgggacgctgtgggtgggattggcgtgatacgcgttcaggagaacgatcaaggtatgtccgaccgagttatattcccaaagcggcctatgctacgatatgcacatcttgttgatcgttcgcgctacgttgtttctctaaaagtttctttccaagaattgatagattccctccacaccttggcgacactaccaactcttctgaatacgctggcccatcgaattttaaatcagatattcattcctctacttcaaactccagctttcatttcaccgtcttctgtgtccaaaataaactctcttcatcgagctttctcatcaagttactccaccgactcaaaactggccatttttcgattcatggtcaccaatgacagggctggttctattgctcattcgaatagctggacggaatgctcttccgcgcaacccatacttcagtctatgattggcttcctgtcgactgctttcccgtcgttcccttatagttcgaaagatacatctcccgatactactcgaaacatttcagaattgctcgcacccttgctctttccgttggtcgaaaggcaccatcttcaaccgtgtttgagcctgatagaatcaccactcgacctcccagcctttatccagatatgtgatgattttacgcgctgggaagccgaaacgaccggcggatcgagtaccgagttggcgactttcaagtcggatgtaggaatccggtgggctaagttgaaacgggccaaacttttggaagacgttcgggctgtcttggtccagccgaaaggccgaccgagtgaaggtggatggagcggctggacgtgggagaaagaagtgtgggtggatgagcatcaggtgctaggtaaagagaaaggatcagcagacaaaccagaaacccacttgttgggaatggaccatctatcgtcggcggcgacgatgacctccgccgagtcagtgttcccggaacccacggtatctctgccatcggatatagctccagccggagacggggatgacggctggggattcgatgaagatgatcagccgccggcggttaagacatctgttgtgagttcagtggaatcatcagcgttctccactgttgaagtcacatctcctgtggctgaagaggaagacgacgatggctgggggtttggcgagacgacgcctcctcctgcgccggctgctgtgctagctccctcgacagaagaaaatgatgatgaagaggacgcctgggggttcaactctgataccgaacgctcccaccaagaatctagcgttccttcctttactaaaaagacctcgacggctgtacccaggcaggctaaacgactcgagcgcgtacaagcaaagtttagtgggtccaatttaggagagatcggtcgatcgttatcggctggttcgacaacatcttcagcgcaccggcgggtaagttttggctcaggatccggttcgaccgccgacgtatccgaaggagctgagcaagatctggtgtcacggcctaggggtcggggaggaatgaagttgggtagaaaggtctctgggactgtgatcggttcgaattctaggcaaccctcggtctcgtcatcggccatggatgtgtctgatcaggcggacttttccgagccatcaccagcgccgatgaggaatgagatttcgatggatggtcaagaatcggcgcaccctgaaggaccgaggttgatcaaagaacggtatgtagtaagcgagaggatgaaagagctcgtgaggtttgtggagaagctggttcggatggccgaggagctatcttctgtcgagtacgtctttctttttgtactcaaactttattgaaagcatcttgcgcctactgatgtctgtatacttggccgtttctagaactaaatctctctcaatctcgtcttcttcatccgagacgttgatgcgatcaatttcagacgtcctgtctctctaccgagcgatcatcccagtggcacacacttctctcatcgagtcctcacccgggctggggatgcaagctgtgaacgatacggaatacctggcgagcatgatcgaacatctcccgcttggccgaggagaggctggaaaggacgatctggtgaaagttctgaggatgtctggtcagagatggttggacgtgatcatcgttcgtgtcattcccttctcttctttctctcctcattgcacgatcaattttggagcgatttgatcttaagtccagctcggccaccttgtccgttatcctctcctttgctaacaggatcgacaacggacggcgttgaacacgatactcgatggagctggtcggtttacagacatcagtctcgaaaaccgggcgactcagagtgaccgtgcgatttcactaatcatcgaccggatgacggaactatcgactgtttggaagccgctggtcccgttggatcgagcattcgtcgttctaggaatcttactgaatgaagtgctggacaggatcttgcgggagatcattgggctggacgacataacgaccaaggagagtgagcgcttgaatgcgctttgcaaatccctccatccgctagagtcaatcttttgctcgtactctgatgagggcaccggtgggtcgccatccgcggtggtctcgtacgtaccgaaatggttgaagttctgctatttgtccgagatcctggaggcctcattggcggacataacgtacctattcgagaccggtggattggtcgatttcgaaaaggccgaactggtctctctgctgagggcgttgtttagtgatacgtcattgagagcaaagaccatcgacttggtgcttggtgatttggccgggaagtagctgagtgttcgaggagaggacgacgtcgcggtccagtagtgtactcataaactcatgaggtcttgatgttttccgtaaaatacgaaaagataaaaccctcaaaagccacacaggaacaagaaaaaattgagagtgagagaagaacgcatgataatatgtgtatagagatgcatgcttagaggaataaatggctgaaagcgcgccggccgttgccactgtaatggatcaagaaaaagcaggatagagagcttaagaaaagaaaaagtacaaggttttgtttggggcgagggaactatccgtagaagagatcatagccgagggaaagagagaagcaaggagggcatcagaccaggtgaaagagacaaggaaaagcgacagagagcaacccggaccaatccagagatcgtgtgttgattgggcagggatgggcaagactcgaggctcgagatgactacaaactaggatggaggaatagtctagagagagagacaaggacgagaggacaaggagaacatgctggagtgctatgcactagacgtaggtctacaacttggagaaccatagtaaaacattctgtgaaaatgaagagaaaagcaagggagttggaaaaaaaggaaggacggcggaagcgagaaccaacaagaaagagaacagtaaaataacagagaacagagagggtcgggagaagaagaggaaagagaaaggaaaggaaagaaaggagatgaaagaactgagagatagacgcctcaattggagctcaagaagggcaaaccctcatcagattcatcatctttgacctcgaaccgactgctggtcgagacgggctggcattcggcagcaatccggaaagcgccgacaatggcaaccacggaggcatagatagcgtcttcggaaaacacagaaagaaacatattgagggtcaggaatggacggctcgatggataggagcaaacgtatgggacacaaagaagatgatatctcacaggaaggcacgatcgcccaaggggcattaagtccgacaaactctccccagtagaagatccattccggtcgactgacagcctttacacttccaccaacccactcatcgacgatggggatagcatagtagaggatgagaccgtatagctggccaagggagacaatcatctgggtagggtgtctatagggcgactttgcggggatcatgtagagcgcgagagcgatgcagagcggtccccagacgagctttgaaaggaaagaaggacaaggaaaggaagggatatcagaggggttcatgcgcatttgaccagatggatacaaccaaagatgaagaactcacggcggtgcaaccttccatgatgtacacgaacgggtcactcatgatgtaccgagaatccgagagagctaagtgtggcaagggttaattagcacaggcacaagaagggggcacacaaggaatagagaccgagacgaacaatacatcttccacatctgtgcttctatccagtttgaaccggccatcgagctgtggaacgcagcatagtagcctaggcaagacggaaacacaagaaccaaccaaccgttcgacgtccaacggaagaaagagcgaaacatatattcagcatgtggtcgagcggaggatgtgaacacatgcttgatacataccttcaaaggtgatatggataatgcctgagccggcgaaccacatggcccaccaccattctgatgacgggagcggtctctgtcggaccgactttcgtttggtgataaaccatgagaccgcaccaagccaagcggccagaacgaagaaaaagacaaggagaaggacgattggatggatcgtgtttgggcgatagtctgggatgaggatggcaactgggtagaatgggtggagcgcggtggtagtagtggcggtggtggcggtggtagcgttcatggtgaggccggtagaaggggttgagatggaatctaggaacaaggcacgacggaaggcacgatcgagaggaacagtcataaacaggaaaggaggatggtcgagaagaaagaaggatgaagagatggaaaacgatagacgagggaaataaaaggaaagaacagatggagggaccaaacaggtgaaaggtaagtgccaaatgagggagcaggtcaaattaagcaggcacgcacctggacacctgggcacacaggcacccgcctgggtacccacactaccagacaacacaaggcaccaaaagacccggcgcccaatcagatccggttcaaatccctctggcccgatgggtgtaataaagaaatgagatggagtatgagacgtttaacgtggggaagggcggcttgatttagtcagtcggtcgatcgatctaggcaggcagtctcaatcgtgcctggctggccctggctcgcagtagcagcagctgctgccgccgctgctggtcccattccttttgttgcctttatgccgccattcttctgtcgccgtagcctgtgtagcccggggcgatcagatcgcccgggttctccacatcgaagagaacgggtgatgtaaggcagtcatcagtgcgatatggcgtggctgcgcagaattacgcgcacaatctcaatccaaactcctcgcgtacggcctgggcctataaacccgaccgggccgattgtgttgggtcttttcaccttacccgcccccccgagagattgtggtgaatgaaccgggccgagaggatatctgtagttatatgaatgtttaatgattcgcaaatttaggctttattactaactaagcttgaatcgtcgttacggctagtaaccgtagccatatccgtgcccctcaactccctccctcctctctttcttcggcaccttctccctcgctccctcgctccgtcctacctacctaccaaccatccccgggcgttcaaccgtacgggcaaaccagtgatcttatcgaccgacataccctgtatctcatctgcataacttatagtgtcgtcatatagaaacatacgcacatattctcaagttcacatacatacacgctctcatcttgaatcagcaatcttggtagtcctcgcttccgtgccagtcggcttcgaatggtttctcccaacacctcaatctcctctccctcctcatcttcatccgcgcctaccgcaagggctgctcggagtagaagagaccgtccatgtgatgcctggcaagtcctcggctttacttgtcttcctctctattctcgttgttcgctctcgttcttgcatccttttgttcatcataccctccctaagtctttctatgctcttggctaatccgatatgtctcctggtcaacccttctctcatagtcgagcagcaaagaggagatgtttcaagtttgcgaacgagccctgtgtggcctgcaagtctagtctccaggcctgtctgttcgaaaacccaccgaacaaacgtccgaggacagtacatccgacaacaggtccggaagatctgtcagataaagagccgaccgtttcatatgccgacccagacgcacaaaagtccaccccgaagaattctcacaagcatctgatcaatagtttcagtccagatacaaattcccgtcctctcctttctcgtctgtcatcgtcatcctcttccgtaaaccatctggttccggattcatcctccggacaagatagacgtcgtccaggccggtcagacgatccatcggctctcggcccgcccaccgacaacaccggtcctctcccgcctatcatttcccaaggagaattagaaggcccaggccgcaaaagctcgaatggatccagccttctcccttcgagctactatcctcctccgatgatgactgggtacattactccgatatcacacccacccactctgcctgttcatcgcaaacccagtctaccactccctccaatctcaagtccaaggagcttttcggaatctactcagcgcccatccaaagacatctcctatcgggtcagtctctttactcttatcttgttcgtcattggtttgtctatccaagcctaagtcgtccctcttacacacacacacaggatatccacccggttgctccttcattctcccaccctagtgcccaggggccactagcaagaatccttaacagagtaagactaggtggttctgattatgaccattctgaacggacaacttcagaagccaggtttgagcagtcgtcttctcatatttcccacctttcttccgtatgtactctttcatcttgccttttgctctagatttaagtcttctctgtcacaattctaacccttctattgatctttactcttttcctcccttcaaaaggccgactcacctcctcttagcaatgatccgactggatccgaatccgcgctctccaagccgattctcgattcgtcccgtttagctagctcagaacaacactttgcctcctatcaatctgaagacgatccctctcttcttgcccttccctccgattccgctccttcggtggctgccagtccggcagacgggacaagtactatccgccaggttgccggcattcgtgatcatccgaacggcaagcagagtcgcatctttttcgtcagccggccgacgttgccctatccaagatcgagaaccggtaagggtgtcctcctcgacgggaccggtcgtggtgcaaaaactggcagcaaccaaagcccggacggcgaggaagtagacggtggcgaggttcactatccggaccctcactttttaagggcactcgaatatctagagggtagctctccaggaagaattttggacgtgtatgttcaattaatttttcatctctctcttctccttgttggcctcagcgccgatgcgttgtcatccgttgaaattcatgattcttcttacgcccacgtctgttttgacttggcgctcatcgactcctcttccatgaatcacctgaagatacatcgctcttaccctcccagctatgccgttcatcaaccttcatcgtctgagaaactgtctgacgactttgccgccgactgcattcacttatccgagtagaacgctcaccggcatcttagcctctacggtcatgtatgatcccaacctcagagggctatacaacaaaatctggccagagctctacgaaggtctgacggcagagtacttacagccccgactccaaacgttgcagctcaccctgatagatctcacctcgagaccagacgtcaatccgggtgggaattctatttccatcgctcgagctatcggagctgcccaactgttaggtctccatctggattgctccgactggaatctgcccaaatgggaaaagtgtttgagaaaaagactttggtggggactttttgtcgtagacaaggtacttctggtcttctccttctttctctcgttctcttcattcgtctgagctcactctcgtacatcgtctgacttgatattgcactggccatcgacagtggtatgtttcaatcgacctacgcatccgtttgtccattttagttgaccatttaataatcttgctcccgattttattaggatctcactgtaccaaggtcgaccatctcatatccatccatcgaactgcgatgtgccccttctaaacctagacgacttcgatccacctttcaatccggatactttgaatgtcggcagtccatacgacgccccatcaactcctggctcccaggcaaacagcgtgacgttctcccgagaagccaaagattcggccgactcgtttagagcgctttgctcactctccatcatcctcgatcacatgctcgaagaattcttcaccgtcaaggcacaaagcatgttgtttacgaatagatccagcagaaaggcaaacagagtcacccggttaaggatcattgagagctttggcggtgatcttgatagatttgaacgagatttgccttacagccttcgtctggcaaggcaagatgagcctaacttcgagcctgccacaggtgttagtaagtgaaacatgtccccctctttgtctcttgctgatcaccggactgataatgtaaaaacaaccatccacgatcggttccagaatctctacagctcgcttacctgggcctcactatcgttcttggtcggctcacggccgacctgtttgatccggaggatgaagcggacagagaggacgtcgcgagggtaatcgaatccgggctggaccttgttgagaacgtggtgcgctttaccgagcgtctgaccctacgggacgtaaactctttctggattagttgtgagtcccttctttgcacctggatgggactaatgcctttgttttgtactctatttactttggctgagtcttttttctttttttttcttcgcatactcttacagttacatcataccatctatccaacacactgtcccttctgatccgctgcgtgctcgcgtcaaaaaagatttttcttgagagccagttcgaacggtcaatccccttattacgtcgattcatcgccaccttaacgacacaccaccaggctcctggattctgggatccagccgagcgtgccttggcgaaactcatgtaggtcgtgtctctacctgacattttggttatatcgttctcacaaacactcaatgcctgacacctttttttctctttctcctctctcttgcccttaggtcgttgatgccgagtgtgagcaagcttgttcccgaggtcggcgccatctggagagtcttttcagatcaaatctggcatcaaatgtgtaccagcccgtgcgtgcatgttctatcttttgtccctgaattataccatcagctcgttctcacccttaatgcctttcccacgttcttctattgtaaagaacgtctgacgtgttgatagcatctatccctgtccctgcgccttcgaccgatactcctgttccggtcgacaacacctgggcttccaacctagagacagcttcagacggagtcactctgactgataacgaaacgccccaatcaaaccaagccccattctccttaggagttgatccacaagaacttcctgtaacggatgcgttgttcagtaagtgttcgagcctcttcaaatgctcaactcgaaagtactagttaaaaacaggttcatcttttcttctctattcacccttgataggctcccttccaatttggtcgaacacatcgaacgagaactcgacagcttccacatccagaccaaatttgacggcgaccacggcccggccgtcgaaggatgatattccagcggatcacgatcaggcgttcgagaccatcattggagaggaagatctttgggccgggttgggtaatgtcgaggggttcacatggatgcaactcgggttcgagggctaaatttatttatttcctttccttttcccccccttcttgaagggtgagtttctttcggttcagtttagatttccgacatacataaatttatatcacttttgccaaaacgtttctcccaaatatatctagttcatcaatatcagtcgccatatagacttttcttgatcgttaatgcagaacagaacatgatgagcaagagaatcagataagtagatcagggagagtgtcacgaagaaatcaaactcataaaccatcttagtcatagtcatgttcagagcttggaagaacaaataagagccggaaactcggtgaagtgatcgtgaactctgatcaaacgatggttaaccagaccgaaggaacgggacaaaaggttgtatcagtacgcggttcgtcaaggtttgtgattggaatcaagagaacgtacagtgttgtcacgttctgtacggacgcattaaaatttccaagaaaacaacatcaaggccgcatcaacaacagtaacgaaatatcctacttcgagatatcaagaagaaaaaaaactaaagagagagaggggaacggtatatgtacgaacctgtgcgatcccccaagaggattgatatcccgctggaccaattccatctatgccgttgtccgacatcgtcccgtacacatgatcacagatcagtaactacctctcctaacatttcttcaatgatatcgcggcggcatgacgtacaagcatgaacgagtccgatgggcctagaggccttttcagtgagagacgagctctctgtcatcttccacggcgcagccggcgagcgatgtggaacgtgaacaatctctctttcgactcttgctcctccttttctggatggtctcagaccgctttgtatccgttatatagtcgtaggggagggaaaacgataagccgagatggacttcaaaggttctttatgagagaaaagatagaaaaggcctacacgttgtgccgaagtacagggatattttcccacccttgcccttcatatcagaaaaaagaatcagattagaaggcatagaaggaggctatcaaccaaacagcccaattctaggtatgtttttcgaagaattgtgaatatttaccatgcgataactctgggcaaagtgcatacgctcgcttcaagattgtttctgcccgatcaacatgcacgctgaggtcccaagaacccacttcctgacagcctcccagaacgacatttccatctggtcgagggatgatatctgtagttgttgtttaattttttgaggtatgtcataggacctgttaagttacaaaattcaagctggtctcggttaagcaaatctcacgttgaatcactcacagcacgatccatcagtgtaccctatccaatcaacgagcatcagtggtggtcagtgatatatgcaatattagacgatagatctttcatgtctcacctttgatgcccatatctgttttcacatggggagccctcacaagacagacttgtcctctgcaaacaatgtttatatgtaagactcttaccatcaacacgaaatttcaagcgctcacacggcaaggcgcaaacggacgtaccggatgggttcgacatcctgatcaagcactcctcccagactcttagcgcctatcatatcctcaaacccaatcaaagaatatgctcctgaccgatcagatttatacatataacgagatgaggatcgatagagacttaccgagacctgtacagttgaccactacgtcagccttggcgacacctggcataccattggctgcctccgagatactctccactcttcgccttatcaatttgacgccggccagccgaagttgatcctcgagccagggaagatatgtcgctggtgctagcgatagaatctgttttcatgataaatctagacgggttaggattcggcgagtagcttggagccgaaattatcaaggggcgtaaacgtacagtcgaagcacatcctgatttaactcctctacagcatagatcgtttcaaaaggtgagttaatctggagctaggataaaacagataaatgatacatactctggaagctcttccttcgggatcactcgaaactaagtcgagcaagacgatgagcatcagagatcagggtcagtgactttcttttcgagactggaaacaccttcacttcaaatattcacatcttcgaccagatcccgataccattccgcctcaatgtcatccgatacatcttcgagaaagtatctctttgagggaatcttcatcactagaccggtagggatgagtgacttgagtttgagactgatggttttcaattcacatgtcaaccgataggaaggagctttatctgaaggacgataataagactcactaagtggcctcctcccaagcgtttgttcggaggtcgttccagaactggaacaaattgccgtttgaatattgataagctttcatggcgccgaaacaagagaatacagtcaaacgacacctacactatgccagttggcgccagcccatggactggcaaacccctgagaatcaaggtcggttggtaaatctctagcgacaatagtgacctctgtgcatcgaaaatattgtgattggcatctctttttgaaagccgatcatagaaaaaaattatcggcattaaaataggctgtaccgtatccttccttggacaagcagagggcagaagtgcatcccagaacgcctgctccgatcactgtgtactggtacgaggaaaaggtcagtataagttgaagaaagcaggaaagatgatccgaatagttcgcaaacggcaggttacactgaccaactacgtgctttgacattttacgatatcggcaaatcctactttatcagcttttgtgtgtgtgtgttcttacctattccggcgttgatggctgcaagaagagaagattgagttgtagacgaagaggagcagggcagcgaatgtacgagctagtcgaatttgaaaataatcagatttggccgaggccaacgagacaacccaattctcatccacaaccgttcttctctatgcatgtttgtggccacatcaaacaacaacatataagatatacatcaccacattttgtactgtactggccttcttgctgaagatgagacaaatcaggaaggatggatgacggccaatcttacagaaagtgtcgtgtaagctgtttacacaccctgagagacaatacagttcgatacgcatcttcgttctatttctactacatactcaacgatggcatgtccgatgaaatagcgactcataccagggagcgttgacccagtgatgtgtatcttgactgatcacgtatctcgctgcttcatctgctccgtcgctgacggatctctagacgttgccggtcgtcgttctgtcctatcggacttgcccgatgtttttctttatctatagttttccagtttccagtttccacttcttcaccttctcttccaaccatcatcggtcatcctttctttcttcttttctcctttccgtacacacaatggaaaacaatgagagaacaccccttctcatacccgtgggtgcagcagctgtggatgcatcagctgctgttcccggagatctgtcaaaaacccgcttccggctactcatggccggactctggacaatgacttttgtggctgccttgtaagtttaccttaacgaccactacttgttgtctgctgcatcgttcgcagcttatcctcccttgactcttgcccgggcagagatggtactatcgttgccacccttgtatcaagtattggctccagtttttctgcaatggagagtgcaggctggatcggtacttgtgagcgttatcttttggctgctcttcttatctttctcttcttgacggagtctaatccattttttcgagaatatatctagcatatctactggccagttgttgcttcactcccctatatggacgactgtgtgatatatttgggcgaaagggaagtattgtgctggccggaagtcttttcgcaagtggaacgctcctctgcggcctggcagcaaacatgttcgtcctccgtccacggttatctcttatcgctagaccgccatccactctttgcttcgtccagtctaaggctatacctgactaagcatacatgctctgatgatgatatcaggaaacaattgatagtctttaggttcctcgccggtatgggtggaggtggcttcgcggttgttggttctgtcatcgtctcggatatcattcccctcaaacagagaggactctatcagggtgagctaacagctcagttcgaaacgcgttggtccagaaagtccataggactcatagtttcaccacttgtgccacacagggtacaccaatttgctctttgggcttggaggagctcttggagcgcctttagggggattcatcagtgatactattggatggtttgttcccttcgatatgtgttccactttattcgctgacaaaacaatgacaaccaaacaaagaatatgcgtgaactaaacgcaatctattacatgttcgatatcgttgcttgataggcgagcggccttcttaggtcaaatgcctcttctcatctcagcggtcagcgtcatctttttcaacacgaaggagcctgcctcgtaccttagcaacaagacctctaccgctgagaagctcaagaagatcgactatcttggaagtttcactttggtcacctctgttggaagtctctgcctagcgttgagcctcaagaccaaaggtttggcgaaatggagtgatggcagtatctgggggatgcttctaactaggtcagttgacttttcaattactcacctgatactcatgaagaatatttttaacctttcacttttcttcttcagtgcggtgtccatggtcgctttcgtacttgttgaatggaagtttgctgttcagccagttttgcctatgggtcttcttggccaggttcgtgcatatcaaaaatccttcgatcacgccatacactcttttgattgattctgcacttgccttctctgggtgatctctacagcgaactgctttgttctcccttatcgttcgttcgagatggtttctgattctatatgagataagatcactcttaactcactttcttatccatctgaattgtactttgctttgtcacagaccaatttccttcttgcggtcgtgacattctctattgtgagtagacttttttctcggtctcttcaaatctaacggctccagctgatgctgggacctggatatttaaaatccttcatcgaatagctttacaatatacctctagtgagtgtcaaagttaacctcagatccaatgaacagaccttatcattcttactcgacatgcttccactctgttttcattagttctttactgccgttcgacttacctcgaatgccgctgctggcgcgcacttgatcaccaactcggcttcagtctgcttcggatcgctcggtgccggatggtacatgcgccacaccggaaagtattggaagctgcagctgattgctgcactaggcccattgttctcgaccatcgttttggcgaccgtgtggtgagaatacagtcggtttcttcttcccgctcaagtctgtccatcgttaacctctttccaacacattttgttacagggattacaacactccggagtggattctcaacaccactcttattcctgctgtgagttgtgattcaaatgatttttttcctttcctcttgacatgtcactcaatcataattgctacatatctgaaattttcagggattgggattctcgtgtgtgattaccactactttgctggcattgatctctagtgtcgagagggagaatattcctgttgctactggaagtaagtgatcgtcttggtttatccgtgatctcgaaaacaagaagaaaacgtctatcgttgaaaggtagaggctgaatggattcaattgtctatgttacctcttcaaagtgtcttacctgtcccgaacgaccggtcaagtcatcggagtttctctctccgccactgcctctcaagcgatccttgagaagagtcttcgatcaaagatcactggtgaaggttcaacacaggtacgtccctccgtcatttcgctatttcggaccagtacctctacatgatctctttgacgatacatctgacgcccccttttctcctttctttgttcttgtacatcaaataatgtccttggtgtagatcatcaatgacattctgcactctatcgattacattcgagaactcccagcggagttgcaacaaatggcaactgatagttgggcgaccagtcttcgatacatctttgtctctcaagctgttcgtctcgaatgttccctattctcttctctcttggatgttacgaaaggtgaggagatagttactgacatagagttcacaacggcctgcgcgtttcttttgtctgtcatggcattcagatcttgtccttcatctgtcagtcttgttattcatgttggctacataaagagcttgcacgaaaactgactcttcttcgtccgctgtctcacattcaaatagtgctcgtctgtcttctcccaatccgggaacaccccctacctgattcggtggacaacagtacgcccactcagccatctactcccgttgaggagcgtgcttgaacgatgcaggcttgtactgggccaaaccgcttcatagcagttcaatgtaaaatatcgtatttcattcgaatgggagaagaagaaaccactcctagagctgggcgagcgtcacatcagtggacggatgaatatggtgtaaggtgtaaggtttgatcttttatcattatagatgcttatgccccatgaaactttatataaacaaaacaagaagaggaagatgcaaaagagcagcccaaatgtaaggaacgaaagatgtgacttagagcctctggatgacgacagcagtagcggctcctccctgtttttttaatgatgcaaactttgtcagcttcactcttacgtctgagaggagacattgagaaagacggaaagaacgtactccgttgcagataccggcaacaccgatctgtccgggctgaagagcatgaacaagggagacaacaattcggcatccagacgatccgatcggctacaaacaaaagagaggacgaaatatgaatggctgtgcgataatgagtatctttgcgagagagacaggatggatacgtacgtgaccaagagcgacacctcctccgttgacctggttggaatagcaatgattcaaattgatagatgctttagtaaataaaacatctgacaccttcagaaagataagtcgtaacttacgttcaacttggagggatcaatgttgaggatcttctcggcagcccgggcaacgacggagaaagcctcgttgatctcgtagagcgcgacatcgtcagcagagacaccggcgtttttcaaagcgatggggatagcaacggtaggggcgatggggaactcgataggagcgatggcagcgtcggcaaaccctggaagaacgagcatacaaggacgatgagcgagttgaatcatgaagcgagggtatgagccatgaaagtttctgcgaaaggagaagaagacactaaccaaggatcttggccataggcttgactccgtgctcctgaaccttctctccggtcatcaaaacgacagcactggcaccgtcgttgatacccgaggcgttggcaggagtgatggttccaccctctcgctggaacacaggcttcaaggtgggaacctttgagggaatgaccttcttgtagtcctcatcctcagccacaacggtctcgcccttggggcccttgagggtgaccggagcgatctcggcctcgaacttgccagtagaccaggcctcggctgctcgtcggtaagactcgagcgcgtgctcgtcctgagactctcgagagatcgagaacttggcagcaatgtgctcggcgcagttacccatggggaagttgttggatacatcccaaagaccatcggtctggacagagtccttagtctggaaacctccaaagccagggacagttcggggaacgaggaaactgtttttgttgttgtcggcggtcaaggcatagcatgagatcaactgagattcgagaaggataaaggccaaatagaccaatggctttacaattaaaataaaaaaccggcactcacggagcgttggacatgctctccattccaccggcaacgacgactccccttttctgggaacctccgaaaccaccaagcatcatgccctgagcggccaaggtgatggccttcataccagaagcgcagaccttgttgatggtagtagaatcggtcgaagcctcgcatccggcggcgagggcgacttgtcgagcgggagactgtccggctccggcttgaatgacctagaccaggaccggcagtgagtttgatcagctcggatttccatctcacagacgtttctgctaaagggaaggggagggtagtaacgtgtgccatggagagtgcacacagagggagaggcggagagagggtatataagaacaagtgcttacctgtcccatgtaaagctcctcaacggcgctgggctcgataccagctcgagagatggcggccttgacggcggtggttccgagctggacaccagtctgggacttgagggcaccgttgagagttccgatgggcgttcgaacggccgagacgatgaagacttcctggggagtgaaggaggactgtcggtgaagattaatagagatggatatgaagatggttagatcgataagacagaagagatcaagagggacatgcacgaagaggagaaggagccagcctgtgtgcatgcattcattgcagcggccatgtgtcgagaacgatgaggaacccgacgcgttagatccggtcagatgtgaccagaacgatacgatgtgtatttgtgtgtgtgtgtgtgtgcgtatactatactatactatactatactatactatactacgctatactacactatactacactatactgtcctgcaaagaacaaaagctaactcaccatgctagagtacgatctaatggaagcaagagatggacggatagaaaagactgggagaaggtgaatcttgatggtggtcagacggaaggcggcagacattgttaggccagcaggcggctcgtgcgcttttttttttctttctttttttttcctagtctttgttggggccttgtttttcagtggggcaccgttcgccgcgtgcgacggagagatgagagtgaggagtgaagagacgggaagctggctgggctagagaagtagaatcgtacgatctttcgtctcctcttctttcttatatgacgagacagagagacaggtggacggtatgatggtgagatgatgatgatggacgcttacaagacaactcggctcgagggaatccttctacctatcgtttctccggtaatgcactcgccggttctccgctcgagagaactcgaacgttttctttcttcgttctcttcgctttccgacggctgcaccgacgtgattgtagttctgttctctttctcttcaccgctaggcttgaatgttcactactatgaccatacatacatacatccacaccccctacacacacacacatctcaggaacccaccgtttgatgtccatcgtcccacaattgacgcgaggggaaggccgcttggtcaagtgagcagagagagatgacggttgctatggcaacaacagttagtaatcatccttgttaaccctaacaaggaagaaaaagaagacggttcagacttgaaaatcggactggccgtgtttttcatattctgctctaaagtcattctccccgtccattctttccgagcaacattacgcgacaacgagcatcaagtggtgagtgagaggatgatatatctatgtttgtcagactctccggtctcatgaatcccattgttaattcccgttcttcttctttctcatcttgtctcctttttcgctgctcggtcatctcttcttggtcgccacgcaagaaaattcaaccaaacatctgttcataaatcctttcatacctcttctctttctttccggtttcttcttcaaaagcaacactctcaaggaaacaaaagagccaaagtttcatccaatcgtgaaacaaaacacaaatgtcctccgctgaaactccggtcgccgtctcgacgggtctctcgatctcgccttcgacaacttctctactttcgacttctccctctggcgtctcgctcgcaaagtccttaccagtgccgcctcggccgagtacgacgccgattaaaggtcagatgagtcgcaggctgacgtccgagtcaaatccaagttcaccaaacggctcttcttcggtcaagcaaccaaagccaacgccggcgagcaagagcgttcaggatctcgtcacccagtttgaactccgagctagtccgagtaaggatgaggtttccggtggaagaccgacggcctcacctctcaaacgatccgtcagtgggttggcttcgagtttgaacggaaacggtaccagagtggctggaaacggggatgccgcaaaggcaactgctcctgctgctgttaccacttcgacaacttcgtcttcctcggaccacccctcagcgccttctccggtcacatcgccttcgcctcagacttctggtctgccagccgcgcctctagtttcggtcttcaccaagtccacccctgaggtctctacggcgtcggaggaaccaacgactaagggtgctaagcctattgagaccgagccaaagtcggctgatgctgctgtagccgttatctctgaatctgccacttcaacttctaccgatgcctccgctactcatgattcttccaacgctcccacatctgaaacccccacaactcctccagccgccccatccacagctgtcgctcctgtgagcacagagtcaacgaattctacttctccttctcctgccgtctcttctgccatccccgctgccccctctccctccgttcctgatgctactccgtctgaagctccttctgatgccccctcactagcctctgggccgcatccgttgaattctgcgtactgcctgttcttccaagacacgtcaccgacaaagaaggcgtcgtccaccgcagaggacacacacaacgcgtactcgcatggccaaaagttgattttcaccgtccagacggtcgaagagttctgctcaagctggaacgcgttgaggagctacatccgaacagtcgtgaattcgaatgatggcttggtcggattaaaacatgatagcaacctcaactttttccgagagggtgtcaagccgatgtggtgagtatctcttacgattcttctttgttcgcgcgtgaggacatgtggggaagagagaaagaaagagagagggagaaagaaagagcgcgcgcaactccttctcggttcaaaattaagagatttgacgagtgaatttgaaccctcgtacactttctagggaggacccgatgaacgcaaaaggaggccgactgactatcgcctgccaaaaaggtcaaatcgacgtgatgtatactcaaatcgttctcctccttgttggttctgtggtcgagatcgactcttgtccgacgacctcgtcaggaggtactatctgcggtgctgtcgcctccagacgaggaagaggggatcgaatcgagctctggcttggtggagagactacgccggatgcgaactggattactcgagtcaaaggtttgtctggaagctctgtgatcatcaagcaagcaagcagtcaattagttctgaccaggcgttcgcacacacatttccttttttcttacagatgtgttggcgacccagctcaatatgccagagattcgggatgtcaagtaccggaagcacttttaatcgacgaagccttccaaaggaaaggcatggttcgggttggacaggcggaagagtccgccgtcggtttgaaattgtatatatgcgtgcccattcggattaggatacaggaaatctttgttgtcacttgtaataagaaaagagagaaagaaagggaaatagatcgactgcgatcgagactatccccgcaggcgatccccgcaatggatgcttttttcatttcttcttctgatgaattttcgacttgccccgcgtaattccgcctgtgcgccaagtcagggcggacattgtgatatcttgcggagtaattagaaagaaggaacgattaaaaacttgatagttccagctcgaacgtaaacgtcataacgaaggttccttgggacctgtggctttgtagtctagaatgacgaccgacaccctctttcacatccgtcagctctctcctgatgcctctctccctctgaccccagacaagatattttttctttcttttttggttttgaaaaaacacagatatcggagaatggaagctttctctttagggggttccttatttatgatgatatcgtgcactgatcattcactcacttacttgtaccattgacccatcactctttttttctcaagtacacattacacacacacacacacactcactctagtcctttgcattcgttagatacactctcactcatttcttccatacaggcttctccaaagaatgtctcgctcgccgtccaacatgccagaccttccagaggaagaccaaccgggatcaccacaagtaatcatcactcggcctccagataccccggccacatcgtccggtgcaaaggacgcatcttcaacgccctcgcctgaacccagctcatccgacgagaaagttagggacctgtcagactctcccaacgggaagcgtgtccaatggcctgaggaacttgcacagacaaagtccatcccggccggtcaggaggtcctcgactttgcagagtccaactttgcacagtctggcagatcgtccgattccagagatccactcgaccaggccgagtctcatcccggtcaacaacctaccgatgaaagcccgagcgacgaacgcgcagagctctcggaggcagaggagaccaatctgctcgagagcatggaggtctttgtcgacccggacgagacaaacggccttccggtgctcaacccagagagggaggccagaaggatcagagaagaagcagaggccagggcttctggtaagcccggcctgttcagacgacgaatgaagaagaagaatgctggccagacaaacacatcggacgagctctccatgaacatcgatcactcgactatcggcgggggagcaccgagcggcgaatgggttgccccctctacttacgcaccgtcttccacccatgacggctccggttcagattctgaccgggatgaagattacgagactcgagagcgccggaaatttctgaccgaatggcgattgagaaactcccaagacccattcaaactcccgtcttcgaaccgtaaagctgtaggtgtctgtcctgattgttctttcatgtagtgcctcgatgactgaccagatttacgtcggatcctaccagaccagtactacttcctctcgtccaagctcgatcaagtctggcacgaaatcggcctatgcctcctccgaactctcagcctacatccgcactcccgccggctcaccccccatctctccctcaccatctgcgatcgatctgccggccacaactgaggtctccgacccgaccgggtctcctgggcaaaaaccgtcgtctctcggccagcccaaaaagaacaggctgcaaaagatcgccaatactccattcaaggttgcccaggcgccactcaagatcgtcaaatctgctgttgggacgccaacggaaaaggctctcaaggatatcagttactttgccggcgcaaagactgctcttacccctgaacagctagaggagaaggcttgggagaaggaaaagaaaaagcgtcagaagagggaagaaaagaaaaggaaggaaacccagtttgtacgtgggcatatgcctttcttgtgtccacatcacctagtgccttcccaagtgctaacccctatctctattgcgcggtattgttctgaataaagatcactaagcacgtcgcggaagtcgtcaataagcagaacttcctgatgaagcttatgagggctttgtgagttgctatccgaccggcagattcttggaagataaacacattctcaccgttctattcttccatttgtatgcagaatgatgtttggtgccccctctcagtgcgtagacctcagttttgaagcccaaaacagaccatattgaccttttgactttcattgccgtttccggttcatattcgtcttccatcatcagtcggttggaggcacaaatgctggccacagctcgaatcctggaaatcagttgtcaactcgtatatattccgagcatcatgctcatcagtttcgaagatcctctaacaaagtcttctcaaagcaaggtgtgctattcattcggtctctcgatgctcataacagatatgcttacatccattaccctttgttcagttcttgaaacaggcaaacgggcttgacctcggcaaactcctatcggcgcatatgatttattggaatgtcagtacatacaactcgcctccgtacgactttgtcattcttgaagactaacggtacacatgttgaaactgtaggtggtacatgacaaaattggagtggacgacgctagcgccgccttagatgttctgatgacttccaaaccaacatatacattatggcagaacttacttatcggaggtctcgcctcagctttcatccttccttctgccttttacggatctttcatcgactgcttggtgaccattccgctagggatgcttcttgtctttgtacaagtaattgtctgcagaaacgatctctatgcgtctctttttgagtgagtctcaactcgttgccttctgaagagaatttttgaagctgatggtagacttggctctcttcatcatcatgaacagggtggtaatcgccattatcaacaccttcctggccgctctcttcagctcctggggagatcaactctgcttctccgccttggtttctggaggtgttgtcttaatccttccaggattcatcgttctttgtggaagtctaggtttgtcttcataacctcattgacctaatgatgagtaatatttactcatcatgtgtagtcgtcaactctttcttcaatagagcttggaaaccgttccatcatctctggctccgttcgactggtattcgcactcctttatgcattattccttggatttggtctatccatcggaagtactctatggtatcgttcctattcagtgtactattgacagctgtgtatcttagtagcctgattgtaattgcacccacctcttctgatacctcgaatactcagggtgagaatctctggacggccgatcacatggaattatggtcagttattacgttctaccttttatgacctgcagttatgtctgacaaaggttgtttgacacagactgctcaccttatcggaaagacaatccgccttggtacagggcaaccattccacagtggtattatttcctcacggctcgtaagtaacattcaagcttaaagccatttgttatgaacctcaggtgttgtcttgatcgagagctgatagaattcatttgacgacccttcccttgacgatgtagcctctttgtgagtttttgtattcatcagccatatctatgaatctcacaaattgatgaaaaaacctacgatatgtctttaccctctattccacagtgtgcttctactcgctctcaggaatggacagcccttggttagaaaagaaacattaattatggtcgttattggctgcgctggtctgttttatctttgcttctttgctcccgtgcgcgttctagtgctgatacataaaccatgttgtctgtacaggttttgtggccaacacgttctcgggtcgtgccttcaccaacagacccgatctctgctcttgtatcggagcttgtaccgtcggacttttaggtggtctgtacgctcgtttcagccgaggttccgcttttgtcatgatggtgagtgagagttacacactggtcttaaatagtatccaaggactgacatgtccgttttcatcaggttcccggaattttattccaacttcgtgcgtatatccctgcctttccaggaaagtaacgaaagtttgatgtgactgactcttcttgaaaacgttctggtttctgtttgtgtagcatccggtctggcggataacggtcagtagtcctttattctatacgagaagcttcgactaacccaggtttgtatttcttgttacgaatctcaggtggtctgttgaaatttgcaagtgaagcgactagtggcgatgcggattcttatgcttcaggattcgatgtggcagaacagctcatcgaggtggctttagggctcacgtaagtgttttattcgccaagaacaaaatgcattcaaacccgctcgctcttgatattgactaaatcttttgacattatcctcattatatgatcagtgtcggtctattccttgccggtgctttcttgaatttgttcgtcagtcaatccagacgaggaacgaacttgagtagtttctaggcatacatccagatatatttcaatcagaccgaacatgcggtcggtgttcactatgcgctggtcgcttggatagtttctgatataatgttttttaacccaacaatgcgcatgcctagactgacgataatcaccatgatgatacataaagattcacaaactcaacacattttcactaaacctaacactgacattaggaagaagacgatgttgctttagccctcaaatcccttcctaccatgagtccttcttcccgatttcactgaactggctgaacttcctaagtattctggaaggatttgctcgacagaagttaaaacttcctgatcggtcttgattcctttactagggggtgaagaagacggaagatcaagaggggggaacgacgagattacttgtgcgaatgaaacatgggtcgaagggagagggtcggtgacgatattgttttcgcggagttggttgacctactcatcgaccatcagttcaaacacgtacgtaatcatgaacggatgttggtcagactgagatatctgatgaaaaaataaacagtacacctgtgtacatacctgagatcgagtgactgtgagcaagttctccgggaattgttccatgaccaagccttgaacggagccaagcgcaaatgggacgctaacaacaggcctagataattctgcatatttcagtgtggtctgcatgagttctttgtaggtgtagactgcagatcggtttatatagtgagcgcgtatcacataaggctggtatcagtatcgctggttgaagcacgaatcaaacgttccctgtatctaaaatggattgttgagattaacaaaccttttggaccacctgcttcgataatcttgccgtcaacaagatccgctatctccggatttcttcggctccggctgacaacctccacagcccgtgcgatatctccagcatacacctgaccgtgtgtacatgcgcgtgtgaaaagaagatgattgagatgagagaatttctataactggtcagaaatataacgatgctcacaggctggaaaagggatgcaccacctccgaacactggaagaaacggaagatattttgccagagtcgcaaatctctgcaatatgctcactattttatcatcaacatcaggctgacgctttgctgcatgtgtggaatagactcaccgcaaaaaatccatcacctggaccgaatattaaggagggccgaatgattgtagccttgggtgactcggagagaacggcttgctctcctagtcctttcgtcctccagctatagtaattagaccatatatattc

SEQ ID NO: 2012 - DNA, 6059 bp, Xanthophyllomyces dendrorhous
accatatatattcttcagatcatttggggaaaagatgtatagatctttcgagtaagttgactgactagtcgattgacgaggttgaatttgccccgatagctgagatatggatcaacttggcccctgctttttgggacgctctcgcaacctacaagagaaatgaaagtgtacagacacaacgagaaaatgttgagcagtgtttcaaacatcaacctatctggcatgatctcattcaacatacgttttcagctcccttccattgcacggcttcaaaaacaggacgcgacccatacaaaatcctagagtgaaccatcaagtagaatatcagcctactatgcctaagactatgttcgctattcgagtacatcgagaaaaccagaactgaccccacaagattaatcacaacttcagctccctccaaagcctcatctagccttttattctgtcctctgtcagtaatatcgattccggtatacggcgtggaaatttgtttgccgagatgtttgaggtctgtgtagagcttatcggggtttctcgacgcaagaaatatctgagacctggaagaagcggcgatgagagttttggtgatgtatttggctaaagcagcgtgacggttgatgtcaaagtaaggttgtgtctctatacagtgtaggtgtcgagaacagaagaaacgaacctaagaaacctgccccaatgatcacgatcttagtcgatggcggacgtgcggtcgacatagcagcagtgagaacctgtttaatagggtttgttgagagaacgatagtagatggtgaaaggttggacaaaaagcatgaaacaaggaagtcgactggtaaactaagatgaaaatgatttaagaagttcacaaacatccgatcgatcgcgtggacgtgacgtcagcctcatggatgcacagattgtctcttgcatttcttacgttcttctttttgcttgctatctgtcagctgttggtttgaaatgtacgcttcatttgtgaattatgtatagaaaacatccaaaaacattttttattctcatctagtctctacatgggtcttatcactctgcaggcgtcttgactgcctcttcagtgctttcgggaattgtgagaacaacctataaagtcgacaaaaattagcatggagtgacaacatgcaacggagtcgtatcaagcaccaaagtcaaaaatggtttagccaacaaacctttccaatgttttggttgttctcaagaatctcatgagcctcctgaactttgttccaatctagttctttgtgaacgacaacatccaggtcgcccgtagcaaacttatccaagcatgtatccttgaaagaagctaccaatgcgttcatgtagtcttttggtcgagatcgaagagctatgcgggaggataggattagttcatctgaacgagatatagcgaaaggttgtaaggctaagataggaaacctactggttccatgaatagaaagctttttgaagagaagcttggccaaagacaaggtagctttagacctggttgaccaaaagttcaacagtaatgttaattgatgaaaaaattgtgaccatagacacaagtgtaaaattcgatatcaaactcacccggaaaggaatcccagacagatcatccgtccttctttagcgagagaattgatgtttttctcgaagaaatcctgcaatcatatcacaaccgactgtatgaatatctggatattcactattttcgatcgtgagaactctaacctttcctacaaaatcaatgacctgttagcgaagaaataaggcaaaaattagtgtgcggtctgtcgatatcagtttgaagagcatggtgagaacaggaccgacaaggttcactccagtgtttttggtctgtcgaagaatgatctcgtcaaactgttccgttctgtagttgatcctatgatcaggagcactcttcatttccgacagcgcttggagtttttcctctgatccagcagtagtaaagacttcatgtgcccctagtgatttagcaagttgattggctgcaatccctaccgcgccagctccagtatgctacagcgcaggagataacaagtttgcatcaatgatatgctttcgtgtacaaggcatcgaaagagacctactatcaagactgattggccacgttcaaatttcccagtctttttgagagcatcgtaagctagaaattgtatgaaaacacgaaatcagacaacagtcaaaaacatatggtttgatgtgcagttgataccagtaggacaagaaggacgatataccagtcaaatatgtttccataaccccagcggccttcacgtgagacatataatcaggcttttcaatcagagtgccaccagacactgcaatgtactcggcatatgcaccctgagagatcaaagtgacgaagatgaataggcaagaggtcaatataattacaaaaaaggaagcctggtgatcaaacatgttgtgcaaactgggctcagaagatgaacttcccaacaaactcaccccgtacgctagaccaaatacttgttgaccaggcttccaactcgagcttcgtgaagacactatctctccagaaaactcaacgcccatgatagggcttgcgtcaggaggaacaggatactgtgatgtggagagaagtgagacgggttcgagacaagtgagacgggattgagaaaagtgtagggaggaggagagaacgcacatttcctgttcgctgaagagtgtccattctattcacaccgatggctttgatctacaggaatttgatgaaaatcaatttaatggaaaaacacagtaccctagatatgatatcaatcattcatcaaacaagaaaccgggttccatctaaccttgacgaggacatgatcaagcttgatttcgggcatatcagcggttccgatgtacatcgcagatgccgggcccttgtcaccctttatctggatagctcgcattgttttcggaatgacatattgaggctccttctcagacgttgaatttggaagtgttgaggtcttgttcaaatcaacatcagaagaatatgctctatacgagcatcgagagtgatgagaagaccgaagaagagatgatactgaacgggtaccaggaacagctttgagcctgctggagatgagttgcatagggactagaaatctggacatatcgtagacggtgtctgtctgcaaaatatatgattagtaactcggaggtttgaacgatgagagggtgatgggtgatggaatgtacatattcattgaaagatgcacagccagttatatcaggcgattcgtacaaatatattcgtacgagattagctgctggaagcaacctcaaccgattcgtctcaacagtctcttcatcgtctcaagcatctcccttctagaaaaagagaacacttatagctgcctttcgttcttctaatctcacatcaccatcgtcatcctacgagtgtggttcaagccagctgaactatggaacattgggcgctgcgagataaaaaatctgaccgtagggtgaattgaacacccgtcgtccgcgactttgcgtttcgattgaagaaccacaagcggaagtactaaccactatactatacgatcttgatgtttgctaatgggccatggcgacctagggtgtcaagatgcgcgcacacattactggaacttcagcagctttgacattgcttctgctgtaatttgtttctccttcttttgccatcaccctccgacattcgtgtgcgcgaagtcctaggattttgcgaaaagttgcaggcttcctagctggtcccttctgttttcctgatttctcagtccgtttcatcgagacacctggatggtatgtatattgctgtgggaaactagggaagatatggctgggaacaagtgccagaacgaaagatccattttaacccaaatgagtaacaataccaatacgaaacttcaggtttgctgacagtaacccctatcgatgcgttatcgcccatgccttgcgattatgcatatacaacattggcttttcccagatcgtgaagtatgatggcatatggtgagtcatctgttttctcatgttttgttatataattgtttgtacatgcatggaaatacttctaacactctgagtgtcctcgtacaggattgatatgaacgagcccagttcgttctgcgaggggtcttgtggctcatccgccggttggttcttttcgttcgatcacacgtcaaaggcaactgagcatatgatctgacctctatctgggtgctactcaacagacctgaacaatatcacccctccattcttgctgcccggacaacccagtgctgtgggcatagccgatcagagtaaccctccgccagtatgttgcttaccacgaccgtagtaccattctgcatgcccatgaccggtctgccgaacgacacagggtcttccggtatgactatgtagtccatcagtggctgatatcattctttatcgcccatccgtcgcaaactttgagaagcttcccttgagtttacacctcgtgtgctctcgtgtcctcgaccccactcctagagcttgtgagactccggttttgttatttgatgtttttgacttgatcgcactgataggtcatttctcatcgcttctttttcgttcaaagaagatcagtactgatgcgccccaagttgtagcacctcatacccatctccaatctaccctaccctcgcttgatttagaggcggccactatcgctatcaccatccctctcactctttcctacttctgaaccggagcaggtcgctataccatacaccggtcccgtatatgctctcggagactctctagccggtctgttagacatcttccagaatttatggatgaagccggatggcgctaagcagttgttaatcgtgaaggaagagatggatgagtttggtgagaaagcagaaagaaaaaatcagcaagggtcgagtgcccatcgttggaggcaaaatcttaaatgtaagttaaactggattggagacaaacaaagctttcccaatgatgaaaagcgagattttacaagagatgtcacagcaaatctagactgaattggcgacgaatgtcaaagagacttacgcaagcctcgaggtttccttactgcacagggaggaacgactgctacttcaattcaacaagtttttgcatgaccaagatacgtccgcttcctccgaagctgatgtctgtaagctatactcaactttcccttagttttgtcccaagacgcattatctcctaacttccttccaccactgtatcaagtcagacaccttcaagcagaccagtgcgctgaatataatgcagcgttattctggtcatcatactggcctactcacgttggacggaggtacgttcaatattcaagtttgcgcagatagtcaaggtgtcatcgatgctggctacagtgcgttaggttgatcgtttcacttttttctgctgctgtctgtttcttcgaatatatcgtttagagagaggtcgttgagagactgagagtgtagctttgtttgctctgtcatcagctgcctggcaacaaggagatattgcattcaggaacattctccgaatgatcaggaaggagatctcggaaatggtttcttcagactcgaaccaacccggtgactagcttgaagcttgtgcgtccctgtcctcccctctgccgaactgttctgtctccgaagctcatcggctctatatatatcattaacgtacctgtcttgatcgcgtgtacagccaacagatatgttccagaagccggccatcaagctcacactcggtctcaaacattgggctatccagaatgccgaagatctcactgaaggcgatgacggcacgaaagatctgggtgccgaattgatgtggacacatatgaagtgtgacctgacggacaagtgggcctgagaaggaaaggaagtttaattgggccacgagaagtgtacatcggttttgtttatcttctccttgcatcattcattgatttatagtttgttagatagtcaccaggatcgaagcaacgtatgaaatgatcggctccctccgggaagggcggcctccgaaag

SEQ ID NO: 2013 - DNA, 779 bp, Xanthophyllomyces dendrorhous
aactgtgctttgcgctgatcctgtccctcctttccatagtcaactttccatttctcacatcaccgggttcactcagagctcagagactgcagcactcatgaaccaacggctcctcaccgagttgtcgtcgcacttcccagacccatctgatccatcagccaaattcgatcttggctcagatcagctgaacgtagagcgcaagactgaagttcgagagttcttccgaggaggtatgaagggtgtgcaagagatctgggacgaccacagcaggaaaatcgacttggaaattagaaagaatgcgacgttcgaaaagattacaaaagaggtttgtaaattctattctcttgacggttcagctattttcatggatttgacctacaacaatatgtatctgattttcgcatttatcctttcgaattgtctacgccttacgacggaagttctggggcaggtacgcctcaaccgaggctcgatttggagttgatctaactggagcagtgagggctctatctgttgtctattgtaacgcttcttccgatgcttaccaaacctcgtccccgcttgagcaatctatagacattgagacttaatctctccatcgaaaagatgtgagcctgctgactttcctcaggatacgatctcatgactgactctttgcgacagatccaagattggatggacaaacccgacttttttgagtaccaagcgcactgtaatcgctcaagcgatcgcgaggtctgttgatgttttcttccccgatggaaatccctgcttaccac

SEQ ID NO: 2014 - DNA, 1498 bp, Xanthophyllomyces dendrorhous
cttccatcaagtacagcgttttgtatactggcttttataaaattcatttgctattgaacgcttcccagtcttacgtggtctacgaccgatagagtgccaactttattcatttaaacattgtacctgggtctgactgatacaaaaatgacaggtatgaacattatggatattcaaaaccattaaactcaaatccgtcaatattttccaaacaaccgcattgtaggaccgtagtatgtatgaaacatgacatggcaatatatcacttacgctttctttagtattgatatgttatcataacacatttcagttgctgcatcgtacctcatttgcagcctagatgtgatgctagataagttttgtcaatgtcaggtcgtgcttcaccatgcagcatagcgttgatttctgaaatatcattcgtagccgggcatatgcgtttcatgagctgcccaaatatgacatcacgtcaaattaggccctttgcaaaggacaacagctcttatgtcataccgatgtaacgcactctttgtggcatatagtgctcaatatgattttttcttgtgcacacaagatagtatgttttccactgatcaaacgaagttagatacaatattatcttatactcttcacacttttaaactaaatcaccacaaacacgatggaacaatctctgctgatatcaggatactgtgcagacagtacataaagcatgacctaagcgtactgccaatacagccccttgacatatatttcatcacaaatcagtacctattgtaactagatgattcaacatatcattgatctttccgtcttatcgatacaatcactaacacccgatatatttctacaagcatacgaaacgcgaacttgatggattgtagtccttgcaatattgagtcaacaagttatgcatcgattgaagagatgatgtaagagaagttaccaagcagcaacatagaactactacaacgcccttcttgaacatcataatggatacattttccgaaggaaaaaaaaagactaatcgtatacgatgttttgcgagacgttcatgcgcctcccagtctccatcaaccgagcttgtaaccacaatgatccagtattggaaagactaaacaaacacattgcttctgtaatgtttatattaatccaagatgcctagagcggttatgatctataagagggaaagcatttcagccatcagctgaatcgttcagttgtacagtcgataaccacagtagatcagtttgctctttccatgtacattctacttattctatcgcgttcgtgacatagtccgtattttcatttctgggtcttttgaaaatcaaagttggtccggcttcttttctattttttctactcttctatggttctttcaatcacatcaagcaattaaatgctgcatcgatgttgatatatctgatgtaatagatttagtcgaggtaaacgtcaaggggactctgatgttgcaatatctgtttcaagtatatgagacgaa

SEQ ID NO: 2015 - DNA, 880 bp, Xanthophyllomyces dendrorhous
  misc_feature (406)..(415): n is a, c, g, or t
aagtcctccccatccgtctcgccaatcgagctctacaccgactcggactatgctgaagacaaggcgtcaagaaaatcagttactgggatcatgatctatgtgtttggagctctggtctactggaaaagcaagcgcataccatcgatcaccaagtcgtcctgggagtcggaatacatagctctctcgaacggagcctcgcaggtcgtctgggtccggtcgcttctccaccagctcggttattctgttccgaccatcgtcgccaagactggcaaccaaggagccatagcgagtgtcagaagcggtcagctacacaacaaaacgaaacacatcgatgtcccgtacaagtacgcgagggacatgtacagacaaggcatccttgacctcggatgggtcaagacaaaggacnnnnnnnnnngcgtcaagaaaatcagttactgggatcatgatctatgtgtttggagctctggtctactggaaaagcaagcgcataccatcgatcaccaagtcgtcctgggagtcggaatacatagctctctcgaacggagcctcgcaggtcgtctgggtccggtcgcttctccaccagctcggttattctgttccgaccatcgtcgccaagactggcaaccaaggagccatagcgagtgtcagaagcggtcagctacacaacaaaacgaaacacatcgatgtcccgtacaagtacgcgagggacatgtacagacaaggcatccttgacctcggatgggtcaagacaaaggacctgccggcagacttactcaccaagccgcttccgagagagacgttcgagtatctgagagacaaaggcggtcttggtggtcgagtgggagctcgtgagctgaccccagaggtgaagcaagaagta

SEQ ID NO: 2016 - DNA, 11009 bp, Xanthophyllomyces dendrorhous
ttcaacccattctgtctcagtcgacatcttggcagatatcttcttccatcgtggctgtttctcttagtgtcgtcttagcttctctgtgagggcgaaagggcccgacaaccgtttgttgcgacttggttggctgtagagttttcagatgaggatgtatgtggaaggctcaagctctcgaggatctaggaagatgccagagtcataggcatagatgtaaggatagataggacgaagatacttcgaacgaagatgacagaatccaaacttgagagaaaagagaaaagaggaaaaagaactatggggaagggaaagcgacgaagtacttgtatctctttgtcgctcggcatgtatgcaagcctgaagggatgcaagatggaaagattgcaggcatcaagagtgtgaaagataaagagggtaagagcattgagaaaggtcagaggtaagaacacgtattgtcaagatagtatgcaaatgcatgcaagatataacacgcggtcagattcctgacacaaaagagggaaagagatgaaacgtgtcgggctgtaaaggcggaagtgcccgacaatcgctatgttataactaggatggagagtgatcggatttattcagtttgatcaggttcagttgcaaatttgctacgatggatcggaaggctgaggccctcgaggatctatgggagtaccaaagacaaaggcatacacatagagatagataagacgaaaggtgtttcaaacaggggcgacataatccacggttaagggaagagagaacaggagagaacggaagaaaaagggaaagaactacatgggaaaaataaagcgatagagtaattgtatcatcttgtcgctcgggcgtggatgaaagacggaaaggatgcatgcaggtatcgagagcgggaaggtgggaaagacatatagctagagttgtatacacggcatacaacgtaggtcgcctggttaaattcctgacagtggttgatgagtgatgtcttcgctcttccttccagaacaattctcgtatataattccacaagactgtctgtgagctcgcttcatgcatctcttgattttcgtgcgagaatgatccgagctctgctgatgtttggaggagaggtgagcgattcttgtgaatattttatcacgacgcgtcgcgtgtgataaacaacatttgcacggaagataaacacgaaacgctcaaacaggcatgttgggtccttgattacaggatcaacactcatctcatttgattatcatagactcgacgtcaatcctgaaagcttccactgaattagtggcatgctgagtttcagtgtaatatcttatcatcaagtctttgcgcctcatctacacctcggcctttctcaaattcctccgcttgagacttttcgtgttgccatctttttctatcatggatgatagtcgcaattcgccttcttcgtcgttctctattgccatcagcaaaggtgcgttatcaggtttgttatagcactttctcatctgctcgggttttaattggaaacaaaaattacttgatccacagatctacataccgtgccaccgacactttcctctctgtccgccgtagatccagaccaatcaatactgtaccctaccaatatcacacaacccgaggagctgcttgctttgagcaaagagatcttcgactcatacgaccgacatctatccactgctactatcacccgccagattcatgaaaagctgatcgaagagctcgacacctcgatcagttcgaaggaggcggagcttacacgtctcatgaattgtcttcaggtggccgaaacaaaacttgccaaagtgatacatacttcggatgtacaggatctcaaggtgaatctcgaaattgaactgtctaatcttctcagagcagaagccgcttttgaggaagagagagagatcagactgaacctggaggcgaaacttcaaaagcttcaagaggaagaggtattgagaaaagatcaggcgatcaggcatcaccataaagacgatgatgttgcagaacagtcacgaatcgatgtgctgaacgcagtgatcgacaatctggagaaacgactttttgaatcagataatacaaatcgcgatcttcgtgtccagttgagtgagaaaacccgggtgcttggtgtgcttcaagagaaagtgagtgtcttcagtcaggtcatcacaacatcagaaaaacgaaagaggaacttaccatatcacagtcaaatgtcccgaccccaagagagcagcttgcaaccatacagcctataacttcttccatcccatcaccagcacctatatcagttgaatccacggccacctctccaaatgatctcggatctcaaaaggcgataatcgctttggctgcatctcgtcgcgaggtcgctcaactttctttgcgactccaatccttgacttctgcggccaagtctgatcgtgatacacttcaagaaactcaatctgagcttgaaaaccagtggaagagagcggacgaacactatgatgacatacgacggatcagagttcatcgtgaccaattaatcgaaagcttggccaggtccgacactgaaatagcagacttagaggggagggttgctcagacagaatccgaacggtacgcgttggaactcgagcttcaacatttcaaggacggtttaggagagagtgctcaaattaccgaattacaaggagcaaacggtgaactggagatgaagacaatccagctacaagatatgacaaaggtgagtgctctaaatcttctcgatgcttacatctaacgaactcgagacattgtcgttgctgtcgggagactcatgcggatttctccaaaaaatcttgctcctttgcgattcagaaggcgcacgaactctcactatcacttcaagcagctcttcaagaaataagtgaactcaactctcgactcttgtcaggaacagatcagtttgaccaactccgcgctttatacggggaactcctcaattcacgcgatcgttacctctctgagtcgcaagagtttcagtctcaaatcgttgtctatcaagacaaaatcaacctactttctacggatcttacatcaaccaaacgaatcatttcaagtctccagcatcaaatacaagatgttgaggaatcagcttcgcaatcaattcgcgacgccaaaaacgcttacgaaactattcgggaggacagggatcgcagattacatcaaatcaaccaagacttgtgctctcaaactacagctttggaatccttgttgatgacccagacggaggagcgacgaaaatttgaggatattgtcagggagaaggcatctgccgaattggaagttcaactgtcaaactttcaatctggggcaagtagcgttgaacttcagaggttaaataagctggtaaatcagttgaagaatgatgattctatcaaggaggtgaaaatcatgcaacttctgaagtcgaaagctgagcttcatgaaacaatggaaacattagaaatcgctttggactcgaagcaacaagaactcgaacttgtacgtgtcgacaacttgtctggttttttttttcaatgttgttatttgatgattggttgaaacacattcaatgaactctaaacactctgacgcaactgcatttgtgccggcacgataggtcaagcgcaaatttggagtacgaggggttgccggatctgtttctgcaccggaccggacaaagaccatatcaaatcgccgacaatctatcgatccatctatcttcgaagaccattccacaagagcgacggctacaaagacttcctcgacacccctcaacattttgacaccagttctcactagtcgaacaagtcgttcacgctcatcgctagccatgggtacccctggccttcgtagagcttcggcctcttctttccctgtagctcctctccgaaattctatatcgtcagcgtcgacagatcccgctcctccgctttctgatttgtcaactggaacatccaccatgatggtctcagactcttccactattctgaaaaagggggaaaatcttgaagcttttggtaggagtgagttactatcgtcttcgatggatctgtcgagtgtacctcaggataggtctgataatagatcaagaaagtcaaggttgagtcggtcaacatcagccaattcggagagctcgaagaatttggaagacaaggagaacatcttgagattgtgatttgctttcaacactttcttctctttttctagggagattctgatctttatgtcaaatctcaatcttctattttgcatcttcgaaattgcttctgtcttccttcttcgttgtaacttgactcaatttgacatctcgaactaattcctgttcatcgaattatttgtataatagtcttagatatagacaaaataattcttttcgatagacctttacacctatcatcatctaattgtcaacgaagacagagagtctgtagaccacgacgtacagcccatttgactcatttaggctaggtgaaagagaaaagatacacatgtgtgccgcacggttgcatgacatttgatgtatgtcctagaatatgcttaatgttgagtatgatgtacagacatgaacaaggaaggttcaagcaaaaagcaggagagtaatagagtagtagagatggagctaattcacagcggcggacaataaagtctaccattcaaaatcagaacttgctttggcaaacaggtagtctttcccgtttacatgagccattccatccttgaagatcatcttccacttgttcttcacacgctggacctagttatttgaaacaaaacaagaaacagaggcaggaagggataatgtttgagaaaagacttgaagttctgatgtgttcagacgatgacttgacaacttactttgtcgtatacacagaacacgatatccattccctccagagcaccggtatctgcatccttccctacttcgtccgcctcgtcgtcagaatcatctaactcagagttaatttcttcgtcgccaggatagataccctgggcgttggcttcgtatggtacaggtactgctggtgacaaaggtacagcaggcgtgacaacggaagttcgttgggggggctcttcggtgtctgactggagatcaccggcagatgaactggatgcactctgttcattagttgtggccagcgacagataatatgtaatggatggtttgaaaagaaagaagtcttagccagggcttgtgttgttgttgttgtgatggttagttgatagtcagaagataataggcacactaaccctatcatctgagtcctcgtcctcatcgtcgtcctctccacctcttagtctcattgcatcatctccacctcccttcaaggagccttgccattcatccttctttataggaagtccagacagcgatgaatatgggtaggatgttgatgaaggagagtgttctgaaggaagaggtgtaggtggagcaggttcaaagtcggcaacgtgtgattctagaagcttggattcccatttctgaataaaacgcggggtgtgatgagtacaatgatattgataaacacaagccagaaacggcgacagtagactcaggagtgagcttcaattgcgttcctcattgtagagtttagttggcagaaaaggatgatgtgaagataatatacaatagggggatactaaggacgagatgattttcttatatgacgatggactttgcaactgacctgttggagcagagccagcatatcctcctcgacaccaaactcgtcaaaatccgctcgaacggattgtactacatcatcaataatgatcctgtagatgtttggtacgattcggttagacatgttgagtttgattgaacaagagaggatgatcaatcaaggcggacagggtggcgaagatgggagtttgaggcaaacaaatcaagtggcaatttttatttatactttcttcttcctcctcttttctgtgcttgcgaatctcatcttttcgcactcgtcttcaaggctcagtgaaatttattcacttcataaccgtaccagattctggtttaagacattcattatatgcgagcatacatagtactgttacatgtttcatttataatatggttttcgttattattttattccggtacatcatggggtttttcaatgcctttagccactcgataatataccacgctcgaatcctttccaaccgaggcagtatagatgacgggagggtccgactctccttccgtgctaggtgtacattctttagattgaggaagtccagcttcaatatatgctggatgactcaacagggaagaaaacgttgtcttgaacctaagcgaatgtagcgttgaagagaggatatcaatatcagtaaggagtcgatcaaaaacatcagagagatgaacttctaaccatttggttgacaatggctgattgagcgccatgggaatcatgacccttggtctttcatcctcttttctccagccgagcagaaacagcctgatctccttctcgtccaaggtagcagtgggagacgtggaaggctcgacaagaatcgaatgtagttcaactcgatgccatttctgagcttgtttcaacaaaagttcacttcaaactttgagttcgatacgagaacgctataggcacatctctatgaggacagaaaatagactgacacaatgtcaaatcattgtaggtgatgaacaacgaaccggcttgagccggagcctgagtagcgtagggctctaagatcttgtactattgttatttcaaccgttcgattatatagatacaataactctcagctgctgtgtcattcattccaggacgcgcaatccggacgataactcacagaggaatgaaagtccatcgttgcggtgaagtgcataaaactacgaaggttcattgtagatgcaaacgactttgagatacacatatataaacatagacgaaaatcaaaatttaatcagataatttatccccgcggtcgctccgctccgctcgttggggaggatgagagcagcaagcaactacaaccaaccaaactggcccatctcggataccttttgtgtttcttcgaatctctccatcgcccataagcctcagaccaagcccttagcatgctcaccgctcgatcttttttgcgaactctcgttaagcccgcccatggtctgatctacattcctttatctcgaatgcgaatagggaaagaaacactcgactgatattatacttgtcactttttttcttggccaatatttataccacagcgagcttttcgacgtcctccgtcagattggctgcctccggtgagttttatttccagcagcatcttgaactagagcccctctcatgcctcgctgaatcccataccttcctcattttttccacgttttgcgtttgtcacttggaatccaagcttttcgatttccagccatgtaagttgtgtgaattacaacattctctgtttcatcaatgaccatctgaccaacctgttctgttgtcctgtcatacaaaggtctcctactatgactgagggaggaattgctgagtggaaggttaaggagggtgacgtattttcttcaggagatattctgcttgagatcgtaagtcatttcgcttgacttcgagcagcggcatgtttatgtatcgaccgttacagttaaacatatcgttcaatattcattatatataccataggagaccgacaaagctactatcgatgttgagacaactgacgatggtgtaatgggcaagattcttgtatgttgttctctttatcctgtcaaccctaagttggacaaggttggctttgataatatcaaaacgtctgtgtatgatttatcaatcgtctttaacttgccattatatagattcctaacggcacgaaggagattaaagttggaactttgatcggtatcttggctgaggagggagacgacttgtcgtcactatctgccgatcagttctctgaatctgacgccgactccgcttcgcctccttccacgcccgaatctagctctgccccgtcctcatcctcctcttcgtcatctatagaaccctcgacctcatcgtctcccagttcgtcttcttctcatcactccgcctctgattactcccatgcgcaagctcttctccctggagttcatcgcttgctccttagctccggcctcgagcctaacgtgattaaggggctgaaaggtagcggaaagaatggaactctcacgactggagatgtattggttgcaatgggcaaactgaagaatgtatggggaagcgttgaggctgagaagttggagtttgatggaaggaagggagttttcactcggtttggagtatgttcaccctttttaccttctcgactatcatgtccttatcgcgtgtatgctgtagacaaagtcagttgcatcgtctcacacacattctgactcttttcatttctttgtcctattcattttaggcttcagccgcccctgcggcgtctaagtccgatgtccccgccgtcaagcctagcccgcctcaggatcctttgtctcttcgacaagctgttctgcagggtcttgtcactcgagctcagcctgcatctgtcaaggcgcccaaagttaccttcgaagatctgatggacgattatgttcctcacggatcaagatcccagtccaagccagcaatcgttgctgaagctaaggtgacaccaaagaacgagtacgagggactgtggtagtctatgacctggttctttttctgatcttctttgcttatcattttgagagaaattagatagtgtatgatgtggtcgttggtgcagtgaggtagtctgaggggtgtagagcaaatgggtttcacagttctttcatcatattctttctctttttgtggttatttggtctttctttaattatccattcagtatgttttcttcttattctcaaacttatcgcccaagtatctgggaaaaatgaagtttgattgtagaacctataggagacgatgatatctgcagaagttgacgcatactcaacaagtctgaaatgtcacaagcatagttacagtctgacccgatttacgcgtaactaaatcgcaacaggtctttggcctatcagcagtgtgccaatattcctcatcgttctctttctcaaatttcctctcttccgcagcagaatccaacctcatcatttttcattgtcttctgagaatttagaacatcatacatcatccaaactctctgcatcctgtatgttcaaacttccttcgttacgattctgaagtcgtaaattctctatataggaagagtttgactcgtgttctacatcgtcttacatatttcgtctgcatttccgcacttagaaaagcacaaccaaaatatatttaggcatgcttcttcgtctatccggcgctcgctctcagttcaacattagacggttctatgctacagcatcgactcctcaaactctgattgagaagatcgtccagaagtatgctgttggtcaacccaaggacaaaaaggttcgaagtggggactacgttatggttggaccagagcatgtgtgagttgaggcgccggcggatttttcctaatatcaccgttatgccgttaaggcagattcaacgcaatagcatcttttcaagattagaagacgagaatcgatagagcagccatagctgattcgatatgattcatgcctttttgacaagacggaagctgaaattagtttttgttcatgtgaaatcaataggatgacccacgacaacactggacccgtaatcagcaagtgagtcatacaagttggcagtgcttggatcaatattttgctgagacgttcttacgtccccatgcttcagatttaaatcccttcagatctctaatattcaccgaacatctcagcccgtcttcacacttgaccacgatgttcaaaacaagtctgagaagaatcttaccaagtatgccaacattgaaaggtttgctggagagaagggtatcgacttctatcctgctggaagaggaatcgggcatcaaatcatgattgaagagggatatgcttggccaggaaccatggttgtggctagcgatagtcattctaatatgttcgtcaagccttaatatatttttaaattcacacagtacattgtgccatcgaaaaggtgaatgaacaatctagctaattctcacgaatgaattcaaaggtatggaggggtaggttgcttgggaacgcctatcgtccgagtgagtcgtttttctattctgatattgactgccgttcatggtgtctaattgcaagaaagcccgcttttatagaccgatgctgctgctatctgggctaccggtcgaacttggtggcagattcctccgatcatcaaggtctcccttcttgggcggctcgctggaggagtgaccggaaaagacgtgatcgtcgctctttgtggaaacttcaatcgcgatgaagttctcaattcagtcatcgagttcaccggtgacggtgtgtctacgctttctgtggatgaacgactggccatctcgaacatgacaactgagtggggagcgctcgctggagtatttcctgtggactctgtattgaaggaatggtacgaggctcgattgccagactcttcatcgctttctggagcccatgctcgagtgaacgcatcgcgactttcagaattgtttgagagtccagtgactgctgatcctggagcgacgtacgccaagcatcttacactcgatctgtctactctagttcctcatatctcgggcccaaactcggtcaagatttctaaccctcttccaaagcttttgtcccctccgatcgcgatcaataaggcataccttgtgtcttgtaccaactctcgagcatccgatatcgctgccgccgcggccgttgtccgaggcaagaaggttgcccaaggagtcgaattctacatcgccgctgcgtcctctcttgttcaggccgaatgcgaggccaacggagattggcaaacgttggtagattccggagcgaaggtgctgcctgctggttgtgggccgtgtatcggtctaggcac

SEQ ID NO: 2017 - DNA, 8015 bp, Xanthophyllomyces dendrorhous
ctacaaaggaagaatgggtcatccggaagcgctagcatacttggcctcgcccgctgttgttgctgcctcggctgttgctggtagaatatgtgggccggatgaactagacctaagcgcgttgcctcaagtggacaaaccaacaacatccctagaggtattgggagaaaaggtgtcagtggaggcttcgaaggattcggcgggagaagcaaagagtagggaagaaacactggagggcttcccggaggtcttccggggcccattgctgttcgctcctcaagacaacttgaatacagatggaatttatccaggaaagtatacctatcaagacgacatcacaccggaaaggcaggccgaagtagtgatggagaattatgatgtatcgttctcttcacttgttcgatcgctcgtgccttcgatcccggcgtcaactgagaagctccgaacaggctcgatcctggtgtctggttacaactttggaaccggctcatctcgtgagcaggcagcgacagctttattgaacgcaggaatcccgcttgtagtgtgcggatcgttcggagatatcttcaagcgaaattcgatcaataacgggttaatctgtgtagagtgcccggccttggtgactgaccttaccaacgagtttgccaaagacgccgagcggggtaaaggaggtaaggatggagagggtactgtgaggcccgggtgggagattgagatggacatgacgagggctgaattgaaggtgactaaagccaagggcgaggaggtcatctacaaagtcggcgccgtcgggcagagtgtacaagagatcgtatgttccttcttttctttgtttctcccttgtatcggcctatttaatctaggaatactgtgagctgagtagtgttttcgacgtgtttatcttttttgccaatcagtgggttgctggaggattagagggatgggtcaaggcccgaatataaatagtccagtctgatggatcgatgtcgagaagtgggactttcttgatcactttagacagaatctgttgatctttgttgtacagtttctgtgggatatcatatttcttggaatttatcaatacgcttatgatttatcttctcaatatacacttgcctcgtttcaaatgtatttttggatgacaagacttgatgtccaaagtgcaagaaggatatatactagcgtataatttgaaagagaagaagataagagggcagactagcatagatttgatggttagtggatggccggtagacaagaatgagatgtggctgaaatgctgtcccaaatgatagattgattgatagcaggcaaaacgaagaagctatagattcagagtatagataactatgcgcctccgctgttgagattggttttaggaaggcaaaaggtgagcgttcagaagaaaactgcaggagcgagaaggataggaatgcacgaacacaagaatgttgttactgaagtaaccgagcgaattaattaacaatgaagacaaaggcaaatgatgagctcggaagcgtcgagtcaggataacgaccaacaaagtaaacgaaaaagacaagaatccatgcttacatgggaatgtgtattaatttgacaaaatacccgatgaagcccatgatgaagaatcccatagcaacggcccggcagatctgagaatactctgtgagtgagcggatgagccaaagggaaagacaaaatggagtggtgagcaaccgggagacttcttcatccgcaaagaaagaggtagagtgaatagatggagatgtacccttctcggtaggcttgacacatcggttgaggaactggaataggcgaccgaacaaaacaagtatgagcataatgttccccatccctctgctttcctcttttctcctgtctgaatctcttcaaactatcgcgtgagaagcctcggaaaaaggtccaggagagaacagggctagattgatagcctcacctgagagccctccttgatgaagttttgaggaagctcaacaatctccttgattttctcggttgcttcggccatggtaagaagtggaatcagagaagaacggaaatagataaaggatggcaaagagtcagccttttagatggaatagggtgggttgtgcagatggaacgaggtaaaagcgaacttggtcggccgccagcgaagtacatgaggtgtaaccagagtttgttatttccttataggtggttacgcttgcccttacagcaatggctcaggcttccttcagtcaaagaacgtcgggttggttttcatacaagacctgtgtgtggtcaagtgctactttgtgtcgatacaccagaatcacaaagaactatgcatggcgtagagatggacgtggcgatgaaggactattgtttataagaaatggatacgatagaatgatttaagaactcaataaaaagctaggcttgttctgtgatacttcgactacgaaactctccaatcatatattacagactttatctccggattgacactccgagtttcataccccgacgacgacttctaccccctccactttgccctcggctctttctgctaggtctgctttctcctcctgatgagcccgttggcatcttcacctacagccgacgacgacgaccgcgaccaccaccatcgacttcatcatgatcatcaccatcatcattctctagatcattctctagatcatcttgatcatgatcaagtgcttgaaccaatcgaccaagacctcaactctgttctttctgaagcggcacaggtagaagcagctctactcctccatcatcatcgattcgcaactttgggatcgatatctcatgatcagcatgatcattcccacgaacatcagtacacaattgaccacactggtatcgtcgaaaattatccatccgctagtggtgttgacggcgtaggcgttagcgatcccacctttcgcgatctagatcatgaacatcatcatgatcataccgataaccatcacaatcatcattcccaccaccaccatgatcatttggactcttacgcgtccgcagaaggcgaccagatagatcagatggaccttcccagagaaatatccacgaatgagattgacaaacaagaactcggagcttatcctagccacgaaatagacaatcaggctacagacctgaatgaggatgttctcaactcaaatcaggccgttcactcgcagaggttagaaccatccataggaagctcgtccgaggactttccgccaaagaaaaaggctcgaaggctgggcccgaaggcgtcttcattacctacgtccgccgatttgctcgctgccgaagccgacgggcaggctgtagccgaaccgtcatcttctgccaacgacggacttgatagcctagacaacgggctctctcgaatcggagctgacaagccagtcagaaagaagggtagggtacaagtcagcgtaagtaggactggatttttgactccgtccaatcttcctcttcgatttttttcttcattcttctaacgcgctcccttttccacattacgtcttgaaagaacgcgtgcacgaattgtcaaaaggtcagtgatggcttcattcaagatatgtttgtcttcgttacgcttgtttcttgtcattcttaccttgtcctcctgtttcttatctgcagtctcgaaaaaagtgctccggagatcgtccctgcaccaactgtatcggtcatcctgagagggtttgtgagaactcttcaagaacggccagagccaaaggtatcaagcgaggaccatacaaaaagaaaggtgtgtgtctgttgtatcaagggtcttcaaccatcgctccctgttgcagtatctcacaacaaccatcatgcatgcgacgcgtccaactagaccgcagcgatccaaggcatctacagaactttcctcacatccagtcagcctatgacctctacaactccaatcctgattcggccacatccgactctcatccatctggttcaaattccctctctggttcgccggtcaccgaccccatccttaatccgattcaccatacttcaaacccaggctctcttccaaataatctctctggtacaagtgcaggccagacgcaccacactccaccgacatatgaaggctacgatgtttccgatggctctagagatgcctacgctcaaatcgatgtcaatggtggacaaggagggtttactttggttgattctgaagacctcaactgtatgtcgtttgtagtgttttcggttttgtaaaagaactgcttctggtcatcgactaaagcactgttttcttttgtgctaaacaatctccctatctattgaccatagcacaattacttccactctcgctaccttcagatcatttgtctctcaacgaagactctccaatgggtcaacctccgccgcctccgccaccgaacaaccgttcgttcctcgaaagactgaaagaagatgttttcggcagaaaagcattgatggccgctacagcagtagcagctctcacaggctctggcgcgggaggggcgttgttggaccgtaagtgcttcttgccggtttccctctcttctcggtctctactcgttcatcatctcgcttgtccaagtatgtttgctgacacagacaaacactgttcgttctgtagcccggctgacgtcgtctgcgacacatctagatcacgacctcttagtgtctcttgctaatctacctcaagaaacgggtgcgtcgctctttcactccattctttttcttgtatgcttctcgcattggaatctaaccgaatattaactccctcactcagaccctatgcataccgacctatcccattcgcatctggatccacaccaatcagatcaatcagtttctcaggacgagcaccatcatcaccattctggcctcagtctcgacagcctgcaggaagtccaagcactaagcgcgacagtagacgaatcgagacaagcggcagaggccgaggctgttgttgcgcttagtagacggcttgaactggatttagcccaagaccaagatcaggaccaagcgctggatctagagagacaagaccaagaagtgcaagaagtcacggaatgagtgtatcatcaaaacctgtctttccgttttagtctcgtactctaaagattcaattcattttcgaaacgctcaagctcccttgtcatctcatattccaggcccgtctcttgagccattgtatctgtaaaaccatataattttatccatccagatttatttattttttccctcaagttggttcgagacaggtgctacatcaagtataaaatacctgaggcaacaacacttttttccaatcaaaattggtgattgtgtaggcacatcaaatcatcagagaaagagttcaacgtcctgccatcctagcttccgccgctctggccctacgttccctctcaatcctcattctgacttccggggtaagccctgccaatgagttaccgccagccgatccatctccggctcccccgcctagcctttgcggccccttcttggctatcgaatcctccttcttgacagctgcttgctgaacgggcggtacaacctcgtctacaactactgcgctctctccgcctttctcttttcgagccttcatcttgtctttcagtccctttcttcgttcacccttctttcggtcttgctcctcctccatttctgcgctcaatccagagggaactcttgctccgcctggctgagtagacgtccagtcccaaagagaaggttttgtataagccactcgacggaacaccgatcgaattgccttgtttggtgatagatcgtatgccgtccggaaggttgtaggtattgtggtagactccttctctgcatcgcacccaaccgattcgccggttggctcgggggatggaggacgggaagcagaaccgaaagaagcaattggcacaggaaccgttggatcttggtttttttcttctaataggtacttcactacgtcctcctgaccagccacgacggcaaccatcaaaagggttgcctccttggtcttaccttcttcctcccgtagccagtccgggagttcgcccctgaagtcttggtcgccctctttcaagcccatctcggtcgcccatttgtcccagaatgcactaagcgtctctactttgcctttacgaatcatctcaagcaaccgtctccatctttctcttgaccgctcctcttgttctgacaattttggcttaatgggcttgacagccgcaggtggagcctgctgagatgcggcagaaggaagtgctttgggtttgagagaggcaatatagctcgcctcgagctcagccaagacgtcatccgaaaggaaagaaagcttgaccctagtcagctcgtggtagcaacggagaagctcggtcaaggtaggccggcgcgtagggaaggggaacgtcctgatgcgttcgtcgtctatagatatacataaggcgtttatatgaatcctctgatcgtatacgaggtcagtgctgatagttatttctggggaagtacatactcttatcaataaccgcgccttcgtaaccccagaaactcttcttaccgctgacactcgctcggatgaacactcgctcggcatacttgaaatcttctgcccagttttctaacgttgatcggatgtcctgctcagatggatgactaaagatcagtgcgtgataaacatcaagacgatagatctttgcctcttacctcgtttagttggacctctccagctcttctgagttgagctccgattgaatttgctgcaccatttgcattatcattcttagattgagatcctccctgtttcttacgagctataattcgcaattcttatcaggttctgaggatccggattagaataacaggaatacaccgactgactagtgtatctatgaaacgttttatgtttcaataccttcacctctgccatctgtcctttgatgactctttttcctaccctcttcccgccgagcgagataaccatacctgcgaagtgaccccctgcgaccatgagcatgatccatcttctttctttctcctctccaccttcgagatcctcttgggtcaattgcagatctttcagccgaggaatgaatgcactaggtgaagtaagttcagacgggaagagtgcacggtagactccgagctgagtagaggggaagaccgaagggctaggagtcaaccagatgacagctgagcgaagagcgaatctgtttgaaaggaattgagccgagctgaggtcatcctcttcttctgctgcagttggccgggccgctaatgaagattcttccaagatgtcctccataggtctcgaagaacctgaggaggaggaggaggaggaagaggatgatatactcgaaccatcttcagaagcatgatcgtctgctaaagatgcatcatcctttgtcctcaaagatctaacagagaggtcctccaaaatttcagatggcaaggtgtatacatgtagtggtttagtcagcagtggatgacgggcgtccaagggtgttcttgagagcgaattcgacactttggacgaaggtaacggaacttgagccatctgtatgtgtgtttatgtatgtatgtgtatgtgaggaaattctgacagagggagtttggttctattgttggtgagcagtatgttggtacacaaaagaaagagaaaaaaggatgacgagaaaaaagattagagacaatgacgtggacggttcggttagggttatgatgggtgaatcactggattcgaattccctccaatgtcattttgggagcttccttcaactggaacaccataagactgcgcctcgaaaatgctaaatagtacaaactgatcctcatgaagtgtgcctatgagagtagatctgtttgtatgactagtcaaaccgagcacgccgaacgggactgatcaaaaagggaacatttagactacggcagaaagccagaaacagaagagcgatggagagtgtataagcctgcaagtgtaaacataagtaagtagaggatatgtgtatggtattagggactaaaggttggtctcagggtag

SEQ ID NO: 2018 - DNA, 7706 bp, Xanthophyllomyces dendrorhous
tccggatctcaaacatgacattgggtcagtcaccgattgagaagaatgcgccacggacgaaacatcttcgcccggtttgctatttgtattgtgctgagagacctgtatggggatcgatttcgattctggttcaacaactgctacaggaggattgatagcaggacgtcgcctttgaaagaaggagaatcttttcttttgagggggtggagctggttgatctggtactgacatagtcttatcagaaggaagtgaagaaggagttagagaaactcccttggaaggactattgtctgaggtctcttcttccaacttcggcggttttgaaagttgagtaagcgactgcaatttgggatgcttcaaattctgcaacgatccttcttctttcacaggcttgtctcccaaaaaattatgacccgccaggtctgtgtcaaacctggagaggtgcaagctgtctccggaggctgtcgctctaggtagtgttatatttagcctgagagcgtcccggttcaattctgattttttaggagaaaacgtatccgttccttcattgtcaagcatatctcgcacagctctgcctcctatcctgaaagaggaagaatgaccaagatgtccatctacggactgcgactgttgacagggcggagaaaatgttgaaactaagaactcttcgaggtcgatatgggtcgacatgtcttccgactgttcctccaagattggcaacgaaccctgcgacatacttacatcctccactgaccttccgaagctggatgatcgagtccgccaatgagccagcttaggagaaggaagatgtccgtcacttattgaggtatatctcatttcttgagcttgggattggatatagacaggcgaagaggctgatcgatggtgtctaggcatattctgggttgtaaccccagttaggaaggagtttgcaggagcaaatgaattgccatgtcgactctgattgattgcaagtttcggataaggcgaccgatccaagctagatatgctgtcagataaccccagagatggactatagagcgttttctgaagctcagagagagacacagaagtagcaggtggcaaagttgagaatatgttcttcttcgttaactgatcttgatcagattcatcatcagtcctaggcgctctcttgaaagaggatgccaggacataatgagatctgtttgggcgttgaagaggctttacagatgagagggaccgatccaaagaaagcagagagccaggtgcagtcgatattgaagaagaaggctcaaagagaaaagtcttggacatgacagaatgaaagatcggtgccaatatagcattgtccaactggtccatccaccagccacatgagagttatgttatataagtcagtcatttttttgcccctgactgcgagtagacttccttcgagatcgatcaaaaagttgcgcacctggctttccattttcatcaaccttgttctcaggctttccttctcctttggcccccatatctttctccaggctcttttttcttgccagatccactcgaataaaacttcttgggcgaattcaggatctgaagtgtctcccaagaacgactctatcaaaaagggttggcaagcaacaccctgagcatgaggatgtattgggcttggaggaaggccaagtgactcgagaagagatggaaaaaccggatgcagagcgtgtggaagctaagaaagattgaagatcagctgcaatcaggccgactcatactttcaaattgacgattctaaaccttaccatactctggatttcttccagttggctccccaaactgaatctggattctccagcttttaaccccgtctgggcccatgcccttaagactttctcactctctttgagagcatcggaagcgatagctagcgatctaagatggttaaggagttgagaaagagaaacatgtccagtttgaagctgtatttgttccacaagactcgagagtgacttgttgttctcgacctgaagagatacaacgaatcgaaaaaggccagtatattagtcatgtgaggtatgagcaataagagaaacaagcaagaaacttaccgactctttgatggatcttagtcctccttgaaccagttctgtttgagacttgattccccccgcgccaacaccgatccatcttccagtcaccctctccatcgtattgacgtactcgagaagaacttcttttcctttgtgtggcgatctctcatgcgatttgagggaagtcacgacctttgctctagattgagccgtcacaaaggcttccttcctatttgattccaagaaataatcagaacggaaactctacaacgctgatgcaaagagataatcgaagaatgttttgtactaacgaaagagtggcgagatggaagaaggtggcctgtcttactgcggatagagagatggtccgtctaactgggatctgataaacccttggagtaggggggtggtcagatcgaacgtcaacttagggaccaacgaaagggatgatttcctaccgagcgagcaatctcttctagctctttcccaacagaccacctatcttttccctccattaatcgaccatgaatgatattgagaaagatgtcctcagcctcctcgattgtcagatctggatggttgagttcagcgataagagcagcggttgagtatgtttcctgttggctccacgtcagctgagacggatgcatgtcgcgccgggtccaattctggacaggatagattagagttgtaggttgaaagaggaataagaagataaaagcaacgtacgaaggacaaatatacgagaaggtagcgagagatgaatctgcttgcatgaaacatccctcatacaatgaggctgtttacaggccggacagcatggcgttttctctatacattcttcaagacattacatcattcatatacatggacgttagcaggtcccgcggctgttgcgatcagtggaaaagaaggaagccaaaggaatgagaatgaacatgaattaatctggttgtcagtaatctccaatcggttcaacaattctttgctatttgccatcgagaaggaatctaagaagtctttcttctgaaaattatggtccgctcggttagataaagcattgactatatgttcggtcggatcagccggagtcagcgtagtgtcttcagtagttgttcggcggttacgtggcttgtacagctcgatgtcacgtggcaattgatcacagctcgaacgacgttatatttctgtccattcaaatagacaattaggaacaggaatattgtcgtggcatatatatgttagatatctaaagcttttgagtcacggcgctggccgacaaagtaacctgttaagttcgtcatggttttatcagtcgctggacgaccttcctcaccatctcacttatcattttatcgaatcttccatctgtcgttcactctgattaggtccaaacgaaacgctaccagtccgactattcgatcgaactcatcacgatgtcctctatctctactcgccgtctcactaaagaattgaaagatcttaccaccaaaggtgcaccgccaggtgtgtgctctctccctttcctcgtcaacccacagtcttcggtctagtttggttggatagccgatgataccttcaatgattggtcaagtagataaaaattgactgttgtacttcgttactcagggatcaacctgctgaaagcagatgatttatcgagctggctactgacaatcgaagttccaggcgataatttatatcaggcaagttgtcctcgcccttggcgaacacaaggatgaaaggctccatctaacatctcaaatacctttaactctggctctcttgtaaacacatttcacacaagggggagacgttttgtctcaaattcacgttcgtatggatactcgccaacgccaaggtatcagaagtgaagatgtcctaactcgagttacgattgatttgtggcccaaagatttggacctcagtacccaatcgattctccaacagtaagcagttaatcaatcagaaaatacgccaagaacatacacttacctactccgcctctggatcaggtcgtttttgtagttaatggcgtattcaagtacaattttcctctagagttctttgagatgtgtttcgcacactaactatattttcttgacttcctggaagagctccgatacatccacacgtttattcgttagatctttctcacaagattgattgcgcgaaacatgaattccttctccttctaaaacctatatatccactgatttacgaactccttacacaggaacggacatatatgcgcatcaattttaggagacgagtggaaccgtatgttctgaccctgtgtcctgtttcatctttctcagagatttcaagaactgacgttttgtttgttgattattccgtttttttttggatgagcttagcgttactgagcgcacaaacagtgtgtctgacgatccaaagcatgctggcttcgtgcacggtaagtttcttcccaagttttaactatgcacaggattaagaagtcttcatgaaatcctttcaatcattcaactgaggtatatattctatcggtttgataactaatctaggataaatctgcgtatgtaacctgtctcgtcatcctcattcatgtattgcgctgtcctgacgagagaggttgaaatctggttcactggatggatgtagaccgaaagataacgatcgatatattcgacgagctacaaagtgggtacatattgctacaatgcgcattttagacctgcttaccgagctgtgtctcggcctttcttcaacgatagctcgccaaaagatgctacgtttgtatatcacgtatgtacctgctctttctctagctggcatcttatgaccctcaatcaaagggactgattgactttcaactctggagcaaatttgtaggatgatacggtttaataacattccccatgcgcaaggtatttgtgactcacatcgtatacgtatttccgactggaaaccaaagtatccgttgtgtatacacttgatatatctgattgcatcacgatgcatatgcccagtagatcttgtataagatagcataaaagatataaggaagataagcgattaaaagttacaccgcgacgcgtgataagcaaaactatagtaatcttctacgagtctcaagtgatcaactggagaacggtcgatcaacaatccaaagaacaacatctcacacatgtcaaaaaagactttcacaccttccactttgaacatgtgggaaagcgtgttcgatcgaggaactctcttccttaaacaaaattctcttagtcaggctctggaatcgttcactaaggtataccctcctgataaaacaaagtgttatattcaagtctctcaaagctatatccgccttaaatacctttattgactatgttcgcatgcatctattttgatggttcaaggctatagagctggggtgcaaggaagcagtagtatttgacagtcgggccgtggtactagaaagaatggggcaatacaaggaagctcttgcggatgctcgtgtagtgattgagcttcttccggagtcacacaaggttcgtgatttcctttcacgctagacgactcgacaggcttcatattcatcttctttctatgaacagggatatactagatcgtctcgtcttttcgaacttcgatgccgctactctcaagcgtacaaaatgctttctattgcacttccactgtgtccaccatccctccgagaaacgcttgccgcaaaacttcccgacctagctatgaaacgagatgcccagcaaaaggctattgaaaaatccaaacgaagctacatcaaattattgccctacgagattctatcctccgtcgcacactacctaatgatcgacaaccctgactctgttcttcagcttgcttctgtctgccaggactggcgaaatttctgtttatataacagctcgctttggtcgagtttgcgggtaggaaggcgaagggcaatcaagaaggcgactgcattcttggaacgatccggaggaaggataaaggatatttggttcgaaaaggtcgatgatttgacctcaaaagatctatcgaaattgttaagcgggaatctccggggaatagtctcaatcagaattaacgaggggccaggcgtacggacagtctcccatatattaacgtgttggcagggtcaatttctaccgaatgttctcaagagtatcagattgagtgtgtcctcagaccacgccacctcatatctcgaggactttgaagatcacttttggcgattgtactgtccatgggagctcaaagacgaagactcttcactatcagcgaggaacgtaaggacacgtagcaacagtggtcgagtacagatctgtacattggaatctcttagactcgacaacgtcagaatgaagaaatttttgcaggttccctcctggctcggcccgcttcctttgctgaaatcacttcggctatctcacgtgagggtcatgtgttttgatcagcctgtggaccattcattccagaagttccttctttgtgcccctaatctcatttcccttatggtggaaaggaagtcagtattaggaagtcaaaccactgtcacctcttttccagctcagatcattcctcttcagaaattgcaggtgcttgcccttgactcttgtccatttcaatatggatctgatcttcgtcttgaccatcccgatctggaagccctccgtctttgttcttcaaactccataagtcctgccagacatgtctatcaatcatatctatttgaaaaggacgagctcccatcaacaaatatgactttcgtttcttctcatgggacgatggatcggatgatccgaccgaaagcgtgcgcagaaaggctgactcagttgatcctcagtcagacgagaatcgataatgaatctctcttcatcagacaccttcgatttttgcctgcgctgaaattgttgtacgtcgatggatgtaaccttaccaatcggacagtcgaggcattgattctagaatcagatggaaatcaaaactggacatgccctcggctgaagacgctcaacatgagctacacagaaggaatctctggaacgccgatttgcaaaatggttgcctccaggctcgttttgcctgattcatcgatgtcgttggcttcttcaaccatggttttgccttctacaagttcttcccgtccttctccactgtttgcttcatccagctccaagcgtgacatgaaaccaaaccttttccgcccctgtaccccttctttgccgctggaaacttcttcttctgtaccactgaaattttccaagccatcttcatattcagatttgcgttcaagcagcgagcagaaaacatctctcaatctcctcatcctggacgggtgcgtggacgttgaacttaaagcgatcgagtggctgcagtgcaaggtcgcaactgtcaagtcaagatacatggatccgaacaatccgcgcggggcttcaagatcattcactgaatccgtagctgctcgacagggaggttattaaatttatttctagtttaaaccagcttttatatatgtgttatctgtattcgtttctgtatctatttctgtggtgttgcaaaacgatggctgatcaggtaactgctgatatagaaggtgaacccacccgtctcgctcatgtgttctagctacgaagtgtctatctc

SEQ ID NO: 2019 - DNA, 6212 bp, Xanthophyllomyces dendrorhous
aggatggagtcgatgaggcgcaaggggggcatggattgattaaattgacggtacaatgtatagctgaccagagaataccgtacaggcatttcatgttaccagggggaggagaaaatgagaatgagggatttgccttatggaaagcttcctgggccgattcaacctccacctccacctccaccccaggaccgagatcggcatcacctgaactagatctagaacaaacagatagagcggcttcaaaaaccaaatccgggagcagccactgcaagagagttttgccaggaatacaaagtactatcgatgaggcactcgttgtgatggtgaatctgttgatcttacaatcagggatgttctttgctggtccaggaaatggaaatgaaatctcatcgggtatgctgtaattcaaagcttgttcatgttccctttgacttcgtaacctcacactcaaatgttgcatcatatttcgactgtcttgtcattcgaattttgatatttatttcattgcggcttagtttccagaactcttcttttgacaggaaatcctcgatcggggaagacgacaatcgctcgagagcttactgagagattggaagaggatgcacgaactttgtgtcgtaggtctttgtgttgttctagctatctagctctcaaatcggatctgaccagttgcgttcctctcgattattgataaatctcagatcctatctatatggacttaacaaagcttgcggaggagagaataccagccatcaaagaagaatttataaaactggtccggaaagccaactggttgagacctagttgtctagttctagatgggttagacgcgctgtgtggcgtagaactagaggttagtcttcttctgctcacggcagtgtctcccatcaacactgaagttttctggctgacagaacataccggacggtgatgacagcatatggatacaacccgccctcgacagatcgcagagttcatggtttctatactagaaccctcctcggcgagttcagaaggaggcagactgaaagacggtgtagtagtaatagcaacagctaattcagctctcgatgtccacccactgttgagtgcaaaacacgttttctctgggagggttggaatccattctttgacaaaagatgagagaaaagaggttagttcgacctgttaatctatttcagggtgtagagtaaacaggttgacttacgactgatcgtaaaaatcgagtctaggtccttgatcatcttctcgcaactaaaatagcgcaatccactttgagagttgaccctacccgcccaccaaacatcatttctcttgcaactgagttggaaggataccttgtttccgacctcaaagatctagttgatcgtgctgtacaagagtctgccattcggaatattttttctcgaaaagatgttggtttgaactttcatcactaaatcatttatctatcttgagacgaccataagggactgaagactctatgctaaattgtgtgcttgaattgatttcttacaggagttttttgtttctgcagaagattttgacaacgcacatagtggcttcgtgcctttctctcttcgagacgtcaaattgcacaagtcggaggtgaagtgggatgatataggaggtaggtcatgctcgaaagctctctactgattgtagcacgcgcttgagagactattatcattgattgtcttctttttttgctcaacaggattgatcgatgttcgaagaacgttaagggagacattggaatggccaacgaagtacgcggcaatcttcactcaatctccacttcggcttagatctgggtacgtaagattattttattcttttcatctcacaatctcattgatgaaacccagtatttgcaacggctataattatcttcgacagattactactatacggttatcctggttgtgggaagactctgctcgcctcggctgttgccaaggaatgtggactcaatttcatcagtgtcaaggggcctgagattctcagcaaatatattggaagcagtgaaaaaagtgtaggtgttttcacatcacaccttgcacaaccgatattggataataatcgatttttgtttcatctactaggttcgggatttattcgaaagagcaacagcagcaaagccttgcgtattattctttgacgagtttgatagcattgctcctaaaaggttcatccttacactcgaattactgcgatatcgatatgtgcaattcaagtggatgagcttgactgatagatttcttcttctctgacgtgactatctaaagaggacatgattcgaccggagtgacagatcgagtagtcaatcaaatgctcactcaaatggatggagcggaaggtttagaaggagtttatgtccttgcagctaccaggtcagtaccactcgaagctcttttgaatatgtcccattgtactgagtttctcgactgtggattgcgatatcagccggccagatctgatcgatcctgcgctacttagacctggtcgactcgacaaaagtttactctgccccatgccctctgagagtgatcgtctagatgttagtggatcttttagttctttctaaaggcatatattcacccattatcttcttcgtccgacagattcttcgatccctgacacgcaatcttaagcttgatccggcaatctctctacctaaccttgctcgtcagaccgaaaatttttcgggagcagatctcggtggactcatcgggagtgcccatctgcatagtgttcactccacactagatgatgacaatcttgacacatcgcccaatcgatcagtaagaaatggcgaagagatcaaaggagaagtactcgtgcttagtggcggaaacaaggggaagaaacttatcgcccgaagccgagcagaggaaggagcgttgaagaaaagggttgctgtgatgctgaatgccggagaggaagatccagcagagttggttggtaaaatcgccaccaagagggaccgacctgtgagttatatacctcttgatactatttgatccttccttcaacgaactgacctgccaacttgatatccaaacattaatatagataatgagaattgagcagaaccatatggatagagccttgaccagtgttcgaccctccgtacctgaagcagaacgacgtcgactcgcccgtatatacagcgagttcgtcagcgaacgatcagcggatggattagagggcgctgaaggtggaggagacaaagtcggcagtcgtgtgagcttgggttgaatcgcctgaggtcggagcactcatgaagataaaaatggcttttccataaatgagacacgaatcaagctgtgaatggttgcagtctatctatgatgaatactaaggttgtaatcggaagcattaagcgtcttcgttgcaagtgatgtattcacagtaaatccgattggtctatcgtgtttagcttagacgcgtttcgatcaccatcactatcaccatctatcagccgtccttcgggtcaaattaacagaaggtatgctccagagggacctgattcatgccttggtttcctcatcaaagtcttccgccatcatgtgaagtcccatcgcatccggatgataaggactatacatttgatgagtgtgtcagccatgtgtctgacgagagcagctacagatgtgctgcagataggttcgcctttcccaatttttaacatcgtcgaggagagtcaaattattgatcttccaaccttgattctgttcttcagtggagccgcacaacataacttgattcttcttcagtctttaaaacagagtatgtctctcagatgactgcatgatggcttcgtacgatacttcagatcctgaatttacgcaccccctcaggtcgatacttctattctacgcgtttgctaccaactttcagatccccggtcaaccctcctaatcccatcccagcaccacatactcttcaagatttaggaacagtatctatgctcattggaccctgtcaatttaatcaatgcacgctgtatcaagttcaatatctttccggtcatctcgagggcaacctagatcgtacatcagctcagggagatgtacaaaacacctatccagaaacagacgctttagaagatttatcgtttgacaagcttgggtggctcgaccttgagcaagtcggacatctaaacgaggtgcatgcagttggtttgaacattgaagggttgacaaacatatctacagtccagagtgagaagttgataggcgaggccggagagaaagagagcctgaagtcaggtggaacaatggatattgtaagacccaggagaggcggtgccaatgaagaggtactacactctcccgattcaaaactggcctctgatatgtacaatcttcactggctaattgtctgatagtctgataagccttcatactatctacagaatcagcgctgcgcgccccatatcaattcctccaaacttgaagcttctgtttggtcgtcagacgctcgccgtctcagaaagcagaaatctcaaaacgctaagcccacattcgtgtgttcatgattctgtctactgtaacaacactgtatgcctcacaactaattcgactatattttgtgcagaccccggagttgaaaaaggccatccagttgacagcaacacttgagattcgtctggcggaactcttgtacaaaacctatctagaacgagctcaagagtctgaactcatggagctcaatggaatcatgaaggctatcgaaagtgatgttgattctggaaggtttgactgggaattgatgttagcgaaggcgaaaaatgcgcagagggtgcaaaggatgaacaaggaacaaaagagggaggaacctgagaagagacgggacagatccgcttctcacctcgcatcttcccatcgatactcaaatctttctccttcatcatccgcaaatgcccagtctgcgaactccgatgacctggtccagtcaaacaggcctatagaagcgacttcaatgaagcttagctctgcaccaatgctttggtctcgatcgtcacctaaatgcttggcaactttagagaccggtcattatccaaaccgccaaccatacagactcagtcctactcccacacttccgaactccgatccgtcacctctcggaagattgagatccgctgatctagtttctcgaatccatattgactcgttgaacagctttgatcatttcgcgtttgccaatccgaatttgtctgtcccaacgggcgccggttcgtctttgcacaacacacgattctcatccccgtctgttgcgttagatcattccattgcccattccgttaatggaactgagcaaatggtcaaaaacgggaagagacttaatgcctccgatcatcctcacgaacaaggactttcgatgcaaaaccgcaaagctccgattcaacatcatatgcctgttgaagaccatgcctcaatatcctctgagcgtcctcttcatactctactaccggtgaacgatgtagttgtctcgtttcctggagatactgaggagttgtttctcattcctctttcccgctcaattatctcgagagatcttgccgaagaaggagggtctatacgcatctctttcttcacccctacaccgccaaccatactcccaccgccgcctgttcattaccgtctcaattctttgaacttgacaccacagcatcgaggttcggacaacccaaatcttgtccgtaagaacagtggggtcgacaatgatgagagaacagagttaatgactattgtgatagagaactactctgaagagacttggaaggcgttggaaagtagttacttaggacatctgaaggtcatttttgaagggatgaatgggagggaagaaagaatttctgagtttcagtcaatggtctgtcgtcttcggaatagtcaatgaaccgtgcacgactaagctgaaccgttcattcgtttcctcgatctcctctatcacatcagcttcgccttggactcccatcttcccctgccactggtttaccaaccataccgatgagtgaggagtctgtctctgctcaaatagatgaagaacaacgaagggccgcgctagaacgaagagatcaagagacaaagtttttccgtgatgaggcggctcgggtttactttgagacgaatggacaatggcctgaagattacgagccacctttcacttttgaggaattcgagaatcttcaagaaaatattcac

SEQ ID NO: 2020 - DNA, 3536 bp, Xanthophyllomyces dendrorhous
atctggaggacctagaaattccagtcaacgatgagaacgtagggagagctgttacgccgtctcccacgccagcagcagtagtagtaggagaaagaagaaagagtgacgtgaagggggtcactggtagaaagagaaagcagaaagggcaaaaggcagcagtagcttctgacgaagaagacattcttccagataacctatcagaaactattgcgaaatacatcctgtccatcccaaaccgctctcaaccaaatcgaaagatgaagacaccagactacaccatcgaatcggacagagaatcaacacctcttacaccaatcgcctcctccgattctgacgaagatagctcggaaacggtggttgtcgaacgtgattcttctcagtacaatttttccgaggaacaacctcccaaagcatccacatatgagcggcgcaaacctcagacttcaattcgggttcttccaaagcctaagaaagttgccagatactccagacgaacaaccgaaaaacttgagcgtcgtcagcatgatcaacgtagcttcctcgctcactctaccccagcttattcgaaggtctcgcccatatcgcgggtacctaacagaacaggggatagttctggacgcgatataccttcaactcgagaaagtgaaagtaaaaatcaggaaggcgacaggtcggattcggatgattcagacttgttgataatgtagctcacctgctatgaatagagaagacttttcatatgcattggtcagaatagagatggcacgagagtatgtgtggcaacagcaaatgtgttcagtacatgagaagaagaggccaactagaaagatagtgaaactggtacaaatcaatgagcagaagcgaagcaaatgggtaaaagaagatggcgagaatgtaggtatcgagataatttaagaagtgcagggtatcatattcgagagatattcgagaaatagagagaaaacaaaaggcaacgataccattgtcctgacgaaaatcaatgtgagaagaaaaactgggagaaaacagatgcagatgcgacaaatgagaattgaaaacagacgtataagggaaagtgaaccgggaaatgggaacaaggaacacatcaaaagggaaatctagcagtcaaaaacctctccaagcgcctcggcctctgctcttaactgttccttctctttcttaagagcctcttttttgatcctgagagcctctagttttgccgcaagttcgttgccagcggattcatttaccgagaacctggtagattgtaatgtggtagaagtagcaagagaagaaacggtagacttagcccgagagggcaaaggagacacactccgttgatggatgtttgggccgttggaagggtcaattgcaggatcagatggaagccaggtttgagctcgaatcggcgctttgagatcatatgccggatattgagagtcagatgaagaacgatacggagttggaccaagcataggtagagggttctgcgattgggggtgagttggatagtaagcgtatgcagaaagtggttgatgagtgagcaagctaccttcaaggtcttgagtaggcccactcgataagtttatcagctgatgatacttattgacagggtctataggagcggcgagatgtggaccgcagtcggagaacaatcgtttggaacttttgggggtaggacagtttgcaagggggatagaagacgggtagccgattagtccggaggcagcagtaggatatgaagtaagccaaggttgggcgtccttcgcagtgaaggctagttcggaaaagacaattgcgcacacaagcttcagcacatattctagacctcgattgtcggctgagcgaggaaagctaacgacagcgtattcaccttgtttgtacaagatgctagaagaaccggatttcgcggtgtctttattcacctcgttttttttctctggagatcgaccaattccttcagcaggaacaccgaacccgtctttgtagtctagagcccctgtcatccaatctcgaactctatcatgacccttctcatcaacatgatctcgaattcggtctagttgctgacgaagctcgaatggaagatctggatgagatcgttcaacagccggaagagaccgatgtagaaggacgagttctttcatccgagtttgattgttgagggcatgagttcgcacgaaatccatccatccctgttagaagggacgaacaacacgtcagaacgatcaatcaaaatcgtgttagctgagcaataaggataggaatgaaacctactgaacgacggcgcatgttgttgaacctgttttagaaaacctgatcaactgacgaaagatgaattgctgaacggaacagaagcagaataaaatctcaccacaggttgatactatttttggtaagatttcttgctagcgctaattcttccttctcctgcgctgaaggataaggatggtctagatgaacgatgaaccagtctcgcagatgacgaaagctagatgggtgctccgtacgaggtctcatcgagcgaccagagtcggccttggaagctaaaattttgggcggtgataccagattacgggaaggacagagttcagctatcgtggtaacgatgaagtttcaaatgaatcaatatatgctaatagatcagatatatatttgaaaacagttgtatgtattccactcacgggtattgttggcattgttcagaattccaatgactgtagtttgaaagtctttatttccttctgggatgttcatcatacatgaagccaaggtagatagaaacccaacactcgcagaaatctcttcttgaaacgcgaacgtcaagagaccctgactcctagctttgcaacgctcttccgcgaaagcgtcgtatatctgactgagttcaatgggaacaccagcacggatcgagatcaaaaacgtttcaaccaaagagtctaagcgggcagagagatctgacgctggagatggttccattttctatctggtgcacaacttcagtctgagtcagtacaataagagagtcaagagggctgaatcaaagcacgaacgaggtaacactatgaaagctgaggaagaaggtcagtgtctaaagtaagtactttgtgggaagaagggttcccttcaaggaagagaaccacatgcaagtttaaataagacaaaggatgtgaatcttgccatgaaagaggaaatgaatacccaatatttctttgatcaataggtcggaagggatttcaaggaccggtctttcaggggaactcgtgcttgagcccgatgaaaggggattttgctttatggatgagaaagctgtgctcccccgcgtaaatggtcacgcaaaattgtgattacgctcaggggctatattgtttcaggctgtcgtcgattcattattcattctctatcgtgtttcatccttcggaaatgtgagaggacaaaagaaccttttccctttgatctttaacatcttggtatcgcttacctgccctaaccctttccttttgattctaagcttcgtactaataatcttataagag

SEQ ID NO: 2021 - DNA, 5768 bp, Xanthophyllomyces dendrorhous
ctaataatcttataagagagggtgcatcagctgcctcgtgttcttcctgtaattcatcatcactcacctcctctcctgatatccaagcctctcctgccaccgtgaacccacctcacaatacttcaaccttatcaagccctcacaacatctaagacaggtttagattgttcattagatattcacctgatatgttctggtgaaactacagcttacgatgagaatcatatggatttgtaggatgtacagtttcacgaagctaccacagaaatataccggactgggtgatgtctttgactctaatatagactctttgtcttctaaagagtttgccttagaagatctgtatcttccaattccaacgtccatctgcgagactcttgaggagctcggcactcctcataccttggctcgaaacctcggcgcactatatctttctagagctatggcgctcagagagttgagtctctcacagttcgacaccgctttccctgccgagcgcactttccttttggaagcaaactcactcaagctcaaggtctttaaaggacttctgaaagccactctcgaaaatcggtattccatggagcttttccaccatcatgaaacgattattcagttggctggtgtttggacgtctgatgatgaacaagctcctgtttcggtccgccgctcatcgtttactaaggttcgtgtgctccaacattcctatcttcgaatattcatatatgttctttcatttgttctatatcgtcctttcgatacaatcattcattgcttatatttttatatttgaggcacaatagaacaccattgatactctccaagctctttacgacctgaatcagtatcccaatccaattgagctcaagactatcgcggtgaaagttggtttgcagcccaagcagatcagagcgtgggtgagtgcacaggatggcatatgtactcgacttgtcaatgttgactaagttctttattttcgcttcgtcttacgactcagtttcagaaccgtcgaaatcgacgatcatctcccgctagatctcacaagaaacctttaaaaatctcaacaagagcaaccgttgcctctgatctaaaatttaactctgttcggaaaagatgttctagaagaactacatctatcgagaaagaacggaagaccgagggcgtgcccagccagcttggatctccgatctttcttcaaaccaacaagacaccttacgttccgcaatctgaagggaggtcgagagttggtaattctttagttgctggcctcttcgatacctctccgaacgagcaggatgcatatgctctttggtcggcagtcgtttcggatcgttcctctgcatacgctaattccaaacacgttcctcaaatcgaaccttcccttgctttcgccatccctgagccagccgattcgatgagtgctcaacgctcggagaatcatttcaatagttgcagcaagtcttcctcttctcatcctgcctttcctcccgtattcggttcaagcgaaaccatggaggtggatccagtggattggacgatggtcttcgctgcatcagattcgagaaatattgcgcctaggtctgagaagccgagcgcgcgatgggaaacgaaaacggggcttgaagttgaggacgcgatgctcgacgtcaatttaaacatgacgaccgggaaataaacctcttgtgagaaagagggatgtttccatcgagagacatccgactatatcatggtacgtctttattttcacatctcgttctgaaatatcggagttttcttttgatgcatttttgaggttgggtttgctggtttttctcgctccagccttaatgaaatgttattcttgtcataagttcctagcgggtctgtctcagcaggcaagtataccgacttgatcatcatgtgtgctttcttcaatccatcttgcaggtcatgtcacttttcactcagtcgccatccagccattcttgcgccttcccctcacttctagatatgttgcattcataatttctcacggtacatcgcatatatacccacgcattttctcgattgatcaacacactgcactctctttcacttcttagtgtttgtttcttcaacaatgttatcgggtagagtaattcaattaccccttcgtatgaccctcattttcttatttgaccgtttgccgtcttcagccgatgtctgtttacctctttgaacggctctttaatgcatcttcttaaaaaggtttgtttattcaatgtcaatgctcgttgctcattactctcaaccatagagaaagcttggagtctttcatcttcgtatccatattcagatgttccagccatcaaccggcagttgaccgagataatttattctcccaatttaagaggtttacgaaagattcaaccgagacaaaacgggtcgagttagtaacgattcgaactttccctgtccaactatttcatgtgtgtgtgcgtccaggtgcaaagaattaatctcttcatgaaactcggctgtccttttgcggttaaaaatcatcatcaccatggttaaacaataacgtattgaaagtaaaggaacggaaggatgaaaacgtgcaaggatatcgatcacttgtaacagacgagaaaaggcggtccatatattgtgcggctaatgccagaaagtatcaaatatttgattacgaataaagattcaacacctcggggtcatctatacactcggcacgtttggaggtcataaaacacataaggaaatacagagaaacaacgtgaatctaaaatagatcgtagaagatacgattggctattgggcggagtagaaggtgggccggaacgaacgaatgtccgttgaacccggccgggttagtaggaatttttctaagcccaccacacaagattgatttctgtcacggtctctatcatagggtgcgaaaagtgagatgagcggttttttttatatctcggttccatcaatacacatgtggattcgctgactgacgaagcagagatggtcacggtcatgaggcgctactgccttcgtcgagcataagaaggaaggtctgtcttggtcaaaggggtatcttgttgtggagccaaggcatatctgacggccaggaagcaggaatatatatccatgaattggatttgatcttccaaagaccaaaatcaatccgcataggttgggtatgagttaatcaactgtgaggcgtaggcctgccgggcaacctgccgggcaacctgccggacttcgatcgaacaaaaggttctagattgacgatgcatatatccgttaaactaaaattttctttcactttatcaacccctttttcttcgttcctgccctgtcgtgccccaccccgtaccggtcatcgccctggcatcacccggggctcatgcgaagctccagtgccaaacatcatatactccgaatccagaactcggtctgtatggccgagatgggtgtagggaccaatgattccagctaatctttgtccttcttctagttcccgtcattgtcttcgttcttctcatcaactacctttcttcttttgtgtggccagcgcttttcgactatctcatctaatttcaaacacctcttcaataaagcccgaacgtgcaagaagtagtacatgttttttttccttggatattctctaacccgtagctagaacaaaagtttagtatatataccctctctttcaaacatccattccggtacatcggtctttcctactttctcttcgtccttgaattttctcattccttgctcctatcttctcgtcctcgttcaaaattcttcatttactattcttgttccctcctgtagcatcttctccatctttcgccctgtctcctcaattcgcagtattgttcatcttggccttcgccggagacctcctgtcagcatcagccgttccgtagaaactttcatcgcccgtttgcacgtgccggtctcttcattctatcaattccaacatacactccaatcgcatacccctccatatcttgtcgcacatccttctcaacagtcaactctttcatgtttcctcaaactgaggccgataagcattacgcgattgtccaggcggagctgatgcaactcataccactcggtgcatccgcaccgtctgccgaccatcagagcggctccaacggcaagcctggttctagtctttcaagcatcagagtacgcatcaccctttttgttttgattctttctatattttgtcatgtcttcatagtattcatcaacggcgtcgttccttgctgtctatttctttcaccttctctttcattttgatggtgtggtatcatcagccttcctatgccgaaggttagttcacaatgttagaaactgtgcgctccatcggttttatcaataatcagttctcacttttttttacttccctgtacagttgaatcaacatcgcccttcaccccggctttgacgttctctaagaagcttgaacagggtgatgctttcaatgaggaagattttgatgagagcgaactatagtgacgacggcggtaagtccgaatgtgtgggtttccacttgtagtcatttaacaaaaatagatactgaaagcaccgcaactttatcaattttttagaggatatgcctcagaccccttgggtgccccaggctcctttacattccgaccgagatttctttctatcctttcagcctctggcgcctttatctatccctcggccggtctcatgggcctcagattttccgtcgttgaacaatcagacgttcgagaacaacttcctcggtcttcggctcgaccttccgcattcgataactgctgaagctcaatccagtacccagacccggttgtccaatcgcccacgtgtgtccacagttccggtcgaatccaatgccattcccgaacgcgcgccttcccatgtctacagatcgtggtctgacctggagaccacaagtcagccagacttgaagaataatgattctcataagatggacaaacatgtccgaccgagttgacacaagctgatggaccaggtggacagcttgtcattagatgaatcttcgagtcatctcgaacattcttgttggcccggattgatctcttgacatttcttttgcctcagaccagatacagtcaaacgatcatactttcttccattcgaagcatcggcctaatcaagcatcctcttctgcttgctcgttgtatattttgtgattatccactattcctcatccctgtttcaatttggtactctgtagcgtcctttcagtcgtgtagtcatccttttttctttttctttttgtgatattctcgtacttgtctctcgtttcacgctatgatgggtctctgttcttctccttgagtttccataattcacgatccggtcctagaagtttgggctttcttgattacagtccgcaaccatctcactcgtttttctcattgtatatctccgtctccttctgtctatctctccttctgcctttctccttggtcttatatgtgttttcttcttctcctttctctcctcgtcatcatcctgtatcagtgttagaggttaggtcctgataattcatatgtatactcgcgcataaagtcaaactcaaggttcaatctgggttgcattacttcctgttccctctgccttgcttgccttattatcataggctggcgtctgatatctttgatagcaaatcgcatgactagacttgatgatatactgaaacggacgaacgcgatattgaaacacacaaatagcctattaccccctcggcccaaatatatatatatata

SEQ ID NO: 2022 - DNA, 39922 bp, Xanthophyllomyces dendrorhous
tatatatatatatatgctattaaaaaaaggcctcgaatgtagtccagaaatggatagaagactgaaacaattattatcagaagaaaggtaaaaaaaattagataaatcgcacagatagataccgaccgaaaaaaggaaacgccggcttggcgatactcgatcttggtagaagcgagagttcgatcgaatacggccttcggcctttgacagtcgaaccaggcccatgagtggtgtaataattgtaactccgtatgacgcggacagtgagcatctgacatcaacgatcatctaattgtttgcctccttggttctgctctgtgcagccagaagaaacgttctttgggagatggccaccggtcaggtgtctgattgtgtcgcgtctgtaggccaccttctgggcttaccgcgtccccgccttcttccaacctagggttcccagttgacaaccgctggaatgcgtagtctctgtagccaccgccgcgtcttgttctgctgagaagtgacgcttctcgtttcattgggcaagccttcatctacttagtgttctcagtgactgtgctcgtatttgtgcttgtgcctatgcttgtggttctgtgcgcgctgtcttaagatctgatgcctcaagtctgggcattgtagtgctgggtagtatgtagtacaatagcatcttggcttccgcagaagacatggtctggccgcagacggtgagatatctggcaaggaggatagcagacgaaacaccaggctcagcttgcataacactcaactgagtcgattcatcgctgatacaaagtccggcttaaagccaggtatataagcctcgcagttgacacgagggcatgtatatcgttcccgtggcgtagtcacctgagataagacaagtctactcattgggaattagagagctgaaacaaagaatgatacttgtgaggtgcaaaaagcactgtgtggcatgaaagagatgatcccgtagagtacacaggacatggagaagagagcttgatatatggtcaacgtcagtagatcgctccaggatttgaaagacaaagtataaatatacctcaccaggaaattcatctatttgaagatttgtcaatgtgaaacccctgataaaggttcgagcaatgaatgacgaatacgataaaaccagaagtcattgaattagcctacagcaacaaaggcattcagtgcggcgaactgggcgttgagtggaaagaaagactggacggccgctgaattgctcacttcgaacatcacttagtctgtatatttgttcctctgtttctctctaaccgttttgtcttcttttttctttcctgacttcaccttcgccttctcatcccaccagccagcctcatccgttctgggcttgacaaccggtcaactcacggtatcagtgaacgacgatatttatctacccatgcgtcgactcgcacaaaatataactcacggcgtctgcttcacttacctgcacgtatctaccctacacgtacgcgtctatctgatcttacttcatctgcatgcctgtatctttcgcactgcatcaattctagcctccgacgccaccaaagtggtgtacagaccagctgtgtgtaagcagacaggtgcaggagaacgctccatgggctggcttgatgacaccgttaagtgcgtctcgtgcgtctggaccgttctggatcgagttcggattgcagatgaacgatcgccggctgtttccgcttctctcctcttgccttgcgccttccgcttttcgcttgcattcattcatccgaatcatgcaccttgctgaagactggattaaattgaatgtattgctgcgtcagcgtacgaagtgtattcatctcttaattaacagcccaactgaccgactaaccaagcgcttcgttaacagacctgtcacggctggttcatcgagcactaccagccgatatcactgctcctccgatcctctcctccctgtcttatcttgttcctcgtcttgtttacatctttgatctgagttcttttcgctatgattttcgctgagagctggttgcttaccgtgatcgccatggcccatagcttaccatcttggatctggaaacatctggtcggacatcatcagccaacacaccttgggagacgaaggcagctcgatggactgaatttgatagattgatgatattatagattgtccatctgaatcgaatgggtggtagtgtacttgtatcttcatttttcgagggctttgttcgatcggtgttgttttgtcagagcaactcacttctcaggttctttgtccttgcccgtgttgttccttgccccatgattacctgccctatacttacatgccttgcgatcgttctgcgctgacttgcactttgcgtcactatccagatcatgtccatctagacgtgcttgtcaggcagctttcgaactaacttggccagaacgcccagactcatagaaacatatgtgtccgaaattctgaatggcccagctattgtcacaatagctgtgactgctgcgaatcaagggactgatcctaacgaaacgcccctctacattggtcgattggaaaataaaaaataaaaaatcatgggtaactttctcctcacagtattagttcgtccccgcagcatcgctttcagcgcgacagccaggcacactgtttctagactgaagcaagaaggaagagtaagaccaaaagtaaagacgggaaagcagaatatggagaacggtacagaataaaactaaacggaatgttgactgataatctggctctgatggaaggtaatcgcgtccaagtgttcatccctctttctcattttccctctttcccttccttcgtttactgaataccctcccgtacaaaatgtcgtcgaactagcttgaaattagctcaagaatcaaagagaactgccagccttggctagacataagtataacaacgaccgggaaagctcttctttttctcctcgtagtttgtcttgttctttcctactctcctactttcacacagttctaccgacttgcaccgacttctgcctcaaataccttcttcttaaacgcgaccttctctcacactactcatcctgttcccagcacttccttatcacccattttgcatactatgagctacaattttacatcctctcctctttgcactccgtctctctctctcatctcgaccgcatcatgtgcctcgtcggacgcacctttctcacctccaggaatttgtggcatgcctccatcgcctagccctgccaaccgaaccgctcctcttactcgatcgcttcggatggaaaagggtcaccctctccaagagctattcatggttcgtctgtccttccgactggcttctcctctctcggcagctggctctgttacccataattcctcttagactcgtccgccgactaataacttgtttctgaaacaatcccagattatgtaccttggcaaagcgcgctccgagagcattcaacagcatgaagtagttttgggtcaatgcgctcgggaggatagacggactgatgaggctaaacgagctgagcacgttggccgaacgaagcttgcggggcgggttggacggacgaaacttgctgagcgaatggaatcatcccggcctaacagaaaactgaggaagactgcgaggatgaagattgataggtcagtcaaaccttccgctcgtcgaacaacaggccccgggctgatgtgctatttgtgctctacgttctcttcgccctggcagctcgacgtggaagccgcctcgagagaatgtttccttcaatgatctttcctctaagtccctggctgtctcaactgctacttgtacatattttttcttcggctgccccttcacgtatctttctctctagtgaccaacctcatcatgctgaccttcttcttttcgtttgccgtaatagcgagccggacgaggacggtcagccgagagcaacttgcaacttgtcgagctccgtccaggtctcacaggaacccaagagtggaaggaaggctcattctcggagagctggagtggccgcaaaggcggctttcctgcgtgtctcctactgtgcctcttctttcttcaccctcctctaagtttcttgaatcctcgccgacgacatcacccttgctgggcaaacgtgctcggcagccgaccgagtctgatctctacatcgactctgttgatatgttcctcttggccactaaatcggtcacttcgcagatggaggacgtttccgagtacagtgggttcaaagattcatcgttagacaagccttctggagagtcgtctcgattggctaagagggcgaagtattcgctatgtgtctcgcccaagataacctctcaaccttctccttctattcaatgggcctcggcaaagtctgggtcaagttgtatggagctttacaagtcggaacatcgacgaccgacggctctctctcagcagcgggcgagaccggtagctgacaaagaatacatcgggtctgttgaagcttgggtcaaacacgttgagtcagccagactctattgtgatcgtcataagcgggcatcgtctcgccggtcattgaagaacactctcgaggctggctcgtcttcccggccggtgcacaagccagatcagatcctcccgccgatcactcattcggttacctatatggaagtcgagtctgatctatctgtgctcgggatgaacagaaaggacgaagacgtgtttagtgtcggttttcttgcttttgttcttctcttcatgcttatttaccactgtctgtatctgttgtagagtgcttctctgtctttctctttatttggggttattttcttgaggtctcttcactcttctcctttttttgattttacgtgttgtcttgatagtctgcctctgttactttgtaaaattcattacaatgatcgatgtccttgcctttccatgttcgttcttacatcacacgatgcaatgctctggtccaaaacttgtgttcgacacgtacgcgcatccgcacgaaattatacacaacgccgagtatccatgtgagtatcaccttgacggatcctaagcttggtaacatcttttcctcttccatctctctgatgctaacggacatatgaaaaagggaaagaggacaaatccaaagggacggactatggcctgatatctactctgttcctctcaaccagatcttggttcatatatcctgactggaatgacggagaaagaaaagaaaagaaaccccagattcacggtgtatctttccgtctccttccccccgcgattgatcgcaaagcgcgcgcgggaacttgtttggaaaacatcaaatcagtcgtttgcgactgacgtaatgcccgacttcggctgtctccctaagtatgcatattctttcgtatatatatatatatgtgtgtgtgtgtgtgttgtgcggtactcgtatcacctgttttcgtgaccccagacgacccgagaaaggtgcttgaccaagtagaaaagatagaaagtgttcaagccaatgtagaaagttctttgtcttctcctttctttttcctgtcttgtcttttcttcttctttgttcttgttgacaatctggacccgtgtagcaaaacactctggtcctgagcaaagacgatgcttgatggaagaaagaagaagaagaaatcgaggaaagcgcaagaacaggtggatcccgcagacctcaggcttcggccaagcgcccactgacgatgaatattgattgcaaggtatagagcagaaaagacgaagacgaggggatcgaatgaacaatgccatgagaacaggacagagcgaatgaagcatgtcttgattttatatataagcatgacaaggggatggaagggattatcgagtgattgtgagtaacttcgggggacgcgaaagggatgtgatggtcgagatgaaaggaaagaagaaagaaaggagataatggtttgaaaggaataaggaaagaaaaagtccattgcttaatatacgacaaaagaggaagacaaaagaaaaaagagggagaggaagaacggaaggaaagaaatggtaacccttctgaaggggggtatcatgcagacgaaaacagatgaagaagagaggttgaaaacgaccaaggctcatagcctagtggcgaccatgctcacaccgacgagagccacaagagctttccagccgaatgttgaaccaactgttcgatcacctgcagacgcctttgtcgttgcagaagcagcggcggccgagctgctagccttggcggtagcggaaccggtggaggtggcagaagaaccagaagcggcggcggcgggcgaagtcgaagtcgaagtcgaggtgacagagacggaagtaccttcagcatcaacatattgcgcaaagggctagtagcaatggagagaagggaaaagaggggtgagtaacaatgaagaagagagaaaagggggaaagtaaaagaaaggagagaagcatacaacggcatcggtagcgttggactccgtgtagatctgggtcttgttgtacgccgtccaaacaggagtgatgtactgttggaataggtggttcgggattttgcatagcatgacattgaacaaataagctatgatcgaggcttcacatttatcaagaaactcaccttgaatgcggccttgagtttgtcatagttctccatgaaaatctctgtagatgtgcatttgaaaaggtatgatcgtcagccttgccttgccggagactgaagacggaaggaaacgagagaagggagaaagaagaacataaagccgagggacacacgcatggtggtgttgttgatctcgtgagtgagaacaatgacacctttagtgtcgtacgttccgtttccggccttatccatgacatcctgatagttctgttggacgtccgctagggtgatgttgctagaggggccaaatcccagaggagagagaacaaaggagagatgaaaggaaagttgatgagaatatggacaggccaggagagagtagtcagtcttaattacaaagggccgggtgtatactagttccgagcccgccttggaaacgaaagagagagagaaaagaacctacttgattccaaccttccagtcgtcagtatcctcctcccacataatgctgtagcaagaggacagtgtaaaacgcgatgagcaagagatcaatagataacatgaggataaggaaagactaaagagaaggaatgacccacttttgaagacccaatccgtaggcgatagttctgattcgatcatcgacatctccgaatggagctctccagcaagctacccgagaagacacagtttgagttgagaaagttgaccagaaatttacaggggaaacaagagaaatagggagaaaaaagaaggactcactcggggtcacaccgataacgagcttgatggccttgagagtgtagtaaagctcggcaaaggcctgctcgttcgtcatggcggtgaggtactggtgggaccaggtgtgtacgcagatctcgtggccatcgtggtaacctcgctgggcctgcaacggccagtccaacacgtttgatccgatgtagaacatggtggcagtttcgttcttgtcctgtaaaaagttgtaaaactcgttgtgggtacagtttggtccatcatcgaaaccgagaccgaaggtgtttggttcgggtacggtgatatagtctgtgacgtttcggtcaaccaggtactgatatttaggagtagtgcatccgttgaacgtccaccaacaggccgggtcgccagtaccgacgtaagatggagtgaaggacgaaaagtctccgttgagggtaccatgtggggagattgttgttgggagggtggcgttgatctgattgaacaaggtgagtgcatcggtatctgtcgagacgatcgatgcggtgtcccagatagttgggaagtcagaaatggctgaggtgacaggagcgtaagagtacgcggtacattcctcagcaggatctgtgaaagtgggataaggtgcagtcaggacgaggacaggaataacaacaatcgcaaaagaaggtcaacacgcaaagaaaagaaaaggcaagaccaagttcaaagagagaaagaacgcggaacgaaccaagcaactttgcccagtcctcccaactgtcagccgtggccctcttaacgagagagcctgtctgttcggctgccctctgggcattccttctggcgagtgcttgacctctaacctcgttcgagcaagcgctcactacggtggctggtagtagcgccagcgaggcgagaagaagggtggtcggagcgacagcagctgtgtacatcatggaaagtagcggtggatgataacaggaagaagaaggggatgaagagggggaaacaagaaagaaacaagaaaagagcgttgtcttctcgagttttcacaatagggtgtgtgaagaagttagagaagaagaggagagaggggggagaggaaaaaaaaaagacacgagccggccgagagaaatcatacggcaagatagatcaaccaggtcagccctagatgcactgaagaacaaacacacataaatgacattgaagcaagtacgccacacaaaccgaatgaaaagagtgaaggcctgcttgtcgatgctgtcgttgtcgatggtataccgaaacgaacgacgatggaagaaagcaaacgagaaggataacgagaaaaacaatgaaggaagcttattaggacaggagggccgggatgaatagagatagactgtatctaaaaatagacttcatcagagccgagccgcagtctatttttggccgcctgcaaacgcttcgcactccggtctgtcactgtcgttcggttcgcttggaatcgtcgtcttcaggggtttgcttacacacacacacacacacgcacaagcacatgcacataaaagtgtccgttgatagtagatatggaaaatggtagcagggaaagagaggtaaagaccagaaagaaaaatactcgtaaaagttcaaggaggacctggagatgaagacgggtaaaagagcgtgataggccaagaggccggtttcccaccaagaccaatgtaacagaggggggaaagatgtaggaaggcagcaaagaaagaaggggagaaaaagaaaaacaagaaaaggggaagaagacactgaggcagcgccactagttgtgagaagtcgtcgaccagttctccagcgtcacattcgacggcgtcacaaagtcactcgcgctagagccatcccactggggattaaacagcacctggagcgagtactcaccgccgggcagactcactgccagcaccgtcacgcccgtgttcggttgatccccttcctccaacacgccatcgaatgtcagctgggccggcaacggcgggtcggacgagaacctcgtagggtccatgggcgagaacgtcgctccggtagaagggctcacgatctttacttcgcaagtcttcccctgaagcgtcaacgtcgccgtcaacccatcggagcttatacttacggtagcgttggtgtgcatccgccactgaatgttggtcgctcctggcgcattgatttcatcttgaatcaacatttgctttcggtcgttcaacaacctgactcctcgttcaatcgacgtcccgttgtaggccgtagtaagatccatcgtgaagtatgcagcagaatttgagtcaagagtggcaaccgtcgaagaaccctgagtgtcgttcgtagttccgaaagttgtagtaggcaaagtggcgacgttttggttcagatagtccaatacaatagtgttctgtccctctgttcgctttcggtagtaaagccaccgttgagagtcttcggcctagttttccaacagaaagtcggagcgcgagtcagcgctcttttctcttaagtgtgatagtcatataagcttcctcaggcagaagtgagaagaaagccttgagactcacctcagaagaaaagtagccggtggagagatagtttccagaaccgagatctccagcccatcggacgcccattgcgtcaaatacgaagtctccggcgtcctacaagagacaaggagaagaaacagcatgcccacaagttagtctcttcataccttgacccagatactttcgtcccgcccagagatagtaaacaaagcaagctcacaatatccccatgagtctgatgaccggtcatgtttccggccttcattccaacgtaaatcccgttgttatccgtccacgagttcctcatcgatgcccaatcatcaactccgttggtgaaatgtcggtcgtaaggaagcccatcccaccaggcacccgtggcggtaggatcatagtagaacacaccgaatggctcggatgcatcgtattgctctcgctggtagagcgtcaatcggggaagtttgtacgcgcttcccatgaacagcagagagttggcgttggcagagtacctatcggattaatgattttcgattagcgtctagcaagggcgagcctggacttcatagaatctggaaatcgacttacttgttcggtccgtgatcgttgtagttaaacaatgaggtcattccttgaacgtacatgtggtacgttccagtgaggtagaagttttcgttcgcgctcaacaagccctggtcgcttccatacgcggtggtcaaggcagaagccatctcagcaaatccggttgttccaaagtacctacatagagaatatccaggtcagcatctccgggaaagctacatctctgttttcttgattgaaaacctaccaatagttcgggccctcggtccaggttccatcagggtagactgcattcgcgcagttcgactgtgcgttcgtgatcgtcttgtccaagactgcctgtgcctgtccggttgtatcatccccaaggatggcaagggcacccatcgtgcaaccggcgttacacacacagttccagtttccgttcacagacgtccaccagctgtaactctcactgccgaacgcattcacacagtagtccaacccattctccacgatcgccgttcgaattgttgttttttggtcatccgtccagccgtcgtacatccaatcgtaagcgactgcaaatgcggacgtaaactcggcgagatcaaggaaatgagcagcattccatctggctgtaccgtttccaaatggaatatccgcattgttccccatcgcaacgttcaactcggtccacgttcggtcgagccactttgtgtcgttcgtcatcctgtaggcgtaggcccagttcttcactcggaccttcaactctcgagcaacatcaagtacacccgaaccagtcaatccaccgtcctcctggtaggtgatcgaggcactttcgtagttagccgttgcgttaccaaagattgtttcgttccaaccggcaagatactcgtcgttcgcaatcagagtggccagcccgtcccacttgtattgtggcgcaatcaatcgagggtgcgatcgaggactcgacgtcgagacagacgccgtgtccgaaggccatgttcggctcgcgaccgcagatgttgtaggggacacataaagtgcagtgttggtctgatattcaaggagagcaacccgagcatgcacaataaattagctggcttgtcacgagtatacgcctagaaacgaactactcaccgtagaagggtagacgggcagatagaacgaatcggtggcggtggcgatcctggccaagccttggacggtagctgtaccagatttagtggccgttgattttccagtagtagtctttgaagcagttccagaagccgaggagcctgaagaaccagacgacgtatcgttcgccgtactagccttcttattattctttgagacgaccaccccggcaacgattgcaccgacgatgatggcgacaatcaagatcggtgtaaacaccgtgagccatttggatcgtttcttcttggcaggagcggcgtatccactggatgcaccaggttgggtgtaaccataatctccttttttttccgcggcgtggccagaggggaagaatgcaggggcgaaaaacagtaagcaaaatgcagagtcagcaactatacgtgcggtgttaaatacagcatcacggaggtttctagacgttgacttggcgactcagagcagataagagtgataagaaagaagaagagaaaagagaaagatagaaagagtagacgagtgtaaacgaagatcgagactggagaggtgtacaaatctcgttttctgagtgacattgagggaggaaagagaaaacgagcgagcaagcaagcaagaaagaggtacgagaagtaaaagatagaggtcgccaagcgagccacacgtcgtcctttctatttagtacaaaaactcaccggttccacctcgaattcgaagtggctcttgataaaactcacccgaatgataacctccagaggaggaattgtatggtccggcaagattctgtacggactcgtcgaactggggttgggctcggtaagccatcgtgtaagaggagaggcttcaaacgagaagggtgacgagagaagagagagggaggaaggcgaagggaggaagaggccgcctgctttctcttttgagaagaaggagagaaggaaagggaaagagaaaaggagaaagggagagagtgtgtgtgtggagatggatgttatggatgaacaggggaagagtaaaaaagaaagaagacgaaggaaaacgaaaataaagaggcgagaaaaaaaaggcttgttctttttctatttgtttttcatattcttattttatgcctccaagaacgcgtcggcgcgtacgcagtcaagggatcttcggcctagctcaacaggtcacacagttcatgagataatcagaaacttgggccgaatgctattaaaataatacacgaagaaaatagatgagaagagactcgtatatgatacagtggagtttcttgaattgtatttatattctgttttcgcttttgatacaaagtctttttttccctttccttcttgctggccccggaccaaacagtgcagaaacgccctattctaagcttcggaagccgaactttcatcaagagtcgactcggatcgtcgccctttctgctgctgcttcttctccgtctggttcttatttttcttatccatggtggatgcgaacttggatttctcgcggatcgttggtccgtactctgtcagacacaaaagagaacggcaaccctcagatcagctaaggtcaacaaggatgtacgactgcaagccaacaaacaaggacatactgtaaaggaggaactgtcgcagaaagagagaggtgccggaaaacgacgaaaaatctcaaaaagtcagaccgagcaagagaagaaactgattggcagctttggaaggagaagttggacaaagtaaacctaagaacatacagggaaaggagcagccaacgtggccaaatcggctaggaatgaaccggcaccttggtaggtcattcctttaaacatgtagcctccaaacagaggtaatgaagcagccatcaagtttcgaatgaatccctgaccagccacagctaattttttacgatacagggcgcaacgagatgtcagtggatggaagtgggaattattttgagagcaacaaaaagagcagatgggcaaacgggcgaaggttgaaaaaacgaaccagacgagccgttctctccgtaggcatctgtcaagtatgaataggtggcgacaaagatatgatagattccaaaaaccattggcacaagcgcgatgataggagcaatccaatgcacatatccaaattgagtccacgaaaagatccacattccaatcggaaagatcaccgcgcctgccatcataccgtacaatcgagcttccggtcgggccacaccgccgttcgcagcagttgccttatcgtacaggtgatcctgccagaagttggtagcatacccgagacaagtcccgacgaccaaaccaaggtaggccaatccggaatttccggttttccaaccgtgatttccctcaaacgtcaatgggatgacggtgaagaacaagctgagtggggggaaagtagagaatattaatgggtgagcttcacagattatcaacattcttgttgagaatgagcttttgaaaagacagaaaacacttacaagatcatggaccagctgaaagcaaggtaaaatgagaaaaaaattacagtcggctcgtgaacgagcagctcttttaaattttaaaggtttttgtgaatagccaacgacgtgatcagcagacagatacgataaggacgagcatgtttcttggatatagtcgtatggacgaggtactcactgacagcctttgtgcaagaatccttgaggacgtccttgtaggaatcacgctcgagctcgacaggtgacctgtatcgctcatcgcccgtgtcctttctgagtttctttgctcgcttggtcagaataacggctcctcgggtctctctacagaaggcaaactcgatcaagcagacaacaccgttgacgatgagctgcacccactggatccacctccaacctttgtagagcaagatgtagccacttgaaatagcaaggaaagcaacaagagattcagccggatgaacgagatcaaaagggacaacaatgatgacgatggtcaagacgaatagtataccatagcgtcagatggacacttacctgtagagaggagccaagatcgttcccagcacggctgcaaaactgaacaaggccatgggcgcacttcgctcgctcgtcacccagatatcactcagtccgccaccgatcagtgtcgtacctgcagctccaaagattccagaaaagaatcgggcaataatgattgtccaaatgttcttgcctagagccagcggaatctttttgttgttgcagttccagcaatgagatagatcaacaatggtttctgaatgaaacaagagcaagtgaaggatacgaggacgaacgaagaagacggtgaacaaggcatagttgaccagatagactgggtttcgaccgatcgtttcgctcaacggggcaaagaacaaaggaacgacactgaacgcagcgttgaagacgactgtatagttgtgcaagacgttcggatcatgaatcacaagctccaacacatcagcttacgagcgtgaacagaatgaaaacccctgactaccaatgactgcttagtcactgagtatagaacaaaaagtttgacgcacacattccgacctgtccgacttcagagtcaaccccaaactcttcacacattgaggatatacccacagagtatgcagacgtcgctaaaccctaaaaatacgatgtaatgcattgtcgacaggatcagaaactgccgtccgtacggaatcatgaagataatatgttccgagggcatggataagaagcgtgatgcttacaatgaaaagcgtcattgcacacaagaggatcgtctagcgggaacgggaaataataaaggaagtaaattcatcagcacggaaagtgagctaaagtcacttgcacgtcatgcagaactcactgtgatccacttcttgctcttcggccactgtaatgattaggtagaaagagatagaatatacatgatgtcgtgtaagtgctcaaaatcgacacaaatatgcaaagagcaaagagacacagaaaggatagaacaaaaaaactaggcgaactgacgttcattggattctcctcgtctccatcttcaaagtgaacgacgatgatctttccctcccgttcgagctcttcaacttgctcgtcgttcaagcctcctcttttgacatcgtctgaaggcttcttctcgttggccatatttattgtctataaatctgtgtgatactctagaggatagcagtgctggttatgatgcctatagtaaaaaggagtgatacagatggattataaagggtggatgaagaaaactttcggtcttcggtcagctggttgtttagaacaagctaaggacggaaagggaaaaaatccttcaagaaaagatttactctgcccggatgaaaacaagggtcgtcaagggattgcggtcaaaagatgtttagtaacacccggcatgtcctcgaacttttttctttccctctttctctatataatgctgttgcgctctccttctgtgttattctcccgtttctcttccttcttctctctccgttggaggtagatctctttgcatattcccacaatgaggggtaagacatcggccgcaagacgctctctcagcgggcatatcgcaatccccgcgcgcacaccaacgtcatcgagcgggagagtgtgtgtggggctaaaacctggagaatgatactcaaaagctgtgttacgcgtggctgatcgcaattacgtaatgtagaacaaccctaacatcatcttaacctccgtcccatctcttttgtagttcaaccgatgagaaagcaaagtaacatctaagaacatcaacaacgatcaacaactatcaagacccatcaagacctatcgttgaataatcttcctgttagatcattctcttttctctcctggctctcatcacatctcatccggccaaaaggaaagcatggccggaatttttccttaggacatgccgaccagtcccctccctgctttccgttcaactctgccttcgctttccgccccttcactctcttcctcctcctcgccatctagctctgttcatccactcgttcgaaaacttctgtttcctcagctagatccggcatcgcctatccctcctatattctccgatgctcatctaaaggaacttaataatgagttagtttccgttccgtgtcgttggctgtggtctgcccctgacagctttcgcctacactcttcttctaccgaaccatcctaggctgtaccttttcatagcattagccctcagaggatatatcgtaaggatctttccgtgttccactcgctttaaaacaaacgtctttctcatctctcatctatctcgcgctatatgtgtcattccatacagaacccatggtacgctaagatcactccacgtgatcgggactttctccctcgagtcacccaggttcttgtccatgtactctgcattcttccctccaggctgtccacccgtgacacgatcgtgcctttcctgctcatccatcttcccacagttcttaccgaacactggcgaacgacgcgcgtgtccctgtctcttgcccagctacacccgcctttatctgtcgaggtattctatcatcggatccatccacatgttggcatatccatcggccattcagccgacaaggatggagacgatctgatcaatccggtgtattggacctgcctagcagagggtatccttaagatattgctacccgctggagactctggcagcgagcttgaaactgtcatcctcagagaagtcttaggtagggtcgtcttgggcgctgtcggacgaaagtttgtccagagtagtttttggtggagcatcggacttgggctccttggcacaaataaccgtccgagcggatcagaggagaatgagtccagtcagcactttgaccagtcactcgacgcctcttctcactctcgaccttccctctggcaagctcttctaaacggacttctcctcgtcctgggaattgttcaatctatctttgtctttggacgaaatactttccaggcactcaaaaccctcagaaatcttatgtcgacatgtcctcccggaagaaacagagatctgatggtcgaccacggctgggtgctcggaccttgggtcgagtgtgtagggctgttgctaggactaaatgatacgttggtcggaagagtgctatggatttggattgaaggactggccagattggtttgcgtgctagggggcgatcggtgtgtttactgttttcttaccgtcaactatctttgcggcacaaaaaagactcgagaaacgaaatcaaatcaactaacttctcttcttatctaattccagattgattccccaccttctttcgatccagctaagctctccagaacttccaacaatgttggtcatcaagcttcggtcaatcctgttctctaatcaggggtacccagggcctccagtgcctgatctctcggcagaagaacaaacagctttacaggttctgctagaacgcgttctcgaggagaaaacgcctagtaagtctcttatctgtttctcgccacgaacctgtgactcatcttcaaaaccgattctttttcttcccctcatttttcacaatcatatctaccaggtcttcttcgtcctgttttaggctcgtccagtgaatgttcaccgatccatgaactactcgtaccgctcgagaacgacagactgaatgctcacctgttgctgagcattatcgactgtttcgttctcggcgtgttcccggagttgggtgtaggtgcaaatgagaaatagaacattttcgctttccttccttttctccttctttccttttgggtttactctatgtctacatgtttgtggggtctgtcgttctctatttgctctttgatttctcttctctctccatctgcccttaacatgttttatctctattccactcttcccggttttttgcgttgtatgatgtccctcgtcagttgttatctttggtgtcctcatcttcatattagaaaagagaggatgatcgtaatcttcttacagcttgaaacgaaccagaataaagagggaaagtcatattgtaaaacaaaagggatgactatactgtacgccttttccatgtctgcagcaccaatccaacaaccgccaggacgatccctagcttccaccctttcctctggatccaccaagtccagaccgtcttcctgttccaaccaggcttcgagaaaggcaagctgagaggtaagagggctaaacggagaagctttcgtttagcaggggtatgtggtgggtatcgggcgttcaagaggatctctgcagacgcaggcacacggacgattggtcggggttgagtgaataagtcaaatccccatctttggatgttgatacgattgatcgcagaggttcacttccggttagagaatccggaaacagcaaagcagaggcagagacaaagacgaaatacaagaaggagcaaaaggaaacgtactttccgtgatatgctccatctgttggatttgtatgcatctcaaaatcaaggtcaacccaaccaactgctacaagtaaacgtgtcgcaaataagtaactcacgcccagattcaccgactcctccgaagggaatatgatccacttttttttagcacgaaagaaaaggacgctaatcaataaagctcgatttctttcctgatatgcgcaaggaatttggaagagaagaaggtaaagaagatgaacgtactaatggcgtgctggacgcaatcccctatgaggatcgttccactctgagtttgttcgatgactgttctccccatcggcaatcacatgcaaacatagcagatgaaaatgaattatgaactaattttttgtgaggcgatgacgttgcgaatatcacaacacaaagaaaaagaacggactacgttgaattgtctttttgctgtgagaaaagattgaaattccgagagaagacccttggttattgacgattcggatagcgtattctatactctgatgtccagtattgaggaagaagggagttagtgaagacacggagagtaaagaggtcacgagtatcaaagaaaaaagggaacatacatctacaggaacgaccaccaaaattggaccaaagatttcttccttcatcaacgcatccgtctcctttacattctttacgatcgagattcccatccgctttctctcccggttgaccagacctctcttgatgattgttccctccgtctggtcgagcagacgttcaagtctgtcgatcgttccctcggtgggaaacttaccgtaagtgtcagaatccaattcgccagcaggaaaccagctagcgagcaacttctcacaagcagccacataggcatcttggagcgcggttgggacgaggatgtagtctggggtcgtgcatgtttgactttgatttttgtttgatgaagattcagataattcaattgagataaggaaaaagactgtttgataaaaccatctagagaatcagatttttaggaaaaagacaggaaaggaagactgacctgcaattcatagttttataaacaaatgttcgtttggccaccagttcaatgtcgaacgtctcatcgataatcactggtgatttcccgcccaactgagagaatcaggagacgaactgcaatcagatcgtgcccgcctagttaaaactcggagaagagactgagcctcacctcgagcgcacacggagtcaaggttttggcgcatgcaacaccaacaagtcttcccactctggtagaccccgtgaatatgactggatgacaaaaccgggttgaagtcaaggtttttctaagaaagcgagaaaacaacaacgagcaaggaagataagatgtacaaacctcttccccaaggtttctccagcagctgttccgatacttctttctctcccaaaataactctgtaacacctctggtccagagtttcttcgatcatgtttttgagcagctttccggtgtgaggactcaattcgctgggcttgataacgaacgggcagcctgcagccatagcagcgatcataggctccagagcctaggtccggatattattcaccaaagagaacgaagtgaattcttctcctcaatattcaagatgctacgaaaaagaaagtggacgaacgagcttgaacggataattgaatggcccgatgcagagcgctggaccgagcggcgtaggtagaattgatgagtcatacaacatgaacccgacctgtctaactgtcggtttgatgggctttgccaattttttcagcgtttctaacacgatgagatgatggtaatgtcatttgattagagtgaacaatcatgtatgagagatggtaatggatcagcagacagccgttaacaatgatccgagatgcaggaataaaccaaggatcatgagcaagtaagaactgatttgaaccataacaacaggtgaacgaaccgacgtattcctcgcaagcccagatgagcgagtttatcgtcgacgtatcaacctctccaggatgctggttcatatcggcaaacagcgcatcatagatgagttggcgactctctgtttctctccggatacagtaaggaacaggacagcacagatgacggagaacagtggtcagtatggaacccaaataagtatgcatctcgttggattctggtcagtcaaaagggggagatgagaccttgtatagcataggcaagccttttgatctgattgatcctgaactcgaccggcaaacagattcgctctttgtacgccgtttggacaatttggtaagcctatacgaggagaacaatgtaaagggtcagatgcgaacgatacaagtgtgcgatgagatagcgtatcagtaatcctttacctcgcccgcttcttgcgtcttttctgaagaattagacatatgcgcgatgattgttggaagtgagtatgtgattgcaagtgcaaggaaggtgagaggccaaatatgagatcgaacgaattaccggtgcggtgtcccgtagacacgtgtggatccatctgcatagctttatagttatctacaagatatcacttcaaccgcataccgatacacttcaacgacatgtggcttggattagcgctgtgagaaactacgttatttgcttagcaagagaacggtcttacatatgatggcaacgtacatcgacgcagtgtcgttagcaaggacatggaacaaggtcgttgacggtacaacatcaacgagacgagtcacgtgatccctctcatcgtcgtgttcatcatttccgctctacttcttacctcttggatcaatcatgtccttgactaggtgtacagcatgaccgcacgacaatactcggcaactttctcgccgaataaccaagacctagctctagattctccggccgcagaactattgcttcctgttcacactcataattcttatagaccccacaatcggcccctctcgatcacccttttgaagagtgttgtgctgcggcgagttcggaatcaccaaaagactatcctggctttttttatcctggccgtattaggctttgtctttcacgtacgcctcggtactttccggcgcgatctcatctatttattgcgaccactctgggagtatggtgaaccatcttgggagatcattacccactatccggcccctttgtcatctatatcaggagatctggatattgattcgtggtgtcggctacatgactggtccacaagagatcacagaccagagatcgtggacgcagtcttattctcttcggagctagatatgctagagataaggatgagagaatatctaccatatgtgacaacgtttgtcgtggtcgaggcggaccgaacgttctctggggatctcaagccgactgtgttttcagacaacagagaccgattcgatagtctactggatggctcgggtgcaaagattatctatcacaaggtgacagggctctcaaaaaacctcgaaaagggatcttttgataacgaacgccttatgcgaaataccgtcggtgagatccttaccgccctagatattcctatcggctcactcatcattcagagtgacgtagatgagatcatctctggaccaacattggatctgttaagctcgtgctatggctacgaatccacccttcatctcaatgttgacaactaccgatacggcttcaattttcctgttcccgacggtggctactggcgaccacatatcctgacgacggataacactacggttggctatcatcatggtcgaggaagtaacacgttgctaccaggaagcggatggcactgctcgttttgtttccccactctcgaggagatgcgtagaaagatgctgggctattcacacaacgaccgtgtaagagatccctcaatcttggaggaggtgagtctgagagaaagagtctgcaagggtgaggatccgttccagatgtggccagtgagtgaattatcttcgtttatcgcctcagtctagcgatactaggaggccggtgctgatatatcctgtagaaagcgcatacgttcaaggatcttattactcagtctgggtcaatcaagccatcccactcatttactaatgtgcctgtcgcattacaacaggagcccactaggtttggatatctgctcaacgacggatgtgaccgaccagacaagtagtacgagcatgtatatataaacatgagtatataaatgaattatagaatgctacaaaacagaaatagttgagcgaggcgaagacatataccgggtaagttgaagagtgggaatagatccgcttgtggccgagtgtgggattggaaatggctagttcaagagaagatcaatgtggatgaatatatactttgagaattcaaacataacacacctttgctagattcacgcacatcatgacaaaccctttaacatcaacggataatgtctcttattggtttagttcggcgcgtgttgtctacaacgattcgagtttccgcatagccaaatgtttctggggtttggctggctggctggctggctccgaccgccaagtttcccggtccgacctgacgtcatctttaccgggtagtgtgatgattgttcctcgactgaacgcctttttcttgctaaaccccaagagaaagaatcccacgagatctccatccgtagaagaaccaggtgacctcgttcaagagacaaagatggaagtttgatagaagatgagctcttgacgacatcatcatcaacggaaaagcagaaatcaccgtcatcgagcgatacatcactttcttatttctttctgtatataaagaaaccactagcgttcaatttcttcgatcttgacctcgttctcgttctcgttctcgttctcgttctagctcttcccatccattcatttctcctggtttgtatctcttggagcgtctgtaacgtcataagatatgttgaacactcaaccttctcttctctggaagagtaccttgataggtctcaccctttggaccgccgctccttccgttcaggcccagtcggcctctgcttctaactctggtgcagctgcttcagcgacaacgtcctcggtggctcccgcagagccttcgacgactctggcaccaacagctttgttagaaccatatcctgctttggaagctcaaagctggtgcaccagccccatcttttgtgcaggcgaggtcagctgaattttcctgcctgtttcgtcacaatctatgttccgtcatgtctatcaggtactatgagcaaggacgcaaccctctgaaacacattatttctgcacatcgcctctgcgcatcgtgatgactagatcctcacaaccgtagaacttgcgcagctgtatccggattcaaaaaccttcccggataagcccactcggtacaatgtcagcaccaccgtgcaagctttccaggcgctcaagtctgccaatgggtccatcgcagttggagatctcgaaaactggctcgatcagtactttgtaaggataccgactgttatactctctttgtagattttagatgacaagcggactcaagatctgtctttcaaaaacctagacaccagaaggggaggagcttgttgcagcgacaattgatgcttctttcaacgcatctgctactcctttcttacaaaatgtcactgacccagttcttaaaggttggattgccgaagtgatcagctattggtccggccttatacggtttgttacatccacagatcctctgtttagtgttgtcgaaatgcgttcgtactgacaatctctgacggcctcttgtcttctggtagagaaaccaactcaagcgcactttgtggggtcgcaacggattgtgcatccactttgattcctcttaaccacacggtcgtcgttccaggaggacgttaccgagaaggtaagcttctttctcaaatcgtatactcgtttcgacacgacactgacctagtctactgctagtttactattgggattcttactggtaagagacatcggagtaacatagaatgtcttacagcaaattatctgacggtcttggttcttgctgaccctgtcacaatcctaggattatcgaaggtcttctcaattctggattggcttcatacgccaagaacatcctgctcaacttcatggatgaattgagcttgtatggattcatccccaacggaggaagaacatactagtatgttcaacgcattcgcatatagggtatgggccgtccactaatgcatgtatgcctttcctcacagcttgaatcggtctcagccacctctcttcatccaggtacgtatacatatctatttgtgttcgtgaatatgtaccagatatatcttcttgtttaacagcgtcttgtttccctcttcagatgctgtccctttacgtcgactttaccaatgacacctccattttggcccaggctcttcctctagctgatgtcagtaccctttctttttaaatgtccattaagaagaaaatagggacttaacctgctcgtgagagaggaaaaacctgccaggctgagcttcaatggtggtacaagaaccgaactggatctgttacttcaccgttcacaaacacaacttacgaggtcgcccgatacgacgtcttcatcaatactgcccctagacccgaggttcgtgtctcacaactgatcagtctcatctatacacgccgggccctcacctaaattaagcttgctggtcttcggatcaataccaatatttctagggcttcgtcgaagattgggagacggtcaacctagccaatcctgctttcaatgcaagcgcagcgctcgaattatactcagaactagctagtggagccgagtctggatgggactagtatgtcttccttctcgattcgaccctctacttgtttcaccacctttaagttatctatttgggggtctaacgccgactgtttcgccggatgcacagcaccgttcgatttatgaaagatggattaaagaatatctctgatccattggagggccttcgatcgcttaagtacgtcattattctcccctgttctcgaggccgagaaagaatgcttgactgactgactggatgcccgtattctcatttgttttctagtatccgacagatcgtacctgtggagctcaacgctttgctcgctgcaaactattatctggcaagtaccctgcctcagctccaatcttgatgaaggagtatgaacggtttagttaatttagtataactttctcagctggccgacctaaacgaccagtacggcactttgaattcaaccgccgggaacgtatctgctcgggccgatctgtatagggaacaaggtgacaagttgaaggccgccgtgttggacctaaattgggatcctgaaaagttggcgttctacgattttgtcagtttctttttcttgttctgtttcaatttatcggcatgtcttgttctgaccgataaaggggtcaattctgaactcgtcgacagaacaccacctcgtctaaccggtccaccttcttctcggtcgctacgttctatccttattggctgaacatcatccctcccgagttggaggaggacgaaagcaagttgtttggggcgtttgctggtctgagctatatactccacaagtacaacggaagtgttcccgcctcgttggtgtatagtaccctgaattgggtacgggctcaaatacgttatctacagtgaggaataaagtaagatattgattggtttcccttctttctaaacgtacaggatttcccgaacgcgtggcctcctcaccaatatatcatcctcaaagcgcttaggaacctgccatcgaacgtgacgacaacttcatattcaacctttgcgcctgccaacgagaccgcatggtcaaccatcccctccggccagcttggtctcgaggaagccgatttgcctgctcaaggaggttatggtggaggaaacaggacagtctacaactcagacgtgatcacgaatggaggtaatatttcatccagcgagccgtggtctcaagtgttgctcaccgctgtggtccaaagatatatcgatgcggcattctgttcttggtaagtctaaggtcttctcgtccagccaagacttatgctcttgtcgacaactgacgattcatctgaggattgattcaggtactcgacgggtggatcacttccaggaattttgtctcagcttccagccgatcagcttaatgttacgaattcctctcctagtaatactggaaacatgtttgagaaggtttgttggcttaacctttttctcgctcatctgaagttctctcaagtgatcatgactgatccatatttccggtgtttccctttagttcaacgcgaccgatattgatgccggtaagtttctttttatcggtacaacctttttgggtgtgttgatgatactgacgtgtctatttgcttatttagccggaggaggaggagagtacacggtcgtcagtgagtggttgcatcgttagattgctagtctggactggccggcaggcacttgaccaatgaattaattcgcttcctgcttctttctcctccctcgcagctggcttcggatggacaaacggcgtggtcatctgggctggggcaaactacggctcaagtctagttagcccaacctgccctgcgatagcagtcagctcttcgaacgacactgttaatctgtttgccggtaaccgaattctctaaaacagatcgtcagagatgagcgagatgatgttgtaaataggttgtgtgatatagcaaaaaaaaaagaagaaaaaaaaacggttttgtgtctcgttagcgtattaacaaatacacgcctttgtctttttgtctcatttaatctcggtatatacatactgtcaacaaaacgttgtaaacaagtgtatcgaagactccttctgcagagtgtatatctagttgtctgctttctgtttacatgtttgactgaactcgcctggtctcacctcatctcagattcctggatgtaaaataagtacatctgttctgtgttcaaccgagaaagaaataagggaggcttaagaagtaaataacgctgatttccgcaatcgtttgtttacctcttgtctactgttcgagaatagacgtcagagatttgagaatagacactgatcggagccggattgagtgagaagaaaatgccgtgccgctgttgaaagcgcagcaggtttgtgtcggagagttttccaatctctgaagtttctccttgatcgtgtttcgcctcttagagtttcgactcggcagtggttttccgttggcagcgatgaccctcagcatgatatatacacgcctttggagcaggatggattgacttggagaagaacgcaagatgatcaagaaatagaaaatagaaaaccaacctatctgggaagtacagccggagagagtcaagaagacatctttatccttcaacatcaacacaaggaagaatctttgaacatgcactcttatcgcttctcgcccagcctctttttctgattgtacactgacctgctcgggagaaagagaaaccacaagagacaaggattagtccatcagataatgccactcctaaagatcacaatcgacagagatatacagacatacatcctacaaaagagataaagctgcggtaacatcaagttaccgtgtttcagaggtttttcttgagtcccccgccggagtttttagcataattctactggcagatcgtcatcataccctcggcacacgaccacttcaaataccgaagcacatcagacaagcccagcagacgaaaccttttttccattcaatttctcgcttccttctttctcatcattcatcccacttgactcttcttcctcattctatttttttctcgctgacaacgcacacaaagccgacttgcatttcatccttttcatgcaacgctcgatccgtctagcgtctgacgcgtcgtccgtctttggttcgctcagttcgaattcaaacgagcatggtcagaccaaatggtcgttcttagcttttcgttcaaagacaacaagactcgtcatcttggcctttgcgctctcctccaccgtcttgtttatcttgctctctctcaccgatgcattgtctgcattggacgtcatgagttctcccttcacttcactccggccttccggccagagcactatccccactttaccgggtgcacttcagaccgatgaggcggatgaagacggttcctacagcgaggatatcgaggaggaatctccggagaagagcgtttcagaaggatcggaagatacccactcgcagccttacattctaccagactttttcaccaagccgacgttagcggggatgtcctcgagaaatttgaaagagaactatcatatctttaagccaaataagccgtcaagacgagcaagggccaaagattggaagtccatcatcgaggtccctatcctcgatgatgactgtctagagagttgggtaggcaacggtcagatctgttcaaaggaagctatcgcggccgctcccgtcgagatagatgtacgtttccttgttcctcatgcaacctagcaataacttccaaatttattcattctcttcccgttcttcatttcctttttgcacatactctaggtcgtctggacatgggtgaacgggtcagatccttcctggttatcccaatacatccacttctcccaacccaacatcactaagcttcgctacgactctggcgcgcccccgacaaagcatttccggaataaagacgaactgaggcacagtctgcgcagcatagcagacaatatggctccagaaaataaagttagacgactccatctcgttcttggagactgggcgctcgataaagaggacggacaggagcttttgcaaaggttgggagagcagccagatcagacagtcggtccggtcagtccggatagagagtggaggatcggacaaatccctggctggctgaggacaagtctggtcggaatcgaggtaggttttcttgctctttgctcacccgatctctttgctccatggtgttgtgtatgttcttcacttaccaggtcgctctttaatcgtttcgataggaggacggaatctctgttcatattcaccatcacgccaacatatttgttgacagaacctcgacagggaccctggaggaagctcagctgtaccgaagtcgaacacttcccagttttaattcgtccgtcattcgtctatctttcaattctgctgcctataatgatcaaagttgctaacatttctttggattttccgcaaagtaggttttcaatcgaaggccaactactgaatattcctggcatagcgccgtactttatctacttcaacggtacgttctgatatgttatcttaccatcaaactcgccctttttagatatatgatgtctaacgtgtcctttttccttcgacatgttcgtccttctccagatgactgtgagttcttgagcttccgcaccgaatgaatgtgtaaagatgctcgtattcctgacagtaatactttgcgcctcacctcacgaacaataccaccagtcttcttgacccgaaacgtgagccttcatttcgtttatcgcaacttactatccatgttatatcaatcgcgaagatattagacatcagacttattgatctcttcataccatatgccccatttgcgtaacacagcatggtaggcaagactgggtgactccgattaccggtcccgtcctccgattagctgttccatcgtggatccaatccgcagagttcccaccaacggcgtgtccgcacgagtggtctgcgttactgagaagtaattggctactaagtgagtttccgttctatctcagaataccgcgaataaatgttctgaaatccttcttcattgccttctcagagaaacgattcggcgatcgaaagcgaccagggttggaacacatacccaagccaatatcagtgccgatgatggatgaggtcgctaacacttggccagaagatttcgcgttgtccagcaaacgaagattcagagaagtcgattctggtgcgtcatcattgtctgttgtgaaggatttattcttgcatacacaatcattttacttatcttgttggccttgtcgcggaacatataggggccacacccgaatcaagaatcggggatatccatgctatctatctgtcgacgttgttgcttgtcgagcgatctagagaaagcatgctctacacttgggctgtccttaaaatgtctgtctcgtcttttctcaatattgtgcttttctcgttttgactttccacccaagaaataatcactaaatgcggcggtctatctacaacgatcttgacccgatgtacataggggtggcgaggatggtatctggggtccaaccgcgcgaaacgagatcaagaggttattcgccctggctccaaattcgaagcagtctattatggtaccaggtgtgacaaaggcagttagaccttggtttggttggaacaaattaaaggaatccatccttggaatggattcggagttgcccatggcaacatctctccagtggtgtacgttcctcttattcttctctttctctcttcgtttccccccctcaaacgacatgagaagacggactcatgtttgatccatcatgttgaaccatcatcgattctcacagcgagcctagacggatcgttacccaaaggaaaacacagaggtagctcggcgaggtgcacggttgacctaggaaagtgctttggaccattttggacgatgaaaatgaacacgacagcggagaacgccttcaagagattgacattcctatatcctgaatgtggagaatgcagttcgttttccctttcaattattgtctccttataatgccaaaaaaagacgtcggactgaccatcttgttcaacatgtagttctctctgctcttgttcgtgattccgggccgaaaggaattgcatccatccttccagatcgaaacgcgacatttatccctactcaaattctcaaaaaggaaatacagcctcacatgccattaacgaaagaatggaggccaacagacttttcaagagaagctgtgattactggtacagttgaggatgagcccgtcaacttgagaaagtgggcgttacggttgatagcgaggtatcagtatagtaccggtaagcattcttcttccaaaggtcttgggtttcttagtattgaaaactcatcaagctctgctcaccccaatcgcccatctatggtcatctaatcttcaggcgagaatgaatttgaattctcaatgatccataaccctgatgacctgaaggcaacgaacgatcgattgacccacaacaagggcattagctcttttgtcctcaacgatgatcttggtaagtttgggtttcgactctaatttgtgcgctaccatataaactccttctgatctttatgcctggaatgaaaattctccaactacagagggcccgccggatgtgttagatgtttctatccgactgatccgatcgttcttggaaaacagatggcatttgaaagcatggtgggaacgatcaggctggacggatgaaagtggaggcagtcatcattcagtctctatcagatccccccatcagatctaacgaaacatacttctcccagttcaaaagacgcagagtaaggttttcgttacttatttatcaacagcatatcaaatcactagtcgcccttcattcatagactagtttgcatagactccaattccttcatttctctttttctctctcaatactactctttttgacatacagttcccatcccttccttgcatttgatgtacatcttgcccgttcttttgccttctgccttccgccctctgctcatttcataacactctttcgaatactttcaagttgtaactcactctggtttcgtttctatcaagggttgcgcaaacatctacagtgccttctcttttcgtttttgtctcgcctctatcaatatgtgttcatgtcatggtttatcgttatgaatcttcctttcacattccgccgatggaagttttcagctcgccttgggatgttgtgagaatatccatacataaattggtctccaccaaacgagacgttcagaaatccattgcatcggtagtcatccgctgtctcttgctacggctggatctacccaaccgaccttgaacgacccgagtttggtagctttcctcaagcgaatgacgatctttctcaaaccaagtatgtctgagcgcttgccggacggacatccgaatcgcaggttcccgacgtaataggccaaggatgagatcttgaactgatgcaattgaagaaaaaaatcccatccaggtccgagtcagacatagtgaaccagagaaaccagttatgttgagggcgagaaaccaaaggagacgcaatatgtatttatttacctgagggatggtatgatgaccaggtatctggactaaattgaacctggaggcaagcgatgaataattgggttgttgattctcggttgggttgatcaggccattttggggaaagaaaagaagagaaagaaaaaaagggagaactcacctcctgctcacaaactctcttcgaaaacaagttcatatgttgttctgccgttttttccccaacctccatcctggccgcaggtttccatttttctcccaaagagaacgaccgagcgccaggtcgaaccccggcgtgcgcgtccgagctcattcgacgagagtgacctcgatgctgatcgatgcttgacttaccgctttgcatctcacaatcggattcttcgtcttcttcatttccaaaaggatgataaccactgcaaatgattatcatcatcgttatcagaacaacatgaagtcaaccgtgcacgacggaacatgagcgtggataaaccaatcataaagacgaaggctagaaacgtacgtagcgatgatgaagagcacgacccctagggaccagcaatccaatctggaggcgtctaacaagacttcatttcgagctctaattgttttgtccttcttcaacgccctcagtcgactggtttctaaattcacccaagccgaggccttgatgtattcgggacttggtggaaggattttgcacaacagccagatcaacataaatattctcgagatgatcaaattcaacgacactcacgaaaagtaagcagccgttccaacgatacttggcgctcgaattgccaatgcgttgctttgtggagctcgctcatccggatgcatagtcgatagtccgaaatcgcagattaggatggtcggatagacttcaccctgttgtagtactgttgtgacattttatgacatgatcgcacagtcttcagatttcatgttgaatctcaacagaacgaaccataaaatgcttacatatgttttcaggcttatgaagtcgagtgtcagacatggaaccgcgcgattagtatgttattcgacgttgtcctgagaagagatatgttgcttcgtaccttcaaatcttggtgatggtggaatcgacgagtcaagacgatgggttcacattaaacgaactagtctggttgatataggcaatgttgtgcttcatgaccaatctcacttacctcgatgagcgcacccattctcatgaagatactgtgtttagaatacccgttgaagttgatttacatgcccatgacagacaacggcaggaacgggctcaatgtaagagagacaaacgctcacctggacaccatgaagaatttgatacatgatatactttgcttcagcttcttccagctgacggtgtttgatgatgtaagaaaacagatcccctcccgtcacacttttagacggagtcaagttagcgaagaacatttatcttgcctagaaatattttgagagatgtatgaagagcgcacagttgaaggaatatatggaaatgactctctgtctgatggtatttaaataccttgatgacgttgggatggtctaatttgagacctagttcaagttcattgtaaagccgttcgaaatcccggtctcctaagagctgggaacaaatatcgggatgaggcatggcatatttcgttagtgatcaaagctacgatctaagatcggtgcaaatggaacaacagaggaggaaggtatatgtactcgacttttgggcacagttttgcatgcctagaacgaatcgctcaccatgaatcacgaaaaagtgtaaatcactgatcttccacttcctccttaaatataacgaagacaggatcaagaaattgggatacttaccacttgggcttcagtcctgccatccactgctaatctgacttttccaaaactccctgaccccaaactttggtctaggaagacacggtaatgcccgatcttgagcgttgctggaactgaggctgtcttgcagttgggagggtgcaggccccgatcttctcgataagaaagtatcgatgcttcagatgagtcgagtaggcctagttgagtatgatcatcttcatccaaatgattgagcggaagatgaaaaacgaatcctgacagcagtgcattgagagtcatatgagacagagacaaagtctttacgattgaggatcgacaacacaaaagatagtgaatgcgcacttttcgtggtctgaggtatctcgatgatatctccttcggagagaaagattgcttggcttttaagtcgtttaccattcaccactataccgttcatggatagatcctggaacgacaagaggtaccaagaaaagagccgatgacgacacgagcacgggtgtatgcggattagatcgaatgggcaacaaaattgaggtctgagcagcacagttagcaactaacctcgacacacgaaaggggttgattcttatcattacggaccctagtgggtgcgagtcagcgaagaagatcaagagagaaaattgatgaggattcaaggtatcgttggctatgcttcagacacaaaaaaaggaaagggtttttggccgcacgtgtaaatgcgcatatgctttcccgacacgacaggggaagggacaacataatcactgcaggccgtgataacattcagtcgttagctatgcttttgaaacaaagacattagaagagaggatacgccaaccatgtgggatttcttccaatgaagaagggatttgttgatgtgagcagtagacctgtgattgatagtaaaagaacagacttgttgaggcgaagctttgtatagcattttcgactcatcaatagaacctacgttctttccccctaccgtctgtccttggtgtcatcaagaatccgcatcctctataacctgggtcttcttgaagtcttctctcgacttcgtccgttgatttcttgatcggcgaggtcaacggagttggcgaaggatgtatgataatcttgaactcgggtgatggggatctgaatgaggaaggaggtgacggagtgaggagaacccgttttctattgggaagagctatggaaggaaacattgaggaaaaggattgaagtacagagctcgagatgggaatccaattagatgatggacgttgaaagaaatgagtattgaaaggtgaacgaatataagtgggattcggatctgatgacaggtttatgagcaactaggacaattctgcttgatttcaatgcttccatcagcacgacagtattgtttctctctcatcgcatacacatgtcagtcacctctcgagaacatagattgtaaggttactttcacaggtgacgatcaaaagaaaagcatcatcgtacaattacaatccaataaggggaagaaaccagagctttgccccttgtctatcaggatttttttactccatgtcctcctcgtcctctccctcgacctcttctccgtcctctccctggatgttgaagaacctgagctggtaagagtccttgccggacgcaaccactcggacaaagtccctcaaagttgatttcttgaggtatcgcttggtcactacgggaacgaaagaagaggagactgttagtgcgccctcaagatactagcaacaaagactagcaacaaaggtaactttgagatgagggatacgaacaaaacttgaggtatcgcttagagagagcggtggtagaagtgatgacaatcttggtatcctctacagcggatgtagaggaaaagtcaaaatcaaagtcagtgtcacttctgtgtcagagaagatacgaagttcaaaagcacttaccaactcgctcgattccaacgaccgatccgagctgtccaggctttccatcgatcttgatgttgtcgtggaggtactgaacgagaatgccgtacgaaaccaggtgagcacaaactctacggtaaatgttgccctatattgtagaataatcctcaccttctcgaatccagcgacatcgaagatcctgtcctcagcgggcttggtgcagtcaatggtgaagctaggtagacacgacatgaccacagcacgttcagcaagagccttgatcaagcaacaaactgattcaagccggacagaactcacgactgagccttcttggaaggaccggtgggcttaacgactttgggctgtagtatttatcgaccagttattaacaattccttccaacctttctctccaccaataaacaaacagctgaaccaagcaaacgcataccattctgaatatctttttgttgcgaacagggacactactggcgtggatgatcagcaaacgtggtgctctggcgtacggatgggtgagtgtgagggatggcctaaggcgagcgggcggttgcgcttaggcctcgcggtgtataattttcaaactccggtgaattttttggaagtcgaggtccgtgcgtcaggtttacgcccaaccgtccttctctcccttcgttgaccgtcaagaacaccttcaagaccaaacgaacgactctttgttttcacagcaaaggacccggtctgattctttgggatacccaagtccatctgttcttcttctagcgcctttgttttagatcacccgacagaaaggaaaagaaaaagataagacttccatcatgactaccgtaggaaccatcaagtctatcgcccaggctcaggtcgatggagatttcgccatcaagcccgaagccgctcagcctgctcttggtgtgtagacccttttgtcaaagaaagaccctcccactcgcccaagataggtcaggcggctaagatgttctgtttccctacttgcttgctttggtttcttgttcttttcttctcttcttctttttttttttgctctctttttggaatgtaatcttttctagatacctcgaactggcctttgcttctcaagaactacgacaaggtaaatttcttgtcgtcaaatcttatctctttctatgttgagactgaccatagtgcttaatgcgacgtgtcggtccactacaaacaaaacagctccttgtccgatcgtctcacttcactcccatccctgttgtacgtgacagctcatcattttttttaaaaccttacctttccgagactctatttgactgatcatccactcttcacaacttcattactacagggatgctctcctttgaagcgagatcttgcttcctacatcaagtttgttaattcctcactcagccatctctaagatttcacaactgaccgctcgcttttttcttcttttgatcggctttctctaggtcgggagtgatcaaccttgacaagccctcaaacccttcgtcccacgaggtcgtcgcgtggcttcgacgaatccttcgagctgaaaagacgggtcattccggtacgctcgatcccaaggttactggttgcttgatcgtctgtatcgaccgagctacccgacttgtcaagtcccagcagtctgctggaaaggagtacgttgctgttctccgaattcacgctcctctcgaggatgagaagtcgcttccccgggccctcgagacccttaccggtgctctcttccagcgacctcctttgatttcggccgtcaagcgacagctccgaattcgaaccatctactcttccaccttgatcgagtttgacaacaaacgaggattggccgtgttccacgtgtcgtgtgaggccggaacgtacatccgaactttgtgcgttcacctcggtttgcttctaggagttggaggacacatgcaggagcttaggcgagtcaggtcgggagctatgggagagaacgacgacaccgtcaccatgcacgacgtgttggatgcccagtggttgtacgacaacaaccgagatggtgcgttttttttcactgcaagcaatgatgcacacacacatacactcgaacttattagtatatcgtgatgtggtctcggattcttttttctctcctctctagagtcttaccttcgacgagtcatccgacctcttgagtctctcttgaccggtcacaagcgacttgtggtcaaggattctgccgtcaacgccatctgctacggagccaagctcatgatccctggtctcctccgatacgaggccgacatcgaggtcaatgaggaggttgtctttatgaccaccaagggagaggccatcgctctcggtatcgctcttatgaccactgtcgacttgagcacgtgcgaccacggtgtcgtcgctaaggttaagcgatgcatcatggagagagacacttacccccgacgatggggtcttggacccaaggctcaggagaagaagaagatggtcaaggccggaacgctcgacaagcacggtcgaaagatcgccggtgtcactccccccatttgggacaagagctacgtcgactacagcgccgagggtgatgaggtccgaggagagctcatcaccacccagcctgacgctgccgctgccgttgagcccgttgccgtgccctctgcgtccgtgacagagctcgacatcgactctgccgccgctgccgctgccggaacgacggacgagaagaaggagaaaaagaggaagcgaaagagcgaggctgccgatggagccgaggccgtcgagggttcggccgaggacggcgagaagaagaagaagaagaaaaag

SEQ ID NO: 2023 - DNA, 7034 bp, Xanthophyllomyces dendrorhous
agaagaagaagaagaaaaagtcaaaggatgccgaggatgttgatggcgagagcccggtgaagaaggagaagaaggacaagaagaagaaggaaaagtcttccgaggagtaaactcatcctctgtttctttctctttctctttctctaatatcttttattttcaaaaaaaagaaatcctcgatatttctcatcccacccgtttcttgtcttactttggctgttttcgactttccataacccatcacccccttgttttatgttctttccatcctcattcgttcacgattctctgtccatcggatctttgttctttccactcaagtcttcacagcaagacgctccatttcttttgctcttatcattcatgtaggattgaccacccgcccgcacatgcttgttgtgtcactgaaaaaaccaagcatcacacactcgatatacatatatgtcatccatcagatgattgacgcacaaccggaagagcgacgtcccaatcacccttgatcacacttcgtttccgccgatccacacattgagagagagagccaaaacggggaaccaaaaaaagaaagaaaataaccctagatcagacctcaacaaacaggaacttgaaaggacaaacaaaataataacggaaagatgaacctttttagtctccagctcctcctgatcccaaggggaccggccaaaatgataccggccgtcaggaacataaaggtagccgacgtggttggcatctctggaagtagcgactttatagttaatccgaacaatgctgttgctaaaggaggtgtgaacgtgggctttccaagttttgttgttgtgatcgattcccagacacaggtgggagacaaaaaatgcgtggtgagcgtaagaacgaaagaggtttatgcgtaaaaagaagagggacgatctcacagagatctgacggagaaggatcggtccgagcgcaaaagacagaatcgagtataagacgagagcaaacacatgggtatttgtcggtaacctagaagcaagaacgaccgaggctgacagggaggatgtcaacgccaaagaggaagacagtctaaagttgagagtagacagaagattgtaatcagtataccagaattctaaagataaagaaggaaattgaagagatacaaaagcaaggcagaacgaacctcttcggaccgccgacatcccttccatggtcgcccaagagtagacctaacacaaacaaaccaccagctagaggccagattgagtcactcgtggttgcttccgttagagttctcaatattggggcgagcgcatggaggaggagaaggcttataatggatggtcgtaggggaaatcggcctgtgtgttgcattttgtgaaccagttgatggttttcgacttcagttggcgacgaaacagaattgcccaggtgatgagaaacagaccaaccttgacaactgtttcttaaccaccaaatcaaccatccaccagatccagcaccgagacttcctaggataacataccccgggtcgatccgcccagtgagcaaaccgtgaaacacggcgatgaacaggaagtgtatcgacagtgggataaagattaccaagcttgacaggatgagtggaccaagcttgggtctcggaggcgaagaagctagatttcaatcaacacatatgtagacacagacatttcagttttagtcagataatctgaagacggaaaggaatgaaccaaggcttcttccaaaagagggacgaacaagcttctcggagaacgtcaagaaacgtttggtctatatgattatcaggaaacttctgacgtcggtacaactgtctttcccaaatttcatcaacctgttcagtctgatcaaggtcggagtcgaggtctccgttagtctttatccggttgagtttcacggctgatagatcgtgtgatccattggggatgaccaagagggtaggacaggccggtcgttcacgtccgttcaagagtaatgctgaggagagacacgaggtcgatgggggtggggaggagtagggaggaggagagaccatggagatgtatgtttccagaaaggagcatgatcctagactaggaagagcagatagaaagtctcgtcgacactcggacggtgtatgttgtcgaatgtcgaaagatgatggtagtgggatggactaagtggtttttttttggatctgatattttcttctgagtgtgttcatgacgcactcttgcgctcagcatccatctgtttcctcatcatgtgtacatactcagtcatcctctttgtacattaggcttgattgatatccatttaatattgtctctttctgtgatttcttctaactctcgatcccatccataccgcctccctcaacggccactttcttactctgtttagctaccggcttcttcatttgcacagagttttgagcgtgcagccggatggtctcccatggagaagctttgaaagccggatgagcttggatttgaggaagtctggctgcttcagtttgactgatgagagaatgtttcagagtgtatgtgtatcgagtcagctcaatatgaaaagcaaaggtaggaagagaggatggaatgatggaacggacagcgctttatttctttgctttgcactcaaccctttcccacttccctctccgatcttcccagccgatgttgctgacttcctgtccgcctgctgtcggttggccttgttttctgccttgttctcgacttcatcctcgtcctcctcggtgttatcgtcagcctggacagtattggtcaaggctagtgtaaggtcgtccattgttccaccggcgagtctttctttctgctttcgtttcatcctccgggcagctgaggctgatatcgggtaaggtgacgacggcgagggatccaggcctgacaagccaagggaacaagcgcgataaggttgagaacagaagggtgtgaacacaggcgtcaggtctacacatgagagcggatgaaggaacaagtgagtgatcgaaacattaggaccaacgtttcaaaagagcttgtcgcttggccgtctgtttctccttcttggtcaactggggtgcgggcgccgagagtgtgcccaacgactggatagcactgcttgcctgaagacagagttcgtccaaagtcattattaatcatgaggatcagcatagctatatatgtacgacataactaaaaggaactctacttactgactggcccatgagcgagttgaaatcgaatcctggagcggtgaccgagccggtgacgagtggtttgtcttgtccagtgagagtcgacgacttgagggtgctgctacccgagccagcctgcctggcctgtctttgttgacgggagaacggggtttgctttggctggtagccagacaagacacattacagacagttgtgaacatgggtacgtgtgagctaaccagagacatagactgaccatggtatgtactgtgggtgttggtatgagtgtcgagtgctgggacaatatgaggagttgatcagaaattgtggtcacgtgaccgagatacccatagtgtgcacacaccgtcaaccatgcgcgctttcctcctcgacgacggcggccaccacgatggtgatagcagccgggaaggatgagatgagcgagttcgattagaagtaggcgaggccgatagagtgaaactatggaagaccaagctatcgatacatcgtgtgcggttgactaccgaactgtgatctctctagagagccctcctaccaccgctcaatcctacttgcaagctgagctccagccgagacccacctacatagcgctctccaacaacactacaaactcacagccgaacagatctccgttcgccagtctttcttccagtctatctacgcatatcggacggctctgagcgtccgtggcgcacacagcgggaaacctattaaggactgttttctaattagacactacaaatattttctaatgcccgcccaaacaaacgcgcagtcagccgctcggctgttgcagtccatctcggtgattccttacatctcgcttgctcttgttctctcatcaccatccctctcttttgattctgtccagagtgtcggctgcaaatgaacgtcaatccgagggatagatcaaatgagtttcgccagtgtctggcctcgatcgctagtcgttcaggtcagacggctagctcaaaggggaagggaaaccaggcaaaacagccgagtagtcaggtagccagtcttgctgctggcatcgcccgggatattaacgcaaccactgggaaactacagaagcttgctcagcgtacgtctgactgggatctctttatcttgttgatgaggtcgttcgtcggtgtctttgtttggtctggtctgatcttgtctgtttcaccgttttcttgtatctctctcatatcagtcgccaagcgaaagacattgttcgacgataggcctgtagagatttcagttcgtctttcttgggtctcaaaccatcagctttcttctcctgcgatccatgttgcaaccacatgttgagcaacttcttgccttaaatacttctccttgacatctttccaccactaggaactgacgtacattatcaaacaagacatctcggacctcaacactcagatcgcctcccttcaacaactcacaaagtcagccaacgcggccaacgcgagctcgtccggcagctcgggcagtgggaagaaacaggtcgaagagcacaactcaaacgtcgtcatgttgcttcagagcaagctcgcagatatgggtatgggcttcaaggacgtactcgagatccgaacccaggtagaatggtttctctcgtgtcctcttttctgaagagaccagacaagcgaggctgatgctgttttgtttgtgccccgacggaaattcagaatatgaaagcatcgaaggatcgaacagaacagttcatgtactctgcttcctcctccaacagccttgctcctgctcgtaggtctatttatctgcgattctttctttctttctgtgcacagtgagctacaggatctcggaccacccaactgacgttcaaaaatcactttgttagaatccatcttgaacgctcctcccacgagaccgtcgtcaacttcaccctacgcaccttcgagtctccaaccgaacggccaatcatccaaagcatcatcttccctgcccggctcgaggtcgtccatcgatggagggtctggattcccaattgataagaaagggaaaggtaaaggagattatcttgcgttggacatggacagaccccaaggaggggatgggaaaccaggctctggacaggcttcagggggaatgcagcaaatgatgatgatggaagaacaggtctgtggctttcctttttttgtctttgatttctttggtgttctcatgatttgttgttttcccccttgtgcgtgtttccttgggctgacatacatatgtgtaacaacaggacgactacatcaaccaaaggtcaaccgcgatagagacgatcgaaagcacgatcgccgagctcggcacgatctttacccaactcgcaggaatggtggctgaacagagggagaccgtacagcggatcgatgccgatgtttccgacatctcaaagtacgtgcctttcgctcctgttttccctgcttgaaacgtcaagacggatccaaaagctgaatcaaacggggccatgaacagtaacgtttctggagcacagagagagctattgaaatactacgccagcgtcagcggcaacaggtggctcatgttgaagatctttggtgttctcatcatctttgtatgtgttgtttctgtttatagacattctacgctcgagttcgagtcggagaccagagtgattaacgaggtttcccacggtcgactctgggggggtccctttttgtttctctttttgttcttcatcttcggaccgcttctccagttcctgttgttcatcctcgtcacttgatctccccttgaggaatcttccggacacattcggcccaaccctctattttgaccagatccgtcttggctcgtaaagtcccggctcgcgcgagccgggacgttacctagacttttcttttatttgctttccttttcttccttcttacttttccttttatgtttccctgtttctctgtttttttcttgtttcctcatctggttcggttcggtcggttcggttccgttcgctctgtacctcacagagtcctggtcttttattttcttcattctccgtaatctaatcattgaatcagataaaagaaagaaagaaagaaaaggggagagaaagagaaagagaggattgcaagaacaaggcatgcagaaaacggaaaacggaaagactacgtagatataggagaaagcagaatggccgacgattgaaagaaaaaaaggaaacggtcaagaggaagaaagaaggaggggcaaaggaaaggaacaggcgaatagttacatatggaattggattgagaaaggaacacagaagcagagagagtagtagtggtagtagtagcagtagtagtagtggtggtggtggtggtggtggtggtagtggtgaaaaacaagagtgaaacgaaacgaaacgggtcgagttgaactggacttgtgatggcaagagcaaacgaagagagtgggaaggagggtataggacatacacaagagggagatagtatgaaagacagcgagaaagaacaagaattatctacggaaacgaagaaggtgagtgaaaatgacgaaaagaggtttcggacctttttaaaaagtggacaaagcgcattctttccttctttccttcatcacgaccaaatctggagagaagagaaaaagaagagaggaaaggaagaaggcacgatccatcagatccaagtccgcgagaaaacataaaaagcagggaaaaagacagaagagcaagacggagagactcactttgagaaggctatcccaagaacccgtgcagagcgccattccgtcctgactgactcccaaacacgacaccctgttctcatgcccgttcaagatccccactcgttctccctagaatgttttttttttgggggggggg

SEQ ID NO: 2024 - DNA, 3095 bp, Xanthophyllomyces dendrorhous
tttttttttgggggggggggttatgttccagattgaacacatgagaaagaagggaagagaaaacaaaagagaaacagcatggccggtcgggttgttcagaatcctcgagaattctacggacacacgaaggacaaggccgggaagaaaatgagacagaccttgagcgtgtcccacacgttacagttattgtcatcatacccggcaaacaagatccgaccggaagcggagaaggcgacggaggtgatgccgcataggatgttgtcgtgaacgaacgtgttgagctccttgtcggcccggaggtcaaacaacctgcaggacgcgtcgtcagagccagtcgcgaaggcttctccgttggggaagaatctgaaagaaacaagagtgggtcagaaggataggtcagagagatagaccgagggaagctcttgtcgacagaagaggatcacatactggaccgcgttgatatcactttcatgtccggtgaacgtctgaacggcctttcctgatcgaatgtcccatactttggccgtcgcgtcacaagcaccggacacaaagacgttggcgtttggtgagagcgagagtctccagatggtttgatagaacggttagacatagtcaagaagaaagagagagggagagagaacaaaaaaacgtcgatcaaagaaacatatacacacgacatgacatccccggtgtgatcactaaagtccatgatcttgactcctgcgtcaatgtcccaaagcatacaggtcatgtctcccgaggaggtgacgatctgcctgtcgttgatgaaccgacagcaactgaggtagcccgagtgagcactgagctctctgctagcttttgtcccgctcgccccgacggtaccggtcgagctgcccctgatgttgtagatcgagcacacgttatccaacccgccgcacgccacaaagtttcccgaaggcgagtacgcgcaggtcatgacccaggacgatcggagtgggatcgcgtggactttgttggtcgtgtaggcgtcccacacgatcagctttccgtcctgggaggcagagacgaggtgctgtcggtcggttgaccagtgcatggcgtagattttggccaggtggccttttagagtccgacgtggtttcatcaccactcggggcagcggttcgatgtctgctgcctgggctcggactactcggatccaacgtgttgacgaggatacatccaggtaaagcgagagaaagaaacaaagaaacaaagagagaaaggatgaatgaccgggtcggacgaacaaaagggagggaggtctgacaacagtgtcggtggacgtgtcaaaaggagggctcgatgatctcgacacaagacaaagattcattcgagggaaccagaccggagaggttcttctcggtcacgctgttctccaaggtcatcccacgatgagatgttgatccaccgacgtcgccctccatcaccacaacaggatggttgctcactgtcgtctttccttctttatatatatatatatattcaatcgaagcaaagacacggatacacgtacgggaagtatcagccacctcttcacgcttactcctgatcttttctttcagcccgtcggcttctctccgggcggcagagatcttttcttgaatatcgaccgaggacattgatgagtcggacaggttgggcgagagatgctgatgggtaaaaagatcgagtgggaacaaaagggatctgtttgattcgagggaaagaaagggagagggggaagcaaaagtcaacggataggcacaaagtgatggcacagcaagcacggtttattgactgactctagagctggtctatatatgattcagcctctggcgaagacggaccagctagtggagaaaggaaggatggagagagatgttgagcagagtcaagttgatggccaagacgcgatcggtcgattgattggatttgactggcgcacggaaactaggccaacaaaagaacagagtatacagataaacctggaagggcgaggatctggatgcgaactggcagcgctctatactcgtacggggtactgagaaggaggagctagagaacaggcaagagacagaggttgatggatgatgctgatgctgttgatgctgatgcccgccgatgatgatgtatgggatggaagttgagcggccgaatggaaattggaaaaaagcgcgggggggaaaggaaaaaaccgaaaagttagttatacaatgatccaaccgttttcaagagcagtccttttttgtttttctttcgttttactatcgagagctcaggtggcttgctttggtgaatgttctcgctttgactgacgacgacgacaacaacaacagaagagatccggggtgaaccggaatgtcgcgtcgggtcatcaacatggttgtcgacaagagaaacctccgaggagggcggtcagtcggatgtgcgtctcatatgaacacacagacataggaagagccggacgagaacgagcggatgaggaaacataagatacagagtgacgaggaaagaagtggatagttgctgttctctctcagataaatcaggcagtgatgaagatgatgaagagaacaaggcaagaaagatcctctttagagagcaggagaagctagatatcacggcaagattggaagggatggtaaagaaaacaaagaagactcctcctctcttttcctgtggccccccaaaaagaaacaaagaaggatctgtccggaaaagaaaagaaaactatctagtctcttccttggaagcggtggcagaaccggcttggtcgccttcgttgactgctccgttcgatgaagaactggcacccggtccagagcccataggggttgccggtccggctgaactcgatcctggcgttccagttccggtggccatccttgcgtccaatgctttgagagcgagggctcgtcgtctttcggcctctgctcgagcaccggctccacccgagggcccggggaggagagcgtactcggcggaggcaccgtagggctggacgagtcggagggcgacaaacaggttgaacacggtgtttgctaggaaggagattggtcggctttggaatgggaagggggaaggggaagggg

SEQ ID NO: 2025 - DNA, 1667 bp, Xanthophyllomyces dendrorhous
ggggaaagggaaagggaaaggaatagaagaagaagaaggtggggtgggtggataagaaaagggggttggctcaggaaaagacaacaagacacgatgggaatgtagacagaaatcaaacgcactggatgatcggagggaaccagttgacaaactggaacgtatcgctacggtctcctctgaactcgcccatggaaccttcttgatactttacgaatcgcagatagacccaagcggaaaagaaaccgaactgaatgatgatgtacggattttgagcgatgacaaaggtgaggacgttcgagatgaggaggtagattccagggatgttctgtcatgatgtgttggtcggtcgaggaggggccgaagaagacgaggaggacaaaaagggcaaagtggacaaagtggacaaggatgatgatgatgtcgtctgttgagcatcgtcctgattgagaccaacagatggacatggaagcgtgcgcttaccttgactcggattttgatgaggcctccaaagatttggacttgatgctcagggatcaactgagtgaacgcgacgaggaaaccgacctgtagagcagagagaccatggacggtcgatccgtagctgtgaaggatgataagattgggtgacgcccagacaagagtttattagcgaggtccatcttgaaggagaggatttttgggggggggggaaggaaagaagagaaagagaaagagaaagaaaaagaagaaaagaagcagatcaagacacgtacacgagaacctcggcacctagcacaaagtacaagatccaactgagaccgatagcgatcacgttggaggcgacgatgacgacaaaggtaaacttggcgagctcctttcctccccagatcctttccaggtatcggccacagagaggtaaggaaacgacggagatcaagaactggaaagaaaccagacgtgatggatggatgttagtgtttgggttgggagcgggtaggtgagagctttaggctgtgatcatcatcatcatcatcaccaccaccatcgtcatcaccatcatcgacaacatacctcgaccaagtttccctcagcaaagccggcgatgaggatggtccatggatagtagaacaccttgccgggtacgcaaaacagccagggatagtcttccctcggggcgggatggaagagtccgtagcgggtgatgtgggtgtctgctcctgtggggaacgacgaaggcgaggcccggagagaggacgacgtcgagtttatcctcagaaggaaagcaagggttgatgtggtgagaaggatgatgaggagcgaccgggtgactgtaggaaggacactgcacgcgacgaagcacgacgacgccgcacaacccaacccaacccaaaaccacaccacaccacaccacaccaaagaacgcaagggtgagcgagattctcactaaagaatcagaaagaaggaaagaaagaaagagaaagcgatccggggcgcagaacgcgatcagcacgtacttgagagcgggaagaaagttgactgccggcatggcggagggagtggatggaggcttttttggggggggggaatgaaccaaaagaacgaaactccaacaaagcactgaacgggatgatctgcgagctcttcacttggctgctggcttgatagaacgacctgggcggactgtagat

SEQ ID NO: 2026 - DNA, 576 bp, Xanthophyllomyces dendrorhous
tccatcatcccatcaacccatcatcccccgggacattgtgtttgtatctctctctccccctcacacacacacacaccctcgttcacccccctatcacccgctcaagttcctccccaagaggaccgctaaagaaaaatgtcaaagcgagatgacgacgatcggccggtcaccagttcgtcgtccccttccgtttcctccttctccttctatccgtctcttctttgttttttttttcttgcccttcttcctctttctttccatgtttccatctctctttctctcctttcttcattcaagctcaacccgactgaactcgcctgcttctcacgcgttcgcaccacccccctgcagtacacgacaagtcgaccgtcatccaagaagccagagtgttcaacgagtcccccatctctccttccaaatgcagatcactcctcgcaaggatcgtctacctgctctactgtggggagacgttcaccacacaggaggccacccagctgttctttggtgtcaccaagctgttccagcacaaggatgtgagtagtcggatggcctgttctttcccccgtctttcccttg

SEQ ID NO: 2027 - DNA, 3618 bp, Xanthophyllomyces dendrorhous
gtctcactgtgtgcaacaataaaccaaccaaacatctggacaacgctttctttcattccaggcccaagccgttcagtccgtcgagaggttcttcaagtcggccatcgtcgaccgatcaaccccaatctcctccgccgcgctcatatcggcctaccacctgtacccgacctcgaaggaggtcatcaagcgatggtcaaacgaagcctccgaatcgctctcccccaaacccaccaccgcctcctcatcctcgtcttccttctccctcggcttcggtgccggctcgagcggaagctcaaacgcacccgccagccaccaggtgctctccaccagtggtatcacccagtaccacgccctcggtctcttgttcctgatcagacagggagacagaatggcggtcaccaagatggtccagcagctcgccggaggcaagggtggcagtgtggccagtctgttgcgaaaccccatggcggtttgcatgttgatcaggatggccgggaaggtgatggacgaagatcccaagtaagaacttgttttttttcttttcttttcttttctttctctctcttcctcaatttcctctgtcttttctaggtttcccctccgtgaaatcgtgcacacactaatctgttcaaactgctcaatccttcaccttcccaccctcaccatagcgttcacaagcagatgtttgatcttttggagaactggcttcgacacaagtccgagatggtcaacatcgaggccgccagagcgatctgcaacattcgaggtgttaccagttctcaactcttccgacctgttgccggtcagtcgaatcccgttctttccttctttccttctttctttctttcctttctctcccaggtacccaacagagtgatgctcaaacgtcaccaactctctcctctcctctccaaacgcctacagttctccagctgttcttgacttcgccaaaacccgccttgaagtttgccgctatcagaacactcaataaattggctcagactcatccggacgctgtcgccgctgccaacaacgagatcgaaaacatgatcaccgaccagaaccgaagtttggccacctttgctatcaccaccctgctcaaggtccgtccctctttgtttctctctgtcccgaccgaacgtccgactgaccaatctttttttttttcctttcctttcctttcctttccttccccgaacaaaacagactggaactgaactctctgtggaccggctgatgaagcaaatcacgtccttcatcaacgagctcaccgacgaattcaagatgatcgtcgtcgaggccatccgaaccctgtcgctcaagttccccaagaagcaggccgccatgctcagcttcctcagcggtatgctccgagacgaaggaggatacgagttcaagcgaaccatcgtcgaggctatctttgacatgatccgatacatcggcgagtgcaaggagaccggtaaggctggatcccccccttttttcctcttctctctctctctctcttcctcggacgcgtattgattgttctttgcttttcaatgttgaatcaacacacacacacacacacacacacacaaatagctctggcccacttgtgcgagttcatcgaagattgcgagttcaccaagatctctgtccgaatcttgcacttgctcggaatcgagggacccaaggcttctcagccgaccaagtacatccgatacatctacaaccgagtcgtccttgagaacgcggtcgtccgagcggctgccgtctcttccctcggcaagtttggtgtcgaggtcggagacaaggatggaggaagtgtcggaaggagcgtccgagtgttgctcaaaaggttcgtgtcgcgtttcttgggtcttctctctttccccctccggtcttcttgtcgttgatcacagcactgaacaaaactctctgaccaaccacgcgactcacaggtgtttggacgacgctgatgacgaagttcgagaccgagcggctctctacctcaaggtgctcgacgagcaggctctcgctgatatctacgttcgagagggtgagcctgatcgcttttttctgggatcttgacttgatcgtcacaccgtcaactaatatgctttccttcttcaactcgggtagaatcgaccttctccctggccgctctcgagtccaagttggtcgcgtacgtgaacgatcccgaggcttccacctctgctttcgacgcgtcctcgataccgaagatcagcagggagcaggcttcccaggaatctgctcgtccgtatcctcctcttttgctttaacctttttttttttttaattcaaatctttcgaaaccacgcctttactgagaaaaggcccgtttgaatctgacgactctatccagggccatcatctttggagactatgaacgctgccatcgccccgaaggcagcccaggaatccgctcctacgccttcggccgaagagagccaatctgcctacgcgtctcagctcgctgctgtccccgagtttgccgactatgggcccatctacaagagcagctcgcgaccggtcgagctgacggagagcgagatggagtacgtggttggtgcggtgaagcatgtgttcaaggatcacgtcgtgttccaggtaggtctctctttttctttttctttttctttttctttctcatctcacaactcaaactagagtagctgacagacaacacactccgtgtttgattaccgtcctcaaatagttcaacatctccaacactatcccagacaccgtgttggagcaggtctccgttctcatgcagccttccgaggattcaggcttgatcgaggactttatcatccctgtgccttcgatatctagccaaaactcgcccggagtggtgtacgtgtcgttcagccgggaagacccgacgtcgttcgcactcggctcgttcccgtgcaccctcaagtttatcagcaaagaggtcgacccggcttcgggagagcccgaggaggatggttacccggacgagtaccagatcgaggaactcgagttgggagcggccgactacatcgtcccgtcctacgtcacctttgccaccgagtgggaacgactcaagggcggtcagaactcgaccgagacgtttggtcttgcttcgtcccagagtttgaaaggtcagtttttttttagtttttttttttccttctttgtcttctgtttgtttcttttctttttccggtcgagtcgacgaacgatcaagtaaactcatactgtttcttccctcaccctctcttgtttgtcgatcgcgctgcaaaaccaaaaaaaaaaaagccgcttgcgattcgctcatcgaggtcctcggaatggaacccctcggcggtaccgaactacccacgtcgacctctgtgcacacattaaatctctccggtctcgtcgccggtggaggaggtaaggtcttggcgaggagtcggatgacattctcgaccggtgacggtgtcaccctcgagttggccgtcagggccgagaaggaaagcgcggttgggttggtcttgagtgccatctaaaacggggtcccccctacacccccctcgggccttgtcgttcccttcttccgtttgacttttttctttttctttttcgttcatctttctctttgtt

SEQ ID NO: 2028 - DNA, 17498 bp, Xanthophyllomyces dendrorhous
  misc_feature (2108)..(2117): n is a, c, g, or t
cttttcacgagaggcgcatagaaggaaaagagacagacggaaagcacgcgcttggaacatgccgtctgatgaccatctctatcactccaggtctgatcgaatacaatgaaaataagagagagagagagaatttatgggaaagaacaaaacaggggaagaggaagaacatgctaatgaggtcaaggcccaaacgtgattcctaccctcgcattactactcgccacatcgatcgatccattcgatccttctccggacgtcggaccgacgtgtccccagatcctgccgtcggtctctctcttcaacttgtttgcccctccttcgccgaggtcgaggccggacaggaggaccccttgggacccgctggaccggacatcgagatggcctgtgtaaggcagttgataggccagctctataggtgcgttcgatgtcttgatcttgagcttaggttgttgctgctgctgctgctgccactgcttctcatcaggactcttgtctggacccgttggcgtttcaacaggtttaaaagtgatcgaaataggtttatttgacgactcgaccttgcattcgaccgaacccgtgggaacatcaatcgatggcaaccgcaccggcgcgttggacgtcacaaactccatcctctgcctcgtccgctctgccagaggcaacgatgtcgaaggacgggacgagacccgaccaaactcaatagacgcattggacgtgatgaccttgagtgcctcgcaacgcatgtcagaccctttgatcgacgcattggacgtgcggaccgtcacgtcgcctttgacgtccaccggcgagctgaacaagatggatccgttcgatgtctggatgttcaaacctgtaagtgggcaggcagaaggaagcgaaagatggtacgatgtgttggaggtgaacgtggtcatgacgtgggagggcgctgagttgtgcatagacgagccagcggggaggtgtatgacagtatggatatagagaggattcctagggacatgtatccgatgaggcgtctttcaaaattgaacccgatcaagatttgagcgagaacaggcaaggaaacctcgatgatcagtcagatacagaaacgaaaagatggttcccaagcaagaaaccccccacgccccaaaaagactcacatagacgcccacacctctgacatcatcacctttggctaacagacaaacattgagcgtgtctagtgcgccctcagccgcatagccgacatgaaccacgacctcggccttaccggtcgtgctctccacaaacctgacgtgaccagcggaagacgaccctctagcgaagaaaacccattctgtcgttccgttggatgagagttccaatgtagctgtcttccaggacggatattggtccggactgacatcagtggaagatgggcgaccagccggtgtgagagggggattcaagaggacggttccatctgaagatggaggcgacggaggacctgagctggagacgacgttgcccatgatggagtgttgatgtacaaagatgatggacaaggcgaaagatgagatgacgagaataaaataaatgtaaccctaacacaagaatttcttatctcaacttgtcagtgcgcaagagaacagataacaagtacatccttatatagaggatagatagaagctacgatggatacagagaaagcggttaggagggcagcatggaagcctatagtgtaaccaaagaaagtagagatctgtctattgcttatcccaaggggtcaacccatctggtccaagtttctctctgacaatctgatgggaaagattccataggttgtctccaatctctggatcagagcactgggcggtttcttttcccggagtggatgaccctgagaagtagtaaccattccatcctttttcgatgacttcaggattagtcagtgcccagattgcagagtaagagccctgctcttcgttcatgcctgcggcttctccgaggtattgaatagctccaccgacgatcgttccgtaggcgtctttccattgatcttggccaggagtgataacctgtgtgttatcagacatggtactttaagctcgtccaagcttgtcaagaaaaaaaaaagaaaaaaaaannnnnnnnnngggaaaaaaaagggaaaaaaaagggaaatgcagaccaccaaaataataataatcgaaaacgtacggttccggggtggacagccgagcaccaaatgttgtccccattcggcttgatgactttctctacaattccgtactttgctcccagaatcatcgccgctttggttcgtccatatagctgttgagacgaagaaaagattgttgaaacacagcaggaacaaaagtcgatagacaagacggataccacatgtacgtaacaagaaaacacacctgaaggggagtgatgctctcatcatttatctccttcatatctgcaaacttcatcgagcccggagcagccctgtgaagctcggaagactcaaacacaattctaggcggctgaacgttcggcagcttcgaagttcgacggataagagggtagatcgtgttgatggctaagaagtgaccgaaccagctggaaacaacagatcactcagaatagctcgcaaaaaaccacatagaatgagattgaacctacttgactcccatgtgtctttcaattccgtctgagtccagcccgtaggtgtttatgttgatacccgcatcgaggacgagctgttgggatcaaggtataaagagcaacaacttgagacctgttccgtttaccatcattccaaactgacaacccactgaccagatctaatctatcttcttttcgctccagatttccaaatacggacttgacctccttcatgtttcccagatcgcagtgaacccactcaactaccgcatctgggctttctttcttgatcttggcaatggccgagtcaccctgttcttccttccggttgatcatgatcgttcgagctcctgctttggctaaggccctggagatctcgtaaccaataccgagagctccgccagtgacgatcgcggttcgaccgacaagactgggcgggatttgaacggtagctagaaacgagtatgtcaacaggatcagtcgagaacatattccacggatgaatcaagaagaccgactcacgtccgatcaaaggggcgaggactgattgcatgatgtgttgattcagatgatgtggcgagtgggtgagataggaaaggagaaaagagagcgcatccttgttcttcctcccctctttaaaccattgagcgttcgtgttcgtccgcaaccgatcgaagatcgggagttgaagcgtcatcgacagacacgctgatatgattagataagaatgtaatttatcagcacacgcgtcttgtgaacgcgtcttgctcatcctcctcctgacgaccatccctttccgtttcaattcattccatccacgtcgaacgcactgtattccttctgatatgagtacggatccgatagaggatcaaactgatcagggtttcctcaaaacgttggcactctgtagagtgagttcagcatgtcgttcaaatcccgttgacgggccaaggtttcgtttgcctcgagtcaatctgaattcatgaaacctgactgactcgtatctgcctttcaattctgtctatccatcatcatccatccgacagaaagctcagatgatgaagaatagattacagaggataggttcaaagcttgctcctgtctatcgaaaccctgctgactcgcctccagccgcactcgcacacacacctgcgcctgaatcattgacagtcggtgcttatcatccggatctctctttcgcttacaaaccaaacgcgtccctcacactaccaaaatccttaacaaacgatcatgtcgggcgagtgctcggaaagcggaaagccgacgaacaaacttcaatggatgagaaagtgaatggccagaagtcgcggccaaacttgtatcatcacctactcactcatcgtccaaatcatatcactgatacttctaatgagtttcatgaggccggaaaaatatccgctcgccactcaacaagaacaaaccaagggatagaagcccgtccgttagggtccagaggatcgtttgggaggtcgacttctactatcattcgaccttctccaacatcaatatatatgaatgaactgcctgatgagcttgcgtcgaacgcttcatcttgttcttcgatagcagccgctgtcacgcctaaaactacaaactccatcgtctttcatccttcaataccacctgttgtcaagtcagacccaagcgctcggccacttgcgaaacacagcgttcctcctgatccagtcaagaccgacaaagcgtttgtgtcaaattcacctttacttgtccatccacacccgtcgccgatacatccttcaattcatcctctgaatctacctccctctccgtgttctccgaattcgatcctttctttcccatcttcgtttgcgtcaactaagccggccacctctccttctccaacgtcgatcacaaagcagacggcgacaaccatggatctgctccctgtcacacccacacccttgtcagcagattcatgcacgtctacgcgtcagataaagggtcctttgggtgttacttcaccctcgcccactcttgccccaagatttcaaccgcctacaggaccaacagatagttggccggactttggatatcttgggtcaagtatcaaatgaggggtcggataaaagaaaggcacgagcgactgcatgtccaagctgttcgatttgtgttataagaatatgtatccccagtttaaaaaaaacccttgcaacgatcggttgttcgacatgttaatgcccaagaccttgaaacacaaagaccttctacaggttacaaaagaatgtgatcaaaaaggaaagtataggacgtccagcccgcgttgactatgaagatactcgaaaagtccacaagtgaatttgaaagggatacgatgctacacgtgtgaacgaatgctacgataattgtcccaatgatgcaacgcacagatagtaggaagtagagctctggagataagagcacagcagtaagaaaagtaaaatcaaatagcccaagtataagagagatgtagaaaagataaagaaattaaaaaatagtaactcatgcaagatgtagttgttgaacgtatgaatgatgcttcacgtcggattcactccagacccgacgatcaccttagtcgcctcactagggacgccatttactaccaagtagatatagccgggcccaggaggatagatctgtccgtttggaggggcttgaacaaccaaagttgttccaacgatctgagtagtcaaatatactagcctcatattggccgagttcgaatgcgtcttgaaacccaggtccatcagcgcgacctcaacgtccgtcgtcccactaggaatcgagccagcagagacggtcaagttaaaggttgagttaaaggggatgttctttggtaggttggagtacaccggtcgattcgaggaaagagcaggagaagacagccattcaactcggaattccgtaggaagaatctcgttgcagacatccgggcatggtgagcttccagcgatctaccaagcgcaaaaatacgaaaagaagaaagtctaggttagctcttgtcgtgttgaattctatctctcatagatttagagaaacgaagaagatcttatggagtactgaccatgattcggccatcagcttcagaggataaaaactcgcgatgatgtcaatgaaacgcattttgataagtgttgatattgagctatatggggtctactcacgaacaagagttgcgacagagtgatagactcgggggatatttctaaaatgtttgtcggttgtacttagctagagagcgccctactgtgaaaaaaaaaggaaaagaaaagaaaacaatttcaagagacttacgacgctggaataccggtagtggagaatcgagttcccttgggcgctaaatattccattgttgttaacatgtgtctgacaggatagaacaaggagtagtaaaacaaaatgtgaagacttaccattaggatcgtaaagcactggctgtaagacagggttggcgcagtttgacagtccaacaaggtcttccacatttccatctagacgtgattgttcaagtcagccaactttgtcatgtctcaactcattatccaagtcaacaaaatctgatggaacatacatccagcataaccagactgacagccgttcgcaaatatgatcttcccgtcgggagtcaaaaccgaatcgggctgaccgaaggatcgtataatcaaagaaagtcgaaccagtttcgcagaattcagcctggtgtttgtcaactgacgacagataaaacgtaccatgagccatggatggggcaaagactccacagaccaaccagctgctataccagcttcagtcagaaccatccgagagcactgatcggaggcgggatccgatgttttgagcttttgataccgcaggtcgtagaggtaaggcataaagccgtcagctgaacattcagccagctaatgtttacaacgaaactcacaagcgttggtgacacagtatcactcgacgtcgatcctccacagatcatgatctatgattgaatgatagggatgtatgaagttgagttcatgtcagttcttgagaccatcaaaatcgaaatgatcagaagcgattacctccggttgccagttgttagcctctgataaagggagcaagatgccagttccagtcatcgggtacgtcacccgaactccattagggatctgaggcagagccgtctcgatattgttcttccagtcatagatgattgcatcctgattggcagccatgaaaagtttctatcaaagccccatcatcacaaatacgccccagcagccgtcagaattatagtaggcttcacaggataaacatcaaactatgagcttactccatcaggaagaagaaagctgatggcgaacaagttggcattcaatgtcgaagtcaagaaatctaaaataattcaaaggttagatccatctgcgtcttcaagtccatatgagaatgcaggctgaccagagttgaccggaccggaaccttttgatctgtagtagaatgcccaaagatgatcagcaatccgcctgagacgaggctttctacaagggtggcttacgggtaaaactcgtaggaaggtacgttccaggactgaacgcacgaacgatcataggagaaggcttattagctcagctgttccatgatatttagaggtaactaaggattatccaaactgacaggctgattgatgaatcctcccgagtttgaaccgccaataatgattgctgatccatcgtccagccgagttacggtagggtaccatcttggctcttcgattttgagtacgctggggttatcgtaccagacacagcctgcgctggtggtacagttttcaagcaggcgcaaaccttgaattccatcgacatactattcgcatcatgaaatatgtcagttcaagaaactttgtgtaagccttaaccaagagacataggaagaagtaaccgatatacctgaaagtcgaggggtcctgtttcagaagcgtccaccggatttccgccaacattgatcaactgcgacaaaatgaatctgcgaatgagtaattggagactcaaacaaaaattgagaggcgccagatatatgtatacacacagtaccatcgcccaaaaatgagccaccggcgcctatcaaaacatcgtgagtagagaactcagtgttgagcaaataatgggacagttaggccgacttacagaatgaattgctctgtagattgataggcgtaacttcattggtttgcactagttttacgagaaaaagaatatgtctgattagcttaaagttcaacttttgatcgttcagtttgtgggaggcttacagttatagagagcagaccaagcagggtgaccgtcgatagtgagagggttatgggcgaccttgtcgatcaacacagcatgagtctcgtcaattactaccaatctggaggcgatagatcaagggctaacagacatcagaatggattttccaaccagcggtatgaccacgataccagagaccgttcagcagaaagaaactgactgcatagcggatactccagtagttcctttttgaactaaagtccacttctcgttaactgcagcggtatttgtgaccgcatctagagaggcatccttgactttggcttcgacgagcgcgtcgtacccgaaatcaaagctctcggtaaaaggcgtgatgaccagagcatctatttcgacgtttgaagctgtactagacggattacgtttgtcgttgataaccatacgaagatcactggtgatagaaggcgaccgcatagaagaacgatgagagatgtattatggaaaagcaaatacacatgtcgaaattgtgggggagatgaactcttactgggttccatttccgaggttctctgatcggaagatagcttgttcagagtattcctgagcagaatacagatcgttctgcgatacaagcaccgagtcgatatagatatccctagagatcgacaagaataggccgagttgagttatcaccactcttaaagagatcgcaaattcaatggaggctcaactcacactataccactgcaagattcatccatcaattaggtcaggacaggtggccaggcgtgtgcttcagttcatcagcaatagaccttgaatatgtgcgcatataaccgacaagaactcaagggagagtactgacaaatctggcccaatagacccgaacacaacgatcgaatcacccttgaaggaatacgctactgaagctccctcctctgaactccagtgggacgttccgtttacatgaatatcttccgcaatagcggaatcccatgcaccagcaggactatagactagcgaagtggaattatcatcgatggctgaagagcctgtgggcacatagtaaggtgtaaaaggcgtgcccccttcagcaccaggaaggtactaagttcgagacgaatgagtgttgaggcgtgaacaactatcgtttactagaactgtatagatttgacagagtaaggaatagctcacataaccctgccaggtcaaagtcagattagactttcgtggctcaatttcaggtcgccgagcttgaaagggaaaggcttgagacgataatggtgtaagtagggtggatagtaagatgatagtcttcatcacaatgataatgacgataacgttgatgaagaagaatcagtagggttccgaggtgcaaggaatgggaagtttaaaggaagtgatcagagaatataaactcggggtatgataaagaagaaagacgcaagaggggatacaatatgtgtagtgaagggaggagaaagtcttttctatgaggttagttgtaagtctcgtcttaaatgtttcttcaagcgaagtatcggacgagcagtcaattggaaagtcagcctgtacaccgtgctcaaccattcgaacaagtgtgggagttagagccaagaaaagagaggcaaatgtacgagatgtgtgggcggtacgagatgtagccggtggatgagtatgaaagtgcaaacgaatgtacgacgctgcctatacattgacggcgtgacgcgtgcatgcacatattgaacatctcctcgacgacctctccgtgcgccgctcggcaatcattatacagagaagaaaggaacatagaactttgtcgaaactagctgcatagttcacccatggtagtgtgatgggcgccatcgtgcagtatcggtatcaacttcttccttcctattctattttctgatcttacaagctgatccgctgctcaacgtattttagttgatgattttgatttacatcttcatccttgaaaagaattattatccagtcttgaacatcattgtattcatatttagtatgacacaccgagttcaatcgatactagaaacaaatgccaaaatccacacatcatacaatggtcaatggacgacccagccggtaatagtacagaaggtgacaaacacagccattctttgtcgagttatcttcagtgtaccagataaagatagaaaaatgagcagatacattaggagtgtttttcggcttggcttgatcagacatgtccaggtgatgtactggccaaatctctcagcttccttcgaagaatttttccagacgcactagtttacccgattccccaaaaaaggagaagccaagcaagaaccataaagccaaggagatttaccaagccaaatcagaacatccccggacggagaaagcaacaatattatcgttagctgagattgtccggagttgcacatctatacagactggtgacagaggagacgtacgatcttggaatctgatcaatgagcacgatcccaccgcggagcagtttgtgtgaagcaacctgcatttcaagtccataccagagagggtagtattcaatatcgagcacaacgaaagctatactgatgggggcatcaagtagaaccggcggctgcggtgtagtaaggttacaaacctttgtcttcatccagtcctgaatctcaaggatcaacgtggtctcagcctcgtgcgttaacggatcgtctgtactactcggtgcaacaaaggctctgtttgtgattgatgcaagatgggtgggtggacacaacaatggattctgaagacttagaggcgggtattagttgagagggtgtatggaaaaggcggttctaacctgggtacctcagacttctcagactcgctccaaatacctactacaccgacatccgctactccaggatgggtcaagagtaaaatctccagttcggcaggcgcaacctgatgtctgtaaacccaggttcgataaactaccttcagcacagactcttgagccataaaatgagaatggagagataccaggaaaggacaaacccattatacttgatcagttctttcctccggtcaacaagccaaaaatatccatttgggtcgactcgagcgatatcaccggtcttcagccaaccatctgaatcgatagtatccctagtcgcctctggattacctaaatatcctctacgagtgcgatcacgtagctcagtacagtatcgattcaactgacgatgagacgaaaggaagagcacgtacttcatcacattcggacccttaatccacatttccccctcagctgatccttccttgtcaggaacgacatccttcccctcttgatcgaccaacctggcttcaacgttaggtataaggcgtcctatagaaccaggatgagcctgtgtgtcggatagttggaggatatgggttacaggagacgtctcggtgagtccgtatctgaatgatagatgaaagttattgtcattcaaatcaacaatcgagattgaagcatggtataaatgagagacgaacccctgaaggacaatcgtgtttgatgcagaaaaccgggcttccactttgtgaatcagatccttccctagcgaactatgatataaaccaagcgaacatgtttatgatcagagaaaaaaccatctttgcaagtcgaccatgtggtgagaaacttacgcagcgccagagagcaaccaatccaaactactcaaatcatacttgtccacgactttggacgatgccagatgtatctatcacagagggacaaattatgaaaatatctaagccctgaccaaacccagaggattccctccaatatatgatgctgctttcagagtcaagtctgagagagaacataccaagatgggtggaacgacgattgcgcaagtcactttgtaagtctggatagcatgacagatcgctctcaaatctattttctgagctcgagatgaagatgttgacacgaaagtaaggataggctcgatgggcgaagagagtttagctagaggtaaaagggtcttacggggactatgaccatgggaaacccatgctggagtggtaagagcattactatgttgacaagataaagatacgtcaggggtcgaaggacgcaatggatggtctgttttgaaatcgagaactctattttttctcacatttgaagagaccatagatatgagagaaaggctacgtgtttcaaaagtggtaagtttgaatgaatctaggcgcttagtctcgtaaaaagatcatgaacaaagtgacactcttaccaagaggcctagcatagagtctttggctggatctagcgtaggaaaaaccggaggtttcatcatcgtcatcaaagacgtcaaattatgatgtgtcgttctgatatgaatatttactcagagggataaataataggtcacgcgcagactgaaggacattagcaaagcatgagaaggagagatggtacaagactcactcgacacctttgctgagaccttcagtacctgagctgaagcagatgacgctggtgcgctgtgctatatcctctccctcccgttcaatctgtctatcctcgagttccacctgttcgagcgagatatcagctttgaggccgtccaatgtccggaatccttgggtgtctacgttcggagaggaatcaatcagaactgttttacgttgtatctccgaggacgaaggtggtgttaagaggagtgaatatgccgcttgaagcgtgggaaggagagtggtcgaggtgaaagtgacttctggtcgggagagctccaattggcgagagagatctgtagaggatctatcgtcagaagttataaacacatgtcaatttgcctcggctccgcgaatctgagaaaaccttcacagtacttgtcaagaaaggtcaaagaagagaaagcttacagagaggacgcgaacaaagcggtaggccaacctcctcgttgggcggccaggaaaatctctgcccaatcaagaccattggctagaaagattcctaccgtctcttttcttctgaccaaacctagctctgagttgagtcctttggcgatcttcccggcttcatgtcgaagatcatttcgggacagtgatttctccgttaacgcatcaataaacgcgggtgacgttttggagaacggtgaatcaagagggagaagatgagaatacaggtttcgaacggggagcgactcaatcggaatctcaggaaagggggatctgtagatgggtgagagaagtacatgagaatgagatgttgaccgagccagagacgctctactgagcaacttcgtacacactctcaacatcatatgaaggtgaatgtgcagacgagtggttggatatgttcattctgtggtctccaatgtagaaggaaacttgagaaaagggaccccagttactaccgcgagtaaccgatctcactcttcaactgccgtccccccgattgggcctctgccttttcaagaaaacactcccatccatcttaacctttagtttaggcgtatcagcccatcgaagcatctctttgagggataccatttacacacatgcgtcctacagacatattcctcaagcagcctggcttgtttgcgcgggcctttcaactgttcaatccgaaggtatgacacattccaaatcctctgcgattattcttgtcctttccaaaagtctgatctcttactcgatctgattctgatgatatgttcgaacttgggtgatgtgatatgttctcacagaacagatttctcgtaggatacgatctcgaaggtaaggctttcttttccctttttttctgttttgttgggatccaagataaacgaatacaagcttacgttccgctttgggctcatccgtccgttgctatgtgtgtatatgtgtatgtgtgtggcatacctaatttggcttgattggattgcctccaaacagggaatcgatttcttgaacgtccttccagcgaatccggtacgtcctttcatcctgactttgcttctggtgcctaattcaagactaacgatcgacggtcacccgcttgagaagataggtgctcgaacgaaacgaacggtggaatatgccggaaagctcgatcatataagtgatgcgatcgctcggaataggaatctatccggtgagctactcggtctgacgtgacttggctcaatttcttacattatcaatttctatcttccattggagcaaaggcttgaactgactggatgaaacttctcgtacgtgggcgtggatttagtccaatggaaagcttggttatcacatacacgagccgaagcgccaacggttcaagtacggttctatcctatatttcttcttcttgatgcctgggccatccagtttcaacttagacaacgcacttaccgtcgcaatgttcacttgaaactgttttttatactccttggggacacattcatcgcgcctataggaactagagaatgacctgaggcgccgccaggaattatatcatgctgtccagaacatccagatgagagaggaagaagatatcgcccggatggaggatgctcgccgatcgaccctttcttccctcccacctgctgcctcgttctctgcttctcattcagacccacgcactttaacccttccatcggcatctgttgagcctgatatcatggctagaagccaacagacaggtcccactcgatcgaccgctcagaaccctacctcgggagcgcctgattctaggggacctagtgaaagcccagtgcgattggatcccacaccggaaactgatcccctccgactggagtcccagcgagccctccaacaacaacaacaacaacagcgacaaggacaggaaaacagaagtgcctcagaaggagagaaaccagtgatcggaacacgaacagaaggagaatggaaacctgagggttggagcccaagtatctcccgaagaaggggatgagatcgtgacgaagggatgaaaaaattgtttacaacacagacttggaaaacagattgagtttttgataattcacgattgatagatggaggaaacgtgcagtctggatgagaagaccctcgactgaatacggcgaagccaacacacaagatatcagaagatagaggagcaaaagagattagagacaggagcaaagatccatttctatatatgttacaccactcgctcctgagtccggtttttttcctatgctctctggacattctaaattccatccggcttggcaacctgtttcccacgtgacgataatagaaagatgggtgagtgttggactaatacgggctatacacaagttttggaacagtcatagaggcaaatcattgatgtacctttcgtctctcacgtttcccagtagatgaacaagccatttctgtgaggatgccatggaacgaaggaatatagaatcagctaaaacatcgaaaccagaagaaattgaaagaaggaggagatataccttgccaagaaacaggtttgagaggtgcgcctgaggaaacgaatgcaaaagagtggatggaaagaggtcgaaagtaagcagacgcagcaaagtgaggacgcgctttgctggaaacgtacctccttctgacgtagcaaagatgactggaacaatagtaaattcacaaggatgatcacaggacagtgtccagatttaatttttttgttataaagaaagcaccgttagtcgactgactgtaagagagcggagagaacagagacaggtacatacctccaagatcatttctagcggtggaaagataatacgatctggcatcacccagtgagatctgagtcggaagaaaagggcctcaaagatttaacaaactgacttgaaacgaagagaaaccagggaacgagatactcacgacaagggctctaacgacgtccccaagtctaaaagactcaatgatcttgaccttgtctttttctgtcgatctgtatgggagtgttctttcaatgaaagttgactgcgggtgtgggcatatcaagcatgggagacgtaccgaacgtcttggactctgatgactccctggaattcttcaccggttgggtgaccgtctacggcggtgatggcgagcgttgcctgcaacggggtgagtctgttgatagttccgatgacctgtgtagtgttcgacgagagactgaatgaataccatatacttgattctgtatgcgcgatgaagcgggcagaaagcaaagagaaagagagcaagaggactaacgaccgaatttggttgagggattgatgatgtctggtggtgagattggatcgagactgactgtatgatggacaggagtgatatgaagttgtggatctgacgtttagtacagaaccaaagttgcacacatatacacacacaagcaaaacgagcgacctaccgagccttctttggtcatccgaccgaccagaccggatagaatgagaccacctctggagtacgtgcctgatctttagttgacatggataagggcatggccaggaacaagggcgaacgaaggtaagtacgagcacgacgaaggtccagaggaagggagagaaaaagacacggctgagacttacccaggcagaggaagaggtggctggagtggtaagggctgccctggaagatagatatctgatgttgaggccatgatgtgagtgacctgtagaaagagtgagaaaacgtgtgagtgagagtgtgtaagagagagggagagagtgtgtgtggatgcgtatgaagtaattaagcaagcaactaggtaacttccctcttgtaagaacttgatcggatggacacagaacggagtactgcatgtaaccaaggtaaccagaggcaaatagcctcgactcagctccgatgcttgttcaaccatgatcttgcaagtgccggtcttcgggggtgacgggatactttacctgagcgaacggctacgcagtctgaaggactaactgcggacacaaatcctgcaatgcaatctttctcggtcggcccgacccccgtggtaccacgcctgtgactctgtccttgatctacgaaagattctcaaaggggcgggtggacctgactgcgcgacgagacagagccaccccggtgcttacccccccgtcgttcagccccggggggaggagattgtgtgtatgctctattcgttctgtgctccttcttggtctcgtccgttctattcctgacctcgacgttcactcactcttgtgtcttgttcttgtcgtactcgcccatccgtactggcatacctacacatctacacacgctggcttcttccggtggctctctctttgttcaggttagactgctaacactgtatacagcatcaactgccgttcacatcgtttagtacgctcgacagtcagtcagtcagtcagtcagtcactctcactagcacgcctactcgcctgatcatacacttatcacttgtttgtcttggtcgttctgatttctccgttccttcctttcatcctctttagcaaacacactcactcactcattcactcacccatccgcttttcgtgcccatccttcgtgttcaccttcaacgttcatcctgcttacactatctccacagcatctatatcagacgcttattggcatccactcaactcttccacccgaatcacccacccacccgaccctggaaga

SEQ ID NO: 2029 - DNA, 2554 bp, Xanthophyllomyces dendrorhous
cccgaccctggaagacgtccctgtccgccgtccatggtcaacccggctatcgtcactcccaaaagggacgccgtccaaagagcttgcgatagctgtcggcaacataagcagaaggtaagctttcaggtcgagtctcttcacgcacgcctctgccttgcctccctcctttaccggtttatcgaccgacacatccaccctctcactcacttcgttcttttatctctcctttctgctaacggtgttctaacatcctctcttacgcttccgcttgttccagtgcgacggatttaacccgtgttctcggtgctcacacaaaaaggtaccgtgcgagtacctgagccaaaacagaaagaactacactagggtcatccccgaaccaggggctaaacagaacaaacgaggacccggcccagtcgacggtggaagaagacccaacaataccagggctagaggtcgcagaaggagaggctccttcaagactgtccattcggatgacagtgaagaagaccgacacagtggagggagggacgaccgtgaggacgatgatgactccatctgggaccgacacaacgatactgacttgggtggcaatctcgacgacgaagacgaggatgacgatgacgacgaagtcgaagaaggagatgacaggtcaatcggtagagctcggtttcttaacaaaaagttcgtcctcttcgttctctttgtctcttggctcgggccaatacctctcttcttctccctgctgatgcctgtctttatttcagagcacgagtctctccttccctctccccgttctccacaccgacagacttgagtccgagagcagtcacaaaaccgttcgtctcggccggcctccgaccaactgctattgcaaccgtccctgcaccgtcctgtgctccctcctcccggtctccagccctattctcgcctccggttcagaagatatcttatccggttcacaacccatacctgtccccaaagtcaaattcgtacaacccggtcacgtccaacgctcggtcaactatccgatccttgccatccatttcaagatcgtccagctcgacctcactcgcagagattttattggacatatcgtctccagagtacggcaacgttgtacccctcccgttgtatcctccctcgttcacctttgagagaaaacacacagacagctccaccgatgttcctcatacccataggaaagaggctcgggaggaaagaacaggcggtggaagcatctgctgtctgctcagttcttcctctagtgactctattggcagtgtcgaacagcatcaagtttcagacagaatccatccgacggtcgttccagcaaaccgtctgtcttccccaccgaccatgatttcattctaccatcctcccccagactatcatcctatcggctcaatcacccaaccggtctctttcgttgtcgatagcgagcctgtcaagcctgttaggctcggaggcacggacagagatagagcgcatgacctctttagggatttcaggtatctccctccgatcgagacccggtttgatggcagaaagggtcagtctcgagtatagaataggggaaggatcagtcttcttctttgccgatgtctgtctctgtaggtcactccttctctctttctctatctacttgtgtttgtatttttcttctctagtacccggtcctgcttttcttcccaagtctgtctatctacgttcatggttttctcctttgttctttctagcacgcgttgtatacatctcaagtctcatgatctcttttcccctagctctccattcattcattcatgcaatcctcatggtctcctatttctctactccgtcctgttttattctatttaccaagcccttcttctatctgttctttttctatcattgtatgagatcttctctcatctattctcaacgcctttcattctacgtctcgttcacggctcgacaattttccttccaactttgacaatttcttttccttctgtttcgtatctcacactccattctactcgaatccaatccaacccagtccacctcattcgatcgtctctccttccgcctctcctcatttcactcgtattaatcttcgttgcttcttctttgttttcttttattttcgcttttctctcgtccttgtcttcttttcgtattcccatcgattcatgtgtcgcctgtatcggttggtaattcgtcttcttcctcctctcttttttattattaatgttattctattttatgaacccagtctttttataaactcggcccgagctcttttctttgattatatcatgaccataaccatgacgacagatcggtcgtccgtccgtctgtccttccttggtatgatatatagctaagagccgatgaaaaccgaggacggacgagaactaagaacgatcgagagcgaaacatgaaatatcaaacaaggtaagaccggactaggactaaattgaaagataatcatcaagacgacctaagaaggaagagacgacctgaaggacggaacgcgacaacgatgagtgggacgaaaaaaaaaagaagaaaaaag

SEQ ID NO: 2030 - DNA, 25930 bp, Xanthophyllomyces dendrorhous
aaaaaaagaagaaaaaagaaaagagtagcaatagagagcaagtggcaggggaaagaaagaaagaaaagaggagatgagtcgatgcaccgcgtcggctgatctccgttgatgactagaagagaacgaaagaagaggggagataaatcaagccaacaaaaataacagatgaaacaagggggaaagaaaagaggggaggagaggagagtgagaaaggcaggtgacgggttccctgaatttggagtgaaaacaggggagagaatgtcggaaattacaacaaaatttgatttcttggtttcttcgattaagaaagggggtctgagatatagtagcgatgaggcggacgacaacagagacaatgataaggaagaaactagaaaggagggaaaaacatataggagaacaggtagaaaataaaagaggaagcaagcaaagaatgggaggaaatcaagagagaggtatctcctttcaataagtaggctgtgttgggtgagtgggagcatgtccgccataagcttgaggttgagcaggatcataaccgtactcgtacggctgttgaccgtggttaccatatcctccgtttgcctggccgtgagcgtaatccgagcttcctccacttccctgtctttccagtccttggacctgtccttgatgttgtccttcgtaagcatacattcccattgctgcctgcgcgcctacgccggccgctccgacgcctgctccgccagcaccgaaccctgccatgttgggctgttgttgatgtccgctatgaggatcatattgataaccaccggcggcagcataagcgtcctgatagtaggggtctcccccgctaggatatccgccgtagccgtgtgggttcatatcgtaatcgtgcacaggggcaccgtgggccataggaggataatcaggttgaggagactgagtcccggtccattcgtccacactatttccgctgtgcctcttctctccgccgaaagcgccctctgtcgccttatactcgtgctcggctggggtatccatattgtcaaagtccaaaggttggagtcttcgatcaaacctctttgactttgcgagcataaccttccggatgatgaagaagattccaatcccaccgacgaggaccgccgcaatggcgatcacaattgtcgccgttttggacaagccaccactcttggcagccgaaacggcggtagcagaggcagaagcagacgagctcgaagaactactcttcttggtcaccaatccgggctccgtcacggtcgacgtgaccgcagcggcagacgtagtagtagaagaagaagaggaagaggaagtgacgatcggggatgacgtagaggccgcaaccaaggtagacgatgtggtcgatgtagtagtcggggttgtggacgttgaggtagccgtagtgacaacgaccacaggctgggacgacgaggacgcgacagcggaggacgatacgacagaggaggaagaggaagataagatagaagcactggacgccgaggtagcggtattgctcgattgaacagcaactgaagatacgggcgaagtgagcgcatcggcaacggaggatgtcacggcggtcgaggccgcggtggatgtggccttgatacagatgaattaaatgggtcagtcaaagccacgcttattgaggatgtcaaccctggtttagacaacaccagtcgacaaaacatgaggaaaaaagataaaacaactaacaggagtctgagtgtcaacagtagaggctgtcgcggatgacgatacagaagtcgtgagcgaggtagtctgaggtgttgtcagggcagcggtggaggatactgcaacagcagtatcagtcaggacggcctgtcgagccttgagaaggtgatcagagccggttttgactcggatcattcggtgtttgtcaaaaaagtgggcgggtccatgagcggacgcgacagccccggaaaggagaagggctgaaagaataagggtattcttggagtgcatggtatgggtgtatatgtgttgagatacggaaagtaagaaggaaagtggcttgggaaggaatgtatgtgggtggctgggtgagagggaaggaacgaaggaagatctaatgggcgcctggcctagaagaaggttttgatcgggagaaggaggaagattggaagaaagaaagaaggctggcagaaaagagagatatcggtctgtgctgctacactcgtgatgtatggaccgttcctcttctctttctcaatttttttctttctgtgaacctctcgagatcgactgtgatagagaacgatagcgtttgtggacgaaaggaaaggagaaaagaggaaagaaggaggaaaggtgatggtggtcgtggggaaaacgttaaacacgcccgaacttgctttgttttctttttctcccttgggtctgctgcgtgaaggaaaggccgagactctttaatggattctttatccatcagaccatcgcatacatccgtttttgattaagtaggcagtcaatacagatggtagagatgtcattcctcaacccaaatatcttgtatcgatctgatgggtagcatagaaggggcattcaggcgatggatcctcaaccgtcttgtagcgtagagggagtgaaggcagaggtagagtgtaaacaaaagccggtgactaagttgtgatcacgtgtgacagcggtgtaaccacttgttgattgatcgttcttcatgcccacaaggacagactcaccatcagacaatcatacatcatcatacgacatggtgagctcgactggttgatggctggagagagggattgactgactagttgacgagttcaatcgtaggtcatcagatttgactgaccttgactaccactcttcagcctgatttaagttcgctcggtgcaggctttcccggacggcttcaaagatctgggttcgcttgttttcgtctatcatcatccagctacgtctacaatgcgctgactgtccgtgtctggtctgtccgtcttttgtttctttctcttactgctggtatcatcatagccagccccgagtcccttctgctcctctgtacaccctgttctctccatctcagatgtgtgtctgtttttcatgttttctgtcaacaaactcgcgctgaccacatcaccatacatcgacttgttctaacttactctcagaaagcagttccaagaagctttcaacctgatagattctgatcgagacggccttatctcgccctcagatctcacacaaacgctctcgaaccttggacaatcgacggacagggaatccatccggtcattcgcttctgacactgacggctcgaccggcattaactttacaaagttcctcaccatgatgggagatcatctgttgagactcgacaaggatgacatcttggaggaggccttcgggtgctttgatgagaaggatgaaggggtcgtcgcactcgatgagttgagagacgttttggcgaatacgggtgacaagatgtcgccagaagaggttggtgtgctactttctgtttgaaaatgcgcaagaccaacaggctgatgcttcattttatattcagatcgacactctgttctcgaccaggtttactgatagccggagaaatgcattcaactaccgagactttgtcaatgttcgtatagtcgagcttgcttatcttgatgaaactttttcgtagctgaccatctgtgtgatctcgaaacagtctctcaaagtgaacgatccagaaaccgaaaccagatagatgatccggttacagctcatagtacaccctggattctcctaaacttttcttttatctttcttgatacccctcctgcgtttcgcatttgtatatttagtccagcacatttgatgactgttgattgctcttcaagacgatcatcgtcctatgtgaagtaacattgattatagctcacgtatctgcttcgagctgtcgtcgatacttagaccgagcgcctcgttcaatcaagtttctgaagaatgccctgccgaaaggcatccagtatctatcgccccaaagtcaatttgcgctcagtctactcaattctatctcaaacacatttacgcgaacaaatacaacagacaaagaagcgaagaaagatgacactcacaaccattgggcatacttatatggcttctccggaatccataaaatttcaccagtcagtcgttctttcttatcaccttctctcatccctctcaatctatcaacctctgccgtcaacttgagagctacttctctaggcccgatcacccacttgacttcttcatcttctttaggattgttccctataggagacacatccaacgctcgtttcctcagatcagtcctcacgctcccagctacaactgataagaactgaacgcccagtccttgaagttcactttcgaccgcaagagtctggaagagcgcctgagcggccgatttactggatgcatagatcgatcgggtaggtgccggtaggagagcagcaaccgaggatagaagagcgattgttggtgaggttgaggtttccgataacaatggaacgaacgtggcataagatactaatgggcccatgaagttcgtttccatcgattgtctaattccaatgaaaggtcggtttagaagtggagaatatggcacgtcaagtctattgagataaccaagaccgacctagcaacatcgaccactctctcaattccttccttctctgtcatccggcggctaccagccttgttctgttcctgctctataagaagtccttggcctggtgtttgagaagcagaccgaccaagaccagcaagggagaagaaaggtcgggtcgtcaagacgcctgctacgatatgaacggtatctattcctccaaattctattgcaaagatttacaataacacgagccatgtaagataaaaccagttggtcggatgtcgattaacgtgacgaaaaacggaaagaggagcacaaacggacgtgttcgaagtgtttctctcactctcaacatcccttccacatcgctcacgtcctctgccaggcaaatcactttctcatttgatccggaaggatcgtttgattgaagaacagcctcgcattcggcgctaacaagagcgatgttcgagagtgatctcgacacgaggcagctgtccgttaggtttccaatttgaagaattttcatgagtgatcgctcgcaatattcatcaagccgattaggaaagacttacatagaagctcctcgagaagcatactgtagcgcgatttctttcccaattccacctagaaacagagcaccgcaggatttctcaaaccatcaaattccgtgaccagttgaatatagacaaacgtagaaacggaacactgactgctcgctcccaggacgagaactctctctttccgaagactgagcggtgatggtttacgtctacgtaaagaaccaaggacctggccaaaaagccccagctgtgagaacgatgttccatcacatgcagcacgtcagtcgaaaatcaatgtcaatgattgtttcaataatgacggtgtgaacgtttcagcggaactataggctaagtagacgttgaaattctgttattgagagagagactgaccgaaatcaccaagatcgctccaataggaacccagtcccttcctttcatcaacacgtttcaactttttcaacacgaccgtttcaaactctctcgtcaaagcatttcttactgactaagaatgaggaactcaccggaaggtttctcaaataatatcatctttgggatttccgacgatcgctgggtgagggtaacttggtatattgctactcatcttgtgaataaatcgacgacacgcgtcaactgcatttcttttcgtccaacctgaaatgaaggtctctgcttgccgatcagacctgtcgcaatttctttttgaagaaaatgaatcctctaacctgagttgaagaagattatctactctgtatgttgtctatccttgaacctgatgttacgtgcgctccttaactacaagagtgcataccgttgagagactgaaaagcataaaatttaatctaatccaggaaaccccgtttactcgtcatccatctccatatcccctccatcctgagcactctccgaagacacaccagccaacttttgaacgaaagcgatagccctcgtcttaaccatctcagttccactctcgtcacctggtacggccagtcgtcgttcgatctccatccactttttgaacaccgacttggccttcttctgagtaagtttccgcgcgagcagtcggtcaaacaaagatctgagaacgacgacaataatttcaaagcagaagtaagcattcaagatgggttgaacagattaccgcagagaagggagaagaatgaaatgggacataccgaacgctatgaatgtcaccggccttagcctcgagatcaatgtaaacattccagagatctaaacgcttgggataactatcaatcaccccctcgaagatcgtctttccacgctcggcatctcctacccggtattctaactgagcaaacttggtgatgatgcccacgtctagaaccaaatacaaaagttagcaattgactatctgttctcgcgtcaaggacaagccatttgactcacgatcaagttttggtaaactcttcatcgctcggggaagaagctcccgagcagcctcagcgtcgcctcggttcatgtagtactctgcgaaagctgtccagataggagggctttgggagaacttctttatcgcacgcttgaagatttcttcggctttctgatagaatccaagataaccaagcaagcgatagtcagttcggtattctcgtggatgaagtacagggagaacttatagtcacggacctcaaacttttcactctgctcaaagattccggccattcgtagatgaacagtttcaggctcgttgaactggatagccttcttgaagcaagcctcgacttcctcctcggtaccgtaagagttctccaagttgagcaacgcgatccacacattgagcttctcctcctcctctctgaaaccgatcgccttgagtgcacgctgagcgatctccctggctttctgaacttcagacatagaaagctggaaagacatgtactgaatccataagaacgacgagtttggtgctccaatcaataatcgttcaaagtcggccgttgactctggggtcttggtatgaagatctcccgtcagatcctcctggataaccttcttcttcttgggagcaacgatctgagaggtcgacgcgacaggagcgacgtcctcatcatcagagtctgagtctgatccgccttcgttgtcagaatcatcagcgttccagttgaatccaccagaaaggttgagtgcgccagatgaaggagccgacttgacagccttcttggtcgtcttcttgacatcctcatccacagggaaagtcacaacctgatgattcaagcgaagggagcaataatcgattcaacacattgatacttaactatattctgtatttatagaggaacattactgacctcgtcgtcagactcgtattcctcatcaagctcatcggcctcctcctcatccttatcttcagcctgagcgtcttcttgctctccgtcctcctcatcatcatcttcctcctcttcatcatcgtcatcctcctcatcgtcatcctcaccgttagccatctcaagatcaccggagaaatgagatgccttgagagagaaggcaatcttcttggccttgatgtcaacggaaagaacaagagccttgactttgtcaccctctcggaaggctttggatacagtttcatacttagccgaaggatcgtcggagatctgtcaggcagacagccaatatgaccgcaagcaacatcaggaacagtaataaaacaatatggcttgatggatataacaactgatgaaaccaaactcacctcagacttgtggcaaagtccggacacactgctgtcctcgatcctcaagaagataccgtagttttcaaccttctttacaatggcctcaacctcatcaccctccttgaaagatcccagggtgatcttcttcggcttcaactttctctccgccttagctctcgccttctcgtccttctcggcctgagacagaccgtgagcgacaaagacaagccccttggcttcgtccttggagataacgatcaaaccatcaaagttatctccgaccttgatagtcttcttaagctcctccacagtgatcttcatgtttcgagcggcgtttgcttgtgaaagcagagcttgagccttagaaggctcaagagtaagaagcaggtgctgagaatggattgcgatgagcgttccttcgactttggtgtccttctcgaatgaggcgactgagacgatctccttggggactcgttcctttttaggcgcggcatcagcagatgaagtgttctcgtcagtacctacgacagcctttttaatggaagccgtgatcttgaggttctctcggtcaacccaggtaagtttaactttgacgggcttgccaacaaagaaggactcgtccaaccgagtaacgaaagactcgctatttgattcgcgtcgtacaaacaagacaaaacatcgtgaggactaagataactaatgggtgttgagaaacatcatggaatgaacgaacctagcctcagcgacgggcacgtaagctcggatggttccgtagagatcgaccaagagacccttctcgaggatcttggtgacggttccgtcagtaatcatatggggtcgggcgtcatcgaaagaggtaacgatggggagttcggactcaagcaacgccttcttcatggtcaagaccactcggttcttttcaacttcagtgttcagaacctaaacgcggattgatacggcccgatagaatcagcatatgtgacatctcaaacgaatcatggcccagtcggagactacaacgcgttgatgatattgcatggaagagactaaccctgcacttgacgcttgatccgaccttgaatcttctttccgggttcttgagcctgatgtctgcgtactgcgtcggccaaaccacaccatcgacgtttcccccgacgtccaagaagagacctttctccgtcaatcgtttgacagtacccttcatgaactgtccgattgtaacatcctcaactcggaggaagttctggttgaggacagaggacttgagggaaagttgaagaaggttatccagagaagagtgaccaatcactcgggcgcggtgtgtagtaccaagtgcgaagggaccagcggtggaagaaagatgaggaatatgttcatcggacacttgagcgatctgataagcgcgttgaaaatgatgcaaagaaaaggatgttagctctaaaagcatagtcacttggtcacaaaacacgaaagacttacgtgagcaaaccctcgtcgaccttcctggttctcaacgaccaacccccattcaccctcaacccttttgacctcaacctcctccaagatttcaccaaccacgcaatccttgccctcctgctcattaaactccaaaatatgctccttcaaactgcatccaaatcgcttctcgctctctccatctccaacattcatactctcgtagagcactcgaaccttgatcttcttaccaactttgagcgcaccctcagcctctttagcaaggtctatgttagcaggtaggtggtaggtatcaacagatccggagaagaaaccaagcaacttgaggttgagacctgaatcaggaatgacagcagtgatgatggctgagcagagagctccaggaaggagtgaagtgatgctagtcaagttagtcaaggtcgattgagattgcttgatgggggaaagggtgaaggtgcatgttcgcttgttctcagcaacagaggtgacagtgcagttgatcaagtggccaacttcgaggtgttgtcctggtaatattagagagaactgaatgagcgcagctgatcgacagacagtgttatccagaaatacgtaccgtctttgctaaccgagttaggggtaaattctttggcgtccttgaaaggaaggaaaccttcgatggtaagaccaagatccaagaggtacccatggtcttcaacacttttaacggcagcagtgaggcactacaagagatgcacgaagaagagaacattcaacactcttttttcatatgtacacagtggagccattcagtaatagcaacgagtcaacttacgaatccaggctccagatctccaatggccactccattgttgaccacctccggaacaagactgacctcaactctcctgcaatctctctcgatctgatccttaggtttccagccctccaatccttccggactactcgttcccattccatacaccatgctaactcgacctctaacgtactgaccgaccttgaagagctcatctaagctgggcacatcgtcgttgtcttcatcatcctcttcatcagaatcagatgccgaatcagcagaagcttgaaggcgctcggtaagttgtcgagaaatgtgggtgatcggtacatgggcgaagatctggttaggaagagatagtacgagatggagagggtggatagaatgaactcggccaagaagaggagttccgacggaaagtttctgcagtggtaaagtcaggtgaagatgaacaataagactaatgttcttcgatttggataagactggtttgaacatggacatactttgtagttcaagtgctcgacaccttgcaaaaattgtgaagattcgttcaattgatggtcaagaatgattagtttccggcgcttacgccttgagcatcgaaccaattgacatagatcactcacggaaaaagtcgccatcctgcttaggagcggcagctttagctgctttggctgccttaatttcccgatccttacgcttcttgggatccctgatcttcttggacgagctagcagcctacaaaatatatcatgatgcgagctcaaacgaatcagatgcatgctaaacttgatatagaaatatgtaaagcatacctcggtggcagcgtctgcatcagcctgcttcctagcctcgccggtaatctccttgtattcgagcggggtcaagctggatcctccacctcgggggaatgaaacttcttccgaaactagagaagatttgaacgcagcagtggctccaccttcagtctgcttgggcttctcccatggcttggtctcggtggaagacgttttggactttttgtaatgaggcacgtccgtgtccggagcggcacgcttcctgtttgaagtttggggtttcggtcctgccatgattgagggaaacttttatacgtgttttttttggagataataaatcgctatctgtgtttgagaacttccccaggatctccttatacagacaaacaagaagaagagagagaaagtggaaaggggatagagtcaaagctgtaaacgagtatgaacagatttctcaaaaaaatctattgattcggtgactaaccgtatatgtaaccaggatgtgactgggtcgctcatgtaaccttggaattttggatcatcctcttcattttatcttttttgctaactagacctctgtttccgttaacaatcaagcacggaatactcaatatggtgggtcaatcttgatagaaagaatagtcttgttgactatgagtactggctgacgatacgttcttttggtcgactcttagcctcctagatcaaagaaagacgggaacggtctcggacgagctatcatcaagaacaagatcaaggttgctagtacagcgcctgatgagctactcgtgagtatttctacaggtgtcttaagtagctctccctgtggctcaacgttatattttcctctttgaacaacagcatttcaaagaagcggacgaccgactgcgatccgtcactcaggagggagacttggatgaatttctgaacactgctcagcttgccgctaccgacttcactgctggttcgtcttatattttctctctatgtttcagtgcctcttcatagctaattatctcgatcttgtacccgttgtggacaccgatttctactgtatacagagagacagaacgtcaagatcatcactgctccaacgtcatcaacaaacttgaacgcggtggaggagaatccgcatttactttccgtcaacgaagaggctcaagttcgagaggttcatggacagatgaagaaccgactacgggttcctcgacgacccatgtggaacaaggatatgaccgctcgacaactcgaacgaagcgagcgagatagtttcctagagtggcgaagaggtttggccgagctttcagatctgcactctcttctgcttacaccgttcgagagaaatttggaagtgtggcgtcagctatggagagtgttggagaggtcacatttgattgtccagatcgtggacgctagaaacccggatagcttcagatgtggcgatttggaggagtacgtcgcttcactcgatgtggaaggacgaccggttggtgcggactcggcagagggaagcaagcgaaagagtttactcttgatcaacaagagtgatctgttgacgttgaatcagaggttagttttctcttttcgtcggctctcacagttcttgactcgaagctggtactgaccgaatcaatactttcgactttctctccttcagacgtcaatgggctgatcacttcgagtctctcggaatccgatacgctttcttctctgctctcaacgctaccgctctccaagaagccgccgcgctagccgctcaggcggctgctttagctgaggaggaagcttcttctgatgaggatgactcggagagagacgagagctcggatgaggacgaagccgagttggccgataaagtttctcggcctgttggctttacaggaccagcttatgatggagaagaggagaagaaggcaggaattgatttggagcatgatgagcagcgattggaagagggctatgaagagaggcttcgagtgttgtctgttttggaactcgaagagttgtttgagagcgaggctccttctttgaatggttcgtttctctgtcttttgggttcgattcatgtaagaaacctgatctgacatgatctacttttttacgatagactttgtcacggctgaccaccccaagccaccgtcaaaactcgtcgtcggacttgttggataccccaacgtcggaaaatcttccaccatcaacgctcttctcggttccaagcgagtgtctgtatctgcgactccaggaaagaccaagcatttccagacacttccttttacccctgagatcacgctctgtgattgcccaggtctagtgttccctcagtttgctactaccaaggctgaattggtgtgtgacggagtattgcccatcgatcagatgagggagtattccggtccgattgaattggtagccaggcgagttcctagggaagttttggagatgacgtatgcgatccggatcgaggtgacccctatcgaagacggtggaaccgggaaggtcaaagcggaggatttcttgtccagttatgctattgccagaggatataccagggcctcattcggtctacctgatacctcacgagccgctcgatatgttctcaaggattatgttaacgcaaagttactctactgtcatccccctccgaacacaactgccgacgagttcaacgaagagtccagggctaaacagatggaggcgatggcattgctgaacaagaagaaggcgccggtcaccagagtcggcaagggagccgacacgttcgtccgggagactgatgggcccaacgctggatctcttcccgacccggcttacgatgatcaaggaaacccaatcgatgtcgcacccgatcagaccaaggcgacacccaaggtgttctcctcgatctccagtcgagctgataacagaccttctcttccgatgtctcagatttctcgaggtatcgatagaggtttcttcaaggaggacaacgtgtcgctcgaggctagaccccgaacgaaaggaacgtcgtctaggatcgaaggtgccgagggtttcagtcgacctagaatgtatggcgtccagaactcggtcggcaatgacggttcggagattgataagagtacattgcagactagatttgcagagttgggaacgagcgaacggagggaaaacgggaaggcttccaagaggcacttcaaagaaaagaagggaaagaagcgaagtggtgctgggtatgattgagtgtaggatgtttatgtctgaaagaaaaaaaaggacctgtatctcttgtctttctcctaccattttagatatcgttgttacaattaaatgcttatcatctgtccgaatagaaacaaaataatgcaactgaacatattttattgtttgtaaggaaatatattgctaagagtacaacaaggaaaacagaacagatcatgggatagctctagatctaaggtccaacgctgctcttccgaccgacaggccacccacatccacacctacttcaacatccaccggatcgaaagattcccaaaatatctttttgtctcctagcaagctacctacccgatctaaactactcctcatcctcgttctctctaccggactaagttcccttccagagccagtgcctgaggtagaactgcgcgcagcccaaggattttcgttcggaaggctgttcaacaaattgtcgatttgatctctatatctaggtagatcgagagagtagagatgaatggcagagaggattatgaatgggtcagtcgggtggtgatgaagtggaaggtgaatgtagtgcgcaagaaggttggatgtcaacggcagattggctcgttgggtgtgtgcctcgaggtaacttttaccgtatgataatgccagagaagaatgaaaagagtgagaggacaatgctatcggagggtcggacagagaggaagaggaggaggaggcagaagaggaggagggatgatgtataggcagatgatcgtatctagagagaagactgtgtatcctcgatcggtgaaacctgacccctggatctggcatttctaagcgtccccaagactccaacagggcgtccgcaacaaacggtctgaggttgtcgagcgtgttgatcatccaagcgctctcttctgcgttcagcgtcagcttgatgtcccctccgtctgctttcgggatccatcggttcctgtagtgtctgatctcttgttcgatccagactctacgaccgatgccttcctcccagagtgagatataaccctcgagagcaagaagaaggatcaatgggtcgcctggagcgtgtcggttggcaaggtccataaacgcattcaggtgaactctcgatggacgacttgtatggaattggtcatgatcgctggtggttgaggttgaggcgacaggaggatgcaaaaggttgtaaaggagttttcggaagatagacggaggtgtttgactgggcaaattgaggccatatgtgatcggatcggatagaacgtcaagcgaaaatgggacgtcgttaagatctcgggctcgatctgagagggccgcacggaacagcacagcagtcaagatcgacggtccgagcgcaatcgggccaaagaagcggatgggtttggaatagttatcaatacgtcagcctgagacacctagattgaagaacaggagacagagagaagaacataggggcgtagataagaaaaagaccgacccaataacgaattgagccaggctaaggtgacttcagtgggtggtagagagacctgggtccattcctgaacgattcgcacggctttgttaagttcggtagaggaaccggcagatcggattagtttgtcgagtagcttgtgtttcggctgagagaacttggaaggcgaggaagaagacgacggcctgcaggctactttatcgcgaacatcgaggtggagaagggaagtaagagtagggaacaggagaaaatggtgaggcaaacgaactctacaattcgaatgaaatagagtgagagggaaccatagagaactgaccaccgttggtcgtcaagaaagccgaggcagcaagggtgctgagacttcttctcgatcggacgaccgatttggaaagcatgacgatcggacgattagtggggtgtatagaattgaactgaatggtttcggagtggtgttatcggtaggaacagcggcgagaacgacggtaacagcgagttcgatcgaaaaagagaagacagaagaagagtcaacagggaggacaggatgaaaagaagagaagggccgacgaaagaagaacgaactgaccaacgggaatgatgatagcacacagaccaacaaaatcaacaagaccaacgagaccaacactcgtctgttgaagtgaaacgaaacgagccaacagggaaagcagtgaaaaaagtaaagtaaaaaacttgtgttgtcgtaatcaaagaggaatctattggtaggattaaggcctagagcaatgagtgactaggaggtcacgtggtctctgcctgggtcaaacacgtgatgcttacggctatgtattcacatatagattcaaattactattcaaaaaaggcaagagtactctgataaataaataaaaacacaaggaaaaattccagcagcgaaaaagttgggcagtcaaaaaggcaagttatccttctttttcctcttgttctttttcttcttctccttcatcatccatcatctttctctcttcttgacttgcttctgttctctctcacatatactgatcatttaacttgttatctttgaaaccgtgaccttttcaacttggttttttctttctcttctttatctcttctgcacaggcctaaagctcatctcacaatctcgagacaatgccctctctaaccgctcttttgctctcgttctcaacgctgtccgctcttgtcctcggtctcacccggtctgtagagtcatctacgctcactattcatcatcggctactttctccttctgctcctgctccatttgtgcccagactagaggttcaactcaaagatctcacattggttcagtccgttcaagatctctcttccggtcatcccttgggcccagtcgaccttggccgagatatatactaccaggttgccatccaacgagcaggtcagcccgaaactgattggagcataacctccgtcaaagctgttcgttctcttcttcagtcttgtggctttatccaatcttaagctgactttcttaccttcttccatctacagtgccatttgcttccttcgaccggtcgaaaggaaacgttcgaactctccgtccctttttctggtggagacgaaacatccattcaactctcttactcactctcgggcatctctcgcgatggatcgtgtccacctgtcacccctgggtcggtggtctcttcgaccagtccgaccgacggctttgaaaccaatgttcaggttgtcaaagctggatcgcctacgccgtatgttgtctttaaggtgtggtttctttcctctttccacggtcaaatcctaacagaaattgggtttttttgtcgtctattttcatatacaaaagactcatcttggcttctccagtcaagttggatgccgcgacaggacaggcagaggtacctcctgtggaaaaaaccctgattcgtacgtattgttatttcttacagctccttcccggctcgtgctcatctgtttctttgacccttgccttccatagagaagtactggatatatgcggttattcctttggccgtacttcttcgttcgttcctgtcgattttcttgtatcttgtgttgataacctgatctgactctaatacttttcactttgaaatcgcagtcatgcccgaaacagaagctgaaagggcggcggcagccaagaaatagacgtctttcttttagatatcacgttctttatttcctcctatcctatcttttctttctttcttttcttcaatctcccgtcatatttgcagtgcccgttgatctcgccccggacttgaaacatcccctccggagtgagattgacagccagccctttcgggggatggactagtcggtgtcatgctagaacgatactcgcattggaaatccgtttgagggagtggtccttattcttcacgaatcacttccataaagagttttccacatttctctttctttcactttcgttttccctggtttttctttttgtatatttggacaagtcgtctttcggttttatttgtatagaatgaattttgtcatatcaaaagaaggaaattactgttggcgtggggacaattgcattgagcgggatatttgacgattaaactgaacggggtaagacgcaagaagaaaggataactccctgtaatcctctccgaccgactgtgttgtgtataaatgtgtgttgggaaaaagagttgcatctttataccatttccctcttgactttcttcatttcctcacttcttaatcctttttcgcttccccctctgtggcagagccggcgggagcagactgatcggaagctttgcgacttcccctcagcctagctccttccagtaacctctgcctctttccatccgtccattcgttccaagaggaccagccctggatgtaatccgctccaccagagaatttaccttcgagagcatgataacttggttgagcatctgcttgccaaatcttcgaaccagaagatgacttgagtgatcgaggtggtcgccagcttcgaagagcgttttccatctttttgtttgttcgagcctgttcatgagagaaaccaaaaaatgaaagcaaggagaggagagaagaaacagaaatttagttaggtagatgataaaaaggaacaaaatagtgaataaatgaggttggctatggacaaggtgtgttccatatgcccaaggggaatgcattcaaagaagaggtagtgcaaagacgaaaggagaagaatgagaataggacgcaccacttcaccccgatcaacttttggatcggaatgcgcgccgaaagatctggcctccttgtacgccgatcggatggctacctcttggaccgctcgaaggtcggcgaactgagcggtggcgatggcgtatgctttagctagtgagagtttgtgatatttctggagattcaatgtgaacgcgatgcagctttggttttttgaacgaaagaaatatcaaagttaacctttggctcatcctttccttttgattccaactttttccctctcatgggtagagatacgtattcatgatgaaacaagcttcaacggtactcgaaggaacgcatctcgaatgaagaaaaatcggaatagaagaaacaagagcggtcgaggactcactcttcagccgatgggttggacgtcctctgatgcaagctataccattcctttccctgtagacgatcttcatccttgacaacctgtctctcggccagcgactttgctcgcattgcttcaaacggaaaatcttcaaagaactgggttcggattctgtcttccggaaacacgagttctttgacggacgacttgaagacaggtctgatcggagcaggtgggtgggagagtaatgcggcgtgccagactggagtcgttcctactccggcttggacgagacgctgagacgtctggaggacggtatgagctgaccgacgaaccatgatgcaagtgacaagacgaaagaaggagaaagggggtcgaacgagaaagaggaatgatgatatgctctagtaacaaaagctagaagggatccagaaagagagagcaaggcctgagagttactaaataaataaggtattcatgtatttatttgaattatgtctggatctcgggttgtgtaaggtaggatcatacgtgtggctcactatcacacagcctgcggtggcgtgatgatgcgctgatatgcgaccgcacgttccttctattcctcttcctgtaccttacgtcttccctagagagcgttcctgttcctctggtcgctcgattgaacaccttcaccagcatacctggtccccatcctttttcttcctttcctgatctttgtgcttatacagagagaattcattcccagcggaattgtctttggcttgcaataggtcattctctgtctatcaagaatcctccccagagaacggaacgatgcatctctcattccttccactcttactcagtctagctcccatcctttctgcttcatcatcatttcaagctcctatcgtcaacttatacccgcaacagaactcccctcaacctttcagatcaaccacagtcgatgtcatcgcggcagacccagaactctccatctttcttcgatacctacagagagcaagacttataccagcactcaatagcctccccaacggctcgaccgtctttgcacccgtaaacctggcattccacaaagttgcgctcgacgatccttccgaatggactcagccggacaacatccttcatgagcttaggcagaacctgctgtaccacattctgaattacaccttcccgcctccgacagaagatagcgtgggcgatagcgataaagacggtgacaatagcgctcccggtagcgatccattagaactcccctttccgtctgacacgtcaatccctttgaatttggaaacccttctatacccggacgatcttccccctcagaacggcacaaagccaccgccggcaagtccttgggttccactacctgtcggtggactaggatctgaaggccaacgtctaagaggcttcaaacgagacggacaggactggatcggtgtagactggcagggaaagggtggattcaaggtcctaggagaaggagtaccggccggcaatggcatagtctggaaagtggacgggctggttgatatgcccaaaaatatcggttcgaaaatttcttgtcattatcttctatccgtgatctgatttaatcgacttgtgcttttcatgccgcttctcttgcttaatcttcatcagctgagacgattcaaacgcacccatctttaacatatcttagagcacttctccatcagccggtttcacctgctccatcagctccttacctcgaactctttgagcgccaaccgtctcttactgtgtttgctccttccgataccgcgtggtcaaaacttccccgtatagaacgcacctacctcgagagcgggttcgctgggcccgatattgagcttattctaggctctcacctggcaaagtcaggagtggaagaaagcctggatggaacagtcaaagtgggttggagagaagctttcgagcagacagggtccggaaaattgaaaatgatcggtggcgaggagactatcgtcagcttgggaatttcaggagagatgaaggtccgtgttggatcagacaagaacaaacgacaggtattcgaagtctctgagccagatctgttgtgtaaaaacggtacactatctcttctcttctcttgaaccctcttgcctaaattcaatggagactgatattgaactcaaatgcaacataacatgtacaatcaataggtgtggtacacattgtagatgatctgctgatccctgctggagccttgaaacttacaactgagaaggtgagttcttttctcgctctgtgtcggactttaaaggaatccgcactcagcattgaactgactgtggcttcttgccagactctgattggcttaaacgctacgcgtttcgtttccctccttcggctgtccaacctgacatcttatatcaattcaacgacgcgtgctagccctgcctacactattcttgctcccctggacccagaaacgttttcctccttgacctgtcttcatatgaatactcccgaatgctcggcctccctggagcacacccagtcgcttgaattcaggaaccgactcaagtttcacattctgcatggtcgacaggaactaggggatttgaaagacggaatgttgattgagacagtatttgcatctgaggccatgggaggtagaaatcaggtgatcaaagttggtgttcgtaaagggttagaggatgtccagggcaagattgctcaggccggagggagcaagtccatctgggtagacagctcgaacaacgatgggagcgataacaataaccatcaaggtggttggtcagaggtcactttctcaggtgtccctgttgaacccaagcccatcgaatctccttcggaccagtcgctcatatatcttctcccgccaggatcagtcattgagcccccggaagatatcattcagacagcgctcactgatttaagtctatccgtctttatcggagcgctcatttcgacttcgctctcgcacgatcttaaatcttacgcggacggactgacaatcctggctcctcgaaacgtagcgtttgaacaactcggtcttgttatcaaatatctgctcttgcccgaggccaaggcagagttaaaggatgtgttaggattccacgtgctcaaggatgtcgtatatctagaagatgccaaacgatgggatggacaaggaaagaagagggaaacatggacaggagaggagctcgagataagagcaagaaatggttccatcgcggttggttctggagagcaaggagggaaggcggaaatcatcttagatgaaagtgacatgatcatctcgaacgggtaaggttcacccgtcaccttctctccttaacatcaaaagctgacacacagctggtgcaatgcttttctacatagtgtgatccatcaaattaatgaggtccagtttcctccctctgcaaatatcacgctctccaagatcctccgaggttcaaaatccaccgctatcatcaccgatcttctcattcaagcgaacatgagctggatccttgatggttcatctccttcgacagaggaccttgctgaactaggcatcgccggatggagctatggacgagaccgtgctctttcatcattatcgcctttgtctcgctcctctgcatctttcgacgacagagaaagcggggacagtgatgatcaagacgacgagcaagagactggaccagtgtcttttaccctgttggctcctacagacgaagcattctctcacttgaacctcacgcgatacactcacgatcggtctttactcattgatctgctcaaactgcatatcatcccctcccatgcgcctatcccgttgaccccccgcgtggcctctcattcgagcctgtcttttcttccggccatcacagatgggaaaccgctttccataaagccagacgtcgcttatttaacattactctcggcttcttccaaatatggggatgttgcattcggtgccaacccagatggatcaggatgtagagtcggaataaagggtgctcgacttggcggaggggatggcgaagaagaaaacgactgggccagtttgggtgctttcggaagaggcaccccatcgtggccttcatcgacatattcccctcgggacagattgttcaccatcgtcgaggccaacagaaatataaggtctcgaagaccaaaccaaacgaacggtctgagcaacggtgtccatccaggaggaggcgttatcatcttgggcgcagtgctggttccatataaacctagttggtggatcgtctggagctggacgatccttggtgcggtagttggtgggtcggctgggttgacgatcttgtcgctaggtggttggtggctatggcagaggagagcgagggagggaacggattatgaagtaagtctccatttttgttcagtcggtcttctttctgtctttgtttacatttatctgatggtgactccggtcttgtttgattcgactttcacaaacagcgcctcgagaatgaggaagactagtggtcatctctctataacgctcgccgttacgacaaacatacacatatatgtaccttataattttcacaaacgtcccttgactgccttgtcggtcttctttgttttattcttgtttttatacaagtccttgtccgggttgacaccccaatttgatgccacacgagtccactactcttgctccttttccattgctttcatatatgataccacattcaatcaccccgagaacgcgtatcttggtgttctccatttttgtatcttggtcgcacctgggtcaaacttcgcccaacagcacgaatacgtgtatttgtttggccagtgttgatctggtatagatgtctatcacatggtcagcggcaccccaaggttgaatgatatgcattttgaagaaaccagtccaatctatctatatctatgtatcgaattaattatatacctaacaaccggttatgaacaaacaaacgaccttaaaatggcggattaaccagataaggtctcatcacaccagcaggaacttcaattatctttcccctaatcgtctccttttctaagcgcttgtgagcttcgaatcggtgacaaccaccgacactgtaatagtagctctttgaagaatccaagggatctctaaccctaagaacttctatgggtgtaaactcgtctcctcgcttcaatagatcaaaagagaatattgataggcgtaagtggacaaaattgatatgtgaggatatgataagttattgagagaaagaagaagcaggacaaacagcaacctctttcatgaacacgttgactttttcctcgtctaactctgaagggataggtcgtcggatgatgttcatcggaactgtaagaaattcaggagagatagagaagtcagacgtcgtccaacgatgatttagaagagagagaaaagacgagcaaagaagaacaaaccatcatggatcttggtgattccctgcccaaagacagaaaaccctgtacccgcgtactttgacggttttgaagcgtctttttccgcactctcctctttgttttcggctgggttttggtcttgattctgttcaaagactttctcctgaggaagagaagagggaatcatattggacgatgaagacacagtcgagagtgtgctaatggagaatgtacgagtcgtctgagaagaaacaatcgttgagtaaagagaagggctgttttgacggttgatggatcgagtcaagaacacttgaagggcgaatcgcatgtaccgaatgggttgtatcagaaactccttttgtattctctgaatgaactttagaacggatgtatggtgggatggttaggaatgattggtgattctttcgaacagactggccagtaaggattcaacattcctctttccgggccgatgatgtcggatatccggttgttcgtgacgtcatcttgtatctttgacatagcctgctttctttgttcctcatttgacggacgaggaaagagcatccatacgtgaaggcatacaataagcatcaactagaacatttcggttgattctaccgtgccatagtatctgatgggatgtgatcaaaactgattcgactaagtgacatgaattgggtttagagccaaaccaactgggcgagatgtccgccgtctgggcgagtggaaccggaaaggaagcaagaaagagaagagcaaaaggggaagctcgtgttagtatatacacgaaatttcagtacgtccaagagagaataggacgaacaccgggctccagcagagggaaactccgcaaggatttggttgacttgatcaatctcctcgctcgagagttcaattgaggctgatgcgatatctaaagaagggaagaggagcgcaagaataaaacaattgccagagacctcagtgtttcagacaaggaggaaggatccaagaaaagctagaacggtgggataagaccaagagaagctcactctctttgattcgaacaacgttggaggatccaggaatgggaatgaggttggggctcaacttaagcacatatgctagagcaagttgggacgcagtgattcctcgtttctcggctagagacttcaaagcgtctgtgagtttcaggtttatagctgtaaagaaataggaaggcatgttaaagaggttgagtaacgagttggttccaatcagacatatggctggaaggactgacggaagttcaccttgctaaacttgggctggtctgttcaaagtaaaaaga

SEQ ID NO: 2031 - DNA, 3374 bp, Xanthophyllomyces dendrorhous
aaaaagaaacatgttttcgcaagggtcatcaggttctgaatatggttgtatcagatctactttaagctattatataaagactcacgacgtctgatgtcaccttctggtatatcatcagctgtcttccaattggactggataatacctcgtcccaagggagctataccagtttgaaggaggtttcgtaatgttaacaaatgatctcttactaaaggaacagcaggaccgagagaggaacggacaatagccaatgatcgcaatatcaagctcttcacatgccttgatgacctcatagagctcgggctccaaagcccagagagagacctctacttcgacagcagccaccggatggatctgattaagtttatatcaaaggaccaagagataatgatatatatcagatgtctttatgccaactagtatatatccaaaagagatagatttacagcttgagctcgtcgaatagtggaagcgccgacttcggaaagtccgatgtagctaaacataccatcgtcgatcatcttcttcatgataggctgtacggtcgaaacaagcaatcgtgagcatcaagaaaggatgtaggtgctagctagaaaggacatactatggtggcctccacgggcttggtttgtcgagcaagctcaaacaagtcaatcttcttcacaggacccaaagcatcaagagattcttgaacgtcctttctgaggaaggcctcgtcactctacaagtttaaaaatcggtatgaatcgctatcagccgagcgtggattcaagaccattgaacatataagaaaatttgtcttgcctggtcttgtccagcaattcctcctcctttgacactcaaaaatatcttagaggcgtactcggggtatttgtcaaagaatcttcgaagcagtttcagattggccaacggactgaggaggaccaagttgagcagaacaagagattggcgtcagactgataatttagacaacagaagagacagagagacttactcggacattccataaaagttaccagagttccagaatgtagctccggcgtcagcagcggccttcaagctctcgaacacttcctcgtccggctgatgtgggggaggagtccaacttgatccagagcggcgcagagagagagaaggggtgaaagaagagcatagtgagattgaacgaaggcacatgagtagtcactgctagcttctaaactaacgtaagaagcattaacccatggccgctgtgacaaaaaatcccaattcggtcctttgagagttagaatacgatggtcaaccctttcaaagcagaaagatctcttgtgctcacattgctccaactggaatcttggatgatccgaggactcgagtaggcaaagagttcgtagaggacattttttgctagattctgattgatgtaagaaagatgtagaggttttgtagcgatatacgttggactgattgcttctgcttctgcttctgcttctgcttcttgctgttactgatgttgttgatctcgtctgttcttatatactcgatgatcgaagtggaggtcgggcaataaaacacgtgcccggttcggcgatgaaatacgtgtcagacttcaaatcgggcctgtggctcggccaagtgctgtgtaagcgttccggccaagataaccctaacaacattgagacttccttcgctctcagcgtcatccacgatccttctagatctcgaacctccactttctcatcgttgagttcttttcatctgatctgtttggatgtctagaaaagcatccgtatatctttctcgttcgctcacgtcaacttcggcattcgtcaaacctccacctagaaggaccatgtcaaatctcaagattacctcacacaatcaatacaagacccccaggctcgtgcccgagtgcctcgatgactcgccgctagttcagtttcataaatggatggcagcagctttggacccggtatcaagcggagagccggagggtactccagcagttcatgagccagaggctatggtactaggtacggttgaagagggtggaaaacccagcagtcgagtcgttcttctcaaaggtccgtcttctaccttcgtcttctggagtcttccgctttccttacaaagaaaggcggaaacacaatcaggatctttgcagccggtctaagtcatacctttatcttcctaatatctccctgcatcagaattggacaagactgggttccttttcttcaccaactataattcgcggaagtctcgcgaactcactgtcaacccttatgcctctttgacattctattggcgtgagacctctcgatccatccgagtatccggccgagtcgagcgtctatctgcggaagcctcagatgcatacttccaaagcagaccgagaggtagcaggttaggtgcttatgccagtaagcagagctccgttgtcggagagaatacgttggaagacagggtgaaacagatcgaagagaagttcggaaaagaagaaacggacggtaaagtaccttgccccgaattttggggtggatggagagttgttcccgagtaagtccaagcgacgtgcagcatctctctttcattttcttctccctctggttgttccctcctgacttgttcaacaatcaactctatccataaatcgtatttgtgatttggacatgtttcccttttctgcagcgaggttgaattctggtctggccagccatcgcgcttacacgatcgattccgatatcttcgtctggacgtacccacagaggacggaaaggaatggcaggttgacagactatccccttgatctgagcccatcatccgcaggtcccgttctctatcgaggtcctggtctcttcatcacatccctcttctaaaaaaaatgtcaattatccaatgcccctaatcttacatgacttgaaatagaggcatggttcagaatgaaacgcgacgagggacagagagtgtgcataaagaataaatcatatactgatgctttgggcgcaactaagcagctggagctgaaggaatgagatatgaaatcgaaaatgacccaaacaagcaagagacagagaagaagacgattaagaaagatatggaaatggaggatgagggggtatacataatcgttggaattggtttaggaaggcagaactaagaagcaaggcatgagtcgacatcaatcttcctcactatcatccatcagactatctccttcttcttcctcctcctcctcctcctcctcatccacgagcaagctatcatccacagcgtcctcatcctcatcttcctcgctctcactctgggcatgaattggctgtttggaaatatgggaacccgtcacgcgagttggcggggaaaccgcttcctcctcttcctcctcctcctcctct

SEQ ID NO: 2032 - DNA, 11562 bp, Xanthophyllomyces dendrorhous
gttagagattgcaaactacgaaccgattcatccgtaaggaaaccagcaagcatgagcttggcagctccttccacagcaattgctaaagcggcgtcttctgactgatcaagatgataaagcaccagatctgccaacggactctcctagagaatgacaaacaaaaataatccaagcaagggatgttgaatgcgacgagactctaaaaatgaaaataaaaacatagatgaaagttgcaagaggataatgaagagaagatactaacactattagactggggaaggagtgttttaatgtcgtacagcatgagaagatcaaatatgatctgtaagacctcattaagcaatggaccctgggcggattgtgcttgtgagaggaagagccctctaaaagagggcggcgcagatttctatttaatcatgagatcgaggaaagaaagaagttaagtatgcaagatgctattttaggcttaggagaaaagcaaaataacggagaagggagatgatacgacaaaccttatcgatggtacatattagaccgaggcaaaccagaccccgctctcgaagctcgggctgcttgctgatgacggaaggagtgataagcatagggatcagcccatgcaaaacagaattttcttgaagtgtctatcgtttccgaacaccaaaagaagggggtgagagagagagatcaggattttgttcacggtacatgatttcagagagttagcctctatatcaagttgtctgagcgtaaaagacagaagacgtacaccgttgactctctctagcaaagccttcaatatatccaagctcctcacatcgactaacatccgcttcaaggccctctcctcctctttctccttgtctccacctcccagactaagccgtctgagcctttctctcagctctctctcctttcttgctcctccatctccgccatcttcgccctcatcttcatcctcgtcatcattctcaagcgcaggcgtcccggctcgagaagacgaatctagtaccgtatctcgaatttcatgaatgacttcaacaatgacccgcatcagatccttctcagtagaagatagtttacgaaggacatccaggttgtaagggatgagagacgccggaagagactgttgtgaaatcatttcacctaccacggaaagacaatgcgagaagacgccaacgaatgggttagcgcacaagatcacaaagctacacatctagccgaggaaaatcagtacatacgagctagcccccacatctttctccggccgatctcatcagaataatctagaccgacagccaattttaacatctcccggatgacaaactctttttccaggatctcatgttcccaatctctgttttcctcggtcttatggccatcatcgttctggccggcatgctcttcagcgtcctcgaacaactgaaggagatgattgtactctgcttgaaggtaaaacgccagggcagtcaccacgggtaaggttgattccaacctggcctcgtctgaaatttctcgacaatgatcgacaaatattcgggctagaagtgccttctctggggttaaagttttccaataattttctgtgcgtacgtatttagaggatgattgagtcaagagatcgaatgataagtcacaatatgcatagattggagcaggagtaatcaaacagtgtgctcttacctgtaaactccaagctctgaaatgtatccatgtttccttcaaaaaccgacaaaagagctttttctgcttcctccgagctgacaacatcaaatcttttcaagaattcgatcagcccgttcatctcctcgtcacctaccgcggcctgagatgaagtcttgatcgcctcgacccaagttccaatcatatatcccgccgcctttcgaactttcggatctcgatcacccaagccagtccggacgagagcttctctctgggagatggtcaatcgtcgtggatcaccgaggttctcgggggagagtgagacgagatagacagatcggcgaagtgtcgggtcaagatccttgatacgaaggagaatatatgggagagtttgagacgtagtcgggagggagaagagcgcagtctggcgcacatcactttttgagtcacaacagcagcatcgtcagtgacggatatcataattcaaacgacaaaagtagagggcatgatacggtaagtttctaacacagcgcttatcacgtcttgaaaacgattggaacagacaacttacgacgaggggtccatggtcaggatgtctaacagaacctccatcacgtcctcctcgtcctcgtccggttcgatatctctgaatgccatcagacccaataccgcttgaactctaacaggtgcctccttgtctcttgtcctttcgagcagagaccttctaagctgctgaaataaatcttcactgataaccattgaagattttcaataaataggcagcacaaagtcagttggagcagaacttgatgaaacaagcatgagaccggagcttactcgatctctggcatggacttgagaagaagagaaaccaattgggtgcatctaaaccgaacagccttatccttcgcaggaaacccttgaagaagcatagtaatcaactccgtaaaaaatctagaagaggccgtgtcttcgtcttcatcttcgtttgattctgtagataggaaaaagagaacaacgatcattgaatgagttgggctgaatcctatctcgatctgtctatgaaaagaaccaacctttgtcggctaacgcatgtacaaatccagctacaaatttccctactcgatcaccagctacgactcctttcttaacacccagtcctcttcccagcaagtcaagaaagagctgattgaaagcttgttcgccaacgcgtttatccggccggttcttcttcggagaaggtgcaatgacttgagtcgcttgagtatgtatcttgatcagccgaacgatgtttttccgatggtttgttgttgattgttgagtttcatcaaaaatctctggtagagatgatagaactatagggagagactctgaggagagaagtgaaggtgccatggtggctccaaattggatgaatgtgtatgctggtgatgggtcaaacaaagcaacggagagaagtaaatcaattctctacgcgtctaacgcgtctaggcacatacgcgttgatcacgtgttataaatctgtgcaaattggtcaacctggccggttcggacacgaccgagctggttcagattctccgatcgtaatcatctctcgccatgctttctctatctttccctcttagtctttctcctctcttcctcttcttcctcttttgaccatcgtattcatcgaagcaagatggagtttgaaacagagacgtacctacatgttgtgtatacatcagcacaggttaggatagttcttgcgttgatcagggcggcttctcaatatcgagatctgatccagctaatccatatgtcctccatcattatttgactccgcacgatcttaggctgttttggcaaccactttggttctcttgatcggttatattatcgctggaactagagtttatgggcccgataccgctctggtaaaagcacatttctatcctagaacgaagagaacaactttcaagtgcatatgtttctcatgcttacgaagcaggagttcgttctggctttctgtgtacttgatgaacaacacagggtctgagaaggatttcaaacacgttactcctacccgcattggtcatctcgatcgttggatcgacgacatcgatccaatcaatcaaatcatgtcagtgatagttcttttgtttgtcttgatggaggcgtgaaccatctcgatcctgtcattaatctttctcaaactcgacgtccgatgttctctcagattggccgatcatcgcttggactcttttcgcccatgcatcctccttattggttgcttacgtagtattttactggctgttcggacttcctggctggattgtagaggccttgtctatcaataagtatgcaatccccatcaccgtttggatcgtttcaaaatttgttgactgatgaatgctttcatataactcttatcagcctcaccgcgttcccattgctagtcctaagcggcatgtctttgagcgctggtttgatggcccacataaagaatgataaccttcctgaagtcgacagaatagacgcatctgttagtcagcttgcccggggactgaactatatccttgtcaatgctttcgtctccgaaattgctaggtacgcctcatatatccctcaggatgcggccaccagtaagtactgacgcatttaattttttttgtgaaacacagaacaattattgttcggttccttctgcctaagtctattccggcgattaagctccctctagatgaagaagaggatgtttccattacacccaactctgagcacagcactattactcctagtgcaagtaatcctactgcgcccgtgtccgataacgagcaaacgcctcttctcgcttcatttgagtctcctccaaattatagtgctactccgaatattgctccttccgataacagaccagaaggcatttattccaaggtgaatcccctcgttctatcgggtattgtcgcgttgatgttggcgttcatcccgaaggttcagtccgcggtatttggatcgattggggatggcggcttgatcggagggacggttggaagtactctaggatttttgggatcatcgtttgcggtcttggagcttctaggagctggagggggattaagattcggagaatcgtatgttctcttacctaatgtaacttgtatcgtttttccgaaaggaagaaggtgtttcctgataccctctacaacctctgttctcgactctctgggagactagtcttacaaaggacgagaagcctctaggtgccgtgctgtctatctcgttttggcgatttgccgttcttcctgcactctcgattacgttcgcctaccttctcaaacatcataccgctgtctccattcaagaccctattctcgttcgtctctcttccttttaagtatactcagttctgctattcttatgctgacccatttattgatacgatcggcgtttctctctatatttagtacgttgtgttgactctgacgacacttaccccggcgctcctacctatatctcgttcgatcacatcataccaaacccaagcgtatcttcgatcgtactttgttcttccgttcattacgtcatttgcgcttgctgcaagcgtagccgtatccggtagaggcgtcagttttgaaagcagagttgattggggatcgacttccaaaaaggcgctaggaggtggaattgctggagcggcggcgatgatcgtgcaggtcttgacgcttatgcccttgcgaacggtgatgaactatcaataccggttcggagggtctatcaaacaggcgtggaacaacctttttggcgatggcggtttccctcggttgtacgctgggctaccagctgcgctgttccaaggaccattatctcgattcggagatacagccgcaaacgccggcatcctcgctcttctcgaatctgttgatcttccggtacttgtcaagacgatcggcgcttctgccgcaagcgctacgtttaggatgacgttgactcctatcgacgcccttaagacgactcaacagacccaaggaggcgttgcaggattgaggctgctgaaagagaggatcaaagagtttggagtatccagtctgtggtggggtgctctggcaacagcggcggcaacgttcgtaggtcactacccttggttcgcgacttacaactggttgtcggaagtcattcctcatagtcattcacttatttcgaagctcgctgtcagtttttattcctctctttctcatctcttcatctctgaacggaaatagattggctgaacagaccttctcttcttatctgctcaacaacagagacaagctctaattggattttcggcttccgtagtctccgacacatcttctaactctttgcgagttttgaaaacgtacagacaggttcacgaaggcgacatcgggtatatagctgctgccaagtctattgttgctaccgaaggtcttacaggcttgttcgggcgaggattgagaacgaggattttgacaaacgggttgcagggacttttattctctgttctgtggaagttgtttgccgatttgatcgctggaaagggagatgaatgaatttgatgagagagctgtaagaagcaaccgtactaggtacttcctctttcttcttggttaaagatgctgaaatgcgtcagctacattttaaatcttcttccttcgatatccatgtcctcttggcttccttttgtctaacttccatacttactcgaatgcctttccgtttctgttactttcgttatccgttctcattctcgtcatcctcaagattctatgtgaaagttaagtctgacatatcacaacgtctaaggttctctagatgggatcatacatgaatctcacaagcatttaagtctaaggagggaaagagacagggaatacatatataggttgatcgaccgatcaatgagggaacacgatctaagaagctttcttttcttttctgctctcctcgctattcacataccacgctctgtttccgtctctagccggacgttaatatcctgatgttctgcaactggggctggtcctctcaaatccagatcagactggttgcccgtcttctttcgttcttgttcctcttcctccattctcaataaccgttccttcatcggcgctttccaatctcccacctccattgcatcttctctggcttgttggagagactgaatggccagccggtgaacgtagtctgatcgaaggtccgtccggggaagggcagcaggaaggaggccgtacaccatggaaaggatgatctgtgacggatgcaggtaggaagatagggatgaaaggaaaggaggagaataaccaaagtggtcggtggagaaaggaaaaaatggaaaaaatggaaaggagagtgtgtgtgttaaggccggttatagagaatgatagcggtgagggtacagatcaggtgtccaatagactacaagaacgagaggacgagaggggagtcattttgttggctttccctttatcgctttgtttcgatacccttggtctagtgacagatagatgaagagtagatagttgaaagaagagacagacggagaacgaaccgtgaacaccaaccaccttgcgcttctagcctttgtccagccttgaaatattccgtctggcgctacgcctgaagtgttggttccaaatccaggagttgtctcccattctgcagctgggttatggttccatctgccacgaggctgggtcttagactttggatcaaaatacatggagtgggcgtagcgttcaaaatttgcatgatgataggattgggcggtctgtgaaaggttatggcgcgtggatgacgaccggggatagtaatttgaaggggagaggcgaggtgcgcgagaataggcccaaccggtcttgaagaaaggagggagaacatcagtgatgaagatgaaggatatacgtttggcagaagatatactcactttagttctgcaggtattacaacactccaacaggaatgacaatcagcggtcatgtgcctgaggacgacttgaccaaggccacaggaagcgaggcacaacccagctcaccttagatagagttctcgactcgtcgggttccctagtgtctcatatgctgtctgaagataatggaatctctccttcattacataaaacagaccagtcaattatcaaaatctttttgtagctgagttctttgaggggtatatgccatcctgctacccaaatcactcacttttgctggaatcggatgtttcttgagtctctcactcgtcgactggcagtctggatgatgtactctgacgagtctatagtatgcctgtttgacctgttgacaggatgctccttctggcagatgaaggacttcccaagcggacgaggggtcgatcgggaagtcttcatccttgaacgttattggtgaggcaaatgacctgatgctggatgggatgcctaaccttgggacagtctgacaacgggacgagcacagaaccgtgcgtaaagacatgctttgtatatgagtatgcgtatgccgcaagatggagatgaggatttgaagatggagatagacgtttgattgggtctactgtcgaggatgataaaggagagtaaaagcagaaggaagctcgtccagatcggaaatgcgcaggacgtagccgatctcggcctggcgtcggcctgggatactgaatgacgctctaactgccggccttgcgacgcctcctctttcctgttcctgttcctgttcctgattttgattgtgttcctgttcccagaatccatcacatctcatccgatacccgcaaccatcaccatcaccattaccatgtcctcagacgctgccccaccagatcttccgtccattctctctttcgccatcgatttggcgagacaggtaagcactgatggctctgactatggcaaaatcttccgtttgatcactccgtaaatacacctaacccttcgacaggtcggacatcgcatcaaagcaggttctcaaaatcgattcgccgctcagacgggagtagatgagaagaagaactctgtagatgtacgcatcgattacatgttcactttggtgtcgcgaattaatgccctacaatactgacttccgacttccgactatcgtcttcaaactaaatacaaaagcttgtgaccgagaccgaccaagctgtcgagaagttcatcctcgaaaaagttacagaggcctacccagaacataaattcatcggcgaggaaagctatgcggccggcaagaaggtcgtgctaggaaacgaaccaacgtacgtctcccacatcttgtgctgtcgattggtaacttgttgcttaaaagaaggacaaacttgatctgctccaaattcacagatggatcgtacgtaatttaatattaatctacagctctcattcatccaagtatctgtcttgaacgaaaaacctcaacctcgcctcattcttcgacaatacatcatgggtcttcatagattgatcctattgatgggactaccaacttcgttcatggttcgtatttacgtcgatggttccttcggaacaacacgtgcgatgaactgcctcctctaatcttcttcttatgtcctactttaggattccccatgtgctgcgtctctatcggattcacgttggttttcatcttcaatgtatctcagaacctctggagcgtgatcttaacctgatgtcactatgtgtaccgtaacagttacctcgggaaacccgtcatcggcgtagtttacaacccgtttgtctccgtgtttcttttgtgtctttcttctctcaaatcctccacactatctgcaaatattaaaacgacttctacgtctatgttagcttccttgatcaactctactctgctgccaaaggtcacggagcctacctcaatgaatctatcaagcttcctctcgtatcgcctcctccggtgttgacctccatctcgcaggccctcatcggtgtcgaatgtacgtcttccacatcctttatctgtctctgacgaatgaggaatgcatgctcttagattggttccttattccatctcttttgcggccatgaatcgatttaacagatggatcagacaggtctcctgaggtgatggacgccaagcttaggagttttggaaaccttgccggacaaggagaagggaagagcatgtgccgaggaatgagaagcatgggtagtgctgcgctggtcggcccattcttttttgttcctctcttctgttattcctggttttatactcataatctcatcaacaaccaaatttttcatatagaacttttgcgctgtcgctgctggtcaggttcgtgctcccctcacatttcaccttcactggatgtgaaagtaggtggctctgtgattcacctggattatgccttttccatgtgtcatctacagctggacatgtactgggagatcggctgttgggaatgggttcgtttttttttcttatctttatctcttcctcttataatcagcctctacttaactattcctcccttcctctttgaacgcaggacgtctgcgccggaaccatcatcgcacaagaatcaggcggtgccctctttggtagttcctctaccgatctctcaggtgatgtcacccccgaaatccttaccggaaggaaatatctaatcatccgaggtgtccccgctggaatagatggtcaacgagctctagccaaagaattctattcaagaattgtcgactgggatcagaattgaggccacgtcttttctaagtgcaaatttcttatagaatgtctcactcggtctggagatcgatttaacttttcaacctcgccagatcctcaatctgctgtagtatctggacagcaaaggccaaagagtgggttgggaattatacatggtaatcgagagaatgccagaaatccaaattagagagaaatagagagaaatagagagatagaatagagaggaaaggagggcagaggggtacaagagttttttcccatatctgatagaacatcgaagaaaataacaacgaaatggattgatgcaagacgacaagaaaggaaagaaatacacttcgagctcaacaaaactctactgggaatatgtgtgatcaaaagatgaattggggaaaactccggagaagacaagatggacgatggaaggatggaaaagatagaaagaaaaggagaaatagagcctatcatcaatagaggaaaaggatgacatgatactgtcggtcctgttcctccagagatgtacatgagaacacagaaggagaatgaactgcatccggcctgagaagagagcaaacaaacgaggatggaaccttagatctcttccatatctacgtgtttcctcttgtgagagggaccctttgccttcgacctcttaggcacaggggcagtcgaagtctttactttggctgtacagaagcgcagataagaatattagtacgacgacaattgaaggactcgattccgactttcgagtgaaggggcgtgtctacatacatttcttaggtgcggaaggcgtagacacttctgtctgctcctcttcttcgtccgctcctgcaggtttagatgctccaaagaaaccatcctcgtcgacatccttccataggttcttcgtcgctgctgctgctgattgctggcttcccgctttggactttccttttcctttcgcgcccggattggctgctgcatccttagcggcctgttcttggtgggccagagattcagccagttcctatatcgaaaaagcatccacatatccaattgacaataagaattcagcctgaatgttaagacgtacagagaagaagaaaatagtttacgtcgtcatccaacaggagagagagaacctcgttcggtttggcagtatcaccagccggcttgtttccaacaacaagatcctggacctaagatcgaagaagaagtagcaatatcattaggaacagttaaacga

SEQ ID NO: 2033 - DNA, 15847 bp, Xanthophyllomyces dendrorhous
attaggaacagttaaacgatgctgcctaaaacataaagaaaactaatagcttacatccttcttttgacgagcgagcttaacaatacgttcgtcaatagttccttttgtgatcaaccgatataccgtgacctgacgagtttgtccgagtcgatgagctcggtccatagcttgagcgtcgttcgaagggttccaatcgttgtcatctgttgttaccgacgataaagcgagcaaattagagaggagtaaatatctcaataagactgatgtataatagatgatcgaactacgaacagaaaatgactgtatcagcagctgtcaaattgatacccaaacctcctgctctggtagaaagcaggaagatgaagatctcggggctggacgcggaagaagacatgttaactagagactcggagagaatttgagcaaaaagatagtaatgggaaagcaactcactcgctctgccatgaagtcaccatgtctcgtcgatcctcaatcttggaagaaccatccaatcgaaggtatttatactgacggtagaccaagtactcctcaatcagatcaatcatcttagtcatttggaaatagatgaggacccggtgaccttccggcttgagctgtctcagcaatgaatctaaacggttcaacttagccgcatcaaagataagacgcttcatctggggcatctgcatcgtgggtggtggaagctgcattgagggcgcagacctgattagtccaataggaggaagacctgggagaacgtcatcaacagcttggcaagcagtctcgtcggtttcgtcggtaatagagagaccgaaaagggccttcgaagcgactgggtctgttcgaatagcttcctcggaccgaaggtaaccaagggaggtcgagtaagacgagattggtggagctagcaccgccggtagaacgcattgaagatctcgccgcgaaagagacgaggtatcgaggagcgatttagaaatctcgtgtaaaagaggaagattcgcttcgttagaggaaacgatggaagcaacgcgcgggattatcaatccatcgatagatcgacgagccgtcgatgctgcaaactcgggttcactactcagatcagagttaaatcagttttatgaaatcatgtgacagagtgtatatagatctgacaaacctctcatagggcgcaacctgaatgtcattcgagtacatgaaggctcgcgtaaaggcttcctgtaaaggagacctcttaatcgatgcatgagcctcgctcggtgaaataccagccaacgccaagaatgcgaatggggaatctgagaacacccaaaagcaaatcgattatgttcaatgctgaatcagcttcgaattctgttagacatattccaataagaaaggggactgactgtcttgataaattgactgttcaatccaatccacgctccaaacgttcatcatgttttgaagccagtgcgtatctgacccggcgtttgagaattctccaggcacagagagcaagccgccatcttcatatatgaggcttggaacctggtactcgatagggttgcgtgtcgagtcgggacaggtaagaaggtccggttctctcatcaaacttgccgtgcgagcaaaggtggcaaaagccatgggcgcctttatgtcggctcgttcgaacaattgtggatggttgcaaaccttatcaaagaaagaagatacggttgaaagatcagaacaggagatcttctatagaacgaaagttaaagccttgttttcctacctttcggaactgcataaccaagttcatcaacgatctaacactatcctgatcatcgaacgaagcactacggatgaggtccgtcatcgagacatgtgctttgaggctcttgtacatagaacgctgtagaggacttggttcgacatataggtcaacctcgatctataaatccaccagcataaagtatccaacaaaagtgagccgtgtacgcagatacttataacgcgatcaaaacataccttgtctccaagctcattttggacgttcttctttactcgtcggagcatgaatggtttcagaatcatatgtaaccgacgaagctgatgctcgttcagatttgtgttgcctttgttatcagtcgaagcggcggcagcttcaatatccctagagaaccactcgctgaactcgtcatgggagtcaaagagggttggcatgataaagtgaagaagtgcccaaagttctaaggaaggcaaggtaatcgatcagcttgtcatctggaagctttcaaaatgatgaaaaatagaaagagaaaatcagcgtaccttgcatggaattttgaatgggtgttccagtcaacagcaacctgtttcggcaatggaagcctagcaaagtcttccaacgggcgctagatgaactcttgatggcttgggcttcatccaaaatcatatactgccacttgactttctggaagtacttctcgtcagcgacaacctgcaataaagacaccaaaatgatgattagcatagcattggacatcggtcagcatcaagtaatatgagaaactgccgacacgaaccagttgataactcgtgatgagaacatggaatggcgcgtcctgattgtaactgatctgttttcggttccagaactttcgaagtgttgctcgatccttgacatttccccagtagggtaacgtcttgagctgaggtacaaaccgagtaatctcctgctgccagttgtgtagtgtagaggctggggcaatcaccaagaacggaccccagatatcctgagtctcggcgagatgagccatgagagagatagattgaatggtctagaggacgacattgcaatagataggaaacatctgatgtcaacttcaatttattcatctactgtacgaaactggaatgaccgtcgcttacctttcccagacccatctcatcagccagaattccgttaataccttgatcatacagactggccagccaactaagacctttaagttgataatctttgagttggacagtcaacatcttgggttgttccttcaacgtgtttccgatcgaagtcgggttctggaaattgagctcttcagagtccactgtatgtttatatgttcccgccgatatgaaaacaattcaaactttagtgtctcctgtttttttacagatttagtcatgaagtctgtgtgaaggacaactcacggttcaaatttaatcctggctccgcgttctctcccttcttggctctgtcaagagcctcgtttttctttcgctcttccgcaaattggagatcgaatgcgacggctttcgcccgatctgccgccatggcggcctgcgcattctttctcgcgtgggcttccatgttcgtttggtcgtctatggtgtttagataaactgacaacgtaagcaatctttcgagaacaaatgttttgtaaatgaacaaacgtaccatcgtcgaaatcaatgtcctctagttcgccatcaacaggcacattagtgcctgcagcagcggcgggcgctgtggtaattgatggaagtccactcgagccagtgtccgcagactcttccgcctccgccgctatagtcgtaacagagacagaggatgagattggagaaaggaacagaggaaaagcattggaagttagtgaaagagccaaacggaatcgtccatgatgttctcctatcggtcgaacgactaagacaaacactcactcttgatcttgcttccgacgaaatgcgaataaagctcggtttgcgtgatcaagaaattgagctttctagattgacgctgggcctctcgctgttcttcttctcgtctagcttgttcgagcgcttctttttctgctcgtttcctgttttctcgctcgtctttttcgtttcgcttccagaacatgagcatctgtttgtttgtttgtttgtttgtttgtttgttagagagagaaaagtaggtcaatacagtcatagaagcactgaacaaaaagagaagagggaaagagaaacgcaaagcatacctctcgaaccatttttttcgaccgaagctgggcgtttttatttgcttgcttgatcctgatctgggaccgcctactctctcgaacaacagcggcactcatctttttgtattctctatgacgagcgtttgagccatcaaccaccgtccggtagacctgcataaacaagatacgtcaaactcgactgattagtaagaaacaataacctccacagatcaccttggttgggcgaagaactaaaaaaaggatgaaaataaacaagtacacttaccctaggaacgtctcgaactacatgcgaccaaaccttcttatgggcctcctccatccgttccgctaaaatcttctgatcgtcaatctgcggcggtggcgggaggaccggctctggtaatggcgatggctgctgttgctgttgctgatgaagttgaagctgctgttgttgctgatacgccaataccatatcaaactctgcatggtagccgtttccatttccgtttaccatgtggtacggacgagcggcagagaatggatcgatttctccgcccaacataggatacggcgaatagccaggcggtcgaggataactcggatcgaatccaggagggagaaccccgttcgactgctcggtgagaaaatgaaccgaaaagtatatttcaaatcagtctggtgggccgttggaagaaggaaaaggatctcgaaacaaactgacctgttgatacatcatggcttgtgcttccaaatgagccagccgttctcgttctcgttccctttctccttgtttccttgacctgcccttcttcgtaggttgaactgagagttcatttgtagtcgattgcgacttgggctgtcgggtccattttccctgttcagatagaaacaataacaacgacaatacatcacagttagatttgacggcaaagatatatagcgatagtgggaagagtttctcacctttccaaccccaggctctttgcctctcgtgcccttcttctttctctgagctggcatcttgtccttatctagggacaactcgctagactctaatgctcgagcagctccgtccgatgccgagaaatccaactctgttccatcgtcattcagcttacgccgcttcgatcgcctatcatcatcctgcagcccgaagttctcaaagtcagagaagtccgatttatcctcctccccatctttcctatcatctctatcgatatcgtcctctccgtcatcgtcatcgtcgtcaaacgattcaggacccgttccatcatctgatgggtaaggcatttggttcaacccggaaaccgactgcctggcagcctttttctttgctttggacgaagcgagaatcaaatcggccgcctcgaacgaatcttgatctactaacgcctctagttcgtccgccgcgtcccgaggtgtatggggttcgctacctagccctcccaacgatccacttgctgatccgcctagaccgccgcctagtgtcaacctgatccttgttgaagaaggcccactcaatcctccagatgactcgaccgcctgaagtcgttccctcatctctgcctcgattgcttcgtgtttctcctgcagctcctgtgcccgttgggccgcctgaatcgctcgaacttctttcgcctttgcccgagcttttgccttgtagcgagatcgggcgacagccgctttggccttcttctcctctgctagtcgatctcgttcggcgcgatagatggcagcgttttcggcttcctgtcgggctcgctccgcctcggcctttgctcgtgcttcagcttctgccacattccgggcgatatcttctcgggctttggtttgagatccataaggtcgagttagaatggcagcaagaatcctctgttttgatttgaattttgattttgattttattgaaaaatatgcaacggatacaatgatcgaaaaagcatgagcaagataccacgagaaaaagaaagacgaggatgagagatccttaacaagaagaacaaaccttctcgtcgtcctcgaaccattctcccaaagctcgcgcgcgttcccttcgttgatctttatagctttgcacagccgtcacccagatcggcttgttcttttcctcgtccaaatcgctctccgccgccctccgggcgagctcaagctgtttcttggcttcatacgctcgagttcggacagccttcttgcctgcaagtggtccccatggtttagtcggcgactctccttcgacggaaggagcgggagccgtagtagctggaggaggaatggcgctggaacgtctctttgctttggtctgtgtatcgagttatttttatgtaggggcaagaatgaggattcccggtatataccagtcagaagatcaaaaaatagcaaaaagaaaaaaagaaaacagaggatagacatgagaagcgaaccgtttttgctttgcttgtaggctctgtagccttgggagcggcgcccgtcgctgaaactctgcctcttctgcctttctccttctctttttctttcacgttctcactagcggccttgtcggcgagcattgccctcttcgcctttgctttagcagcggccagagtccgtttgttgatggcaggttcaacctccggctggatgaaagccatttctccttccagtgcgaaggactcctccttaggtggtgcctctaccatgagcgtctcctctgtcgttattgaccctggatcttcggacccgtcgtcccaaccctgtcgggatgccagcgccggatagtcttcatcatacatggccatcgaattttcttcagcataggatccattctctcctgcttcgtaggtcgggtggggagtgagcgacctgttgtgatcagggtaaggcgacggggtagatctcgaggcagagatatctgtccgaagggaggatgtagtgagatatgtgccgggtccgtcgctcatgagcgacggatcgatcagactgtgaagccgagagttggacggggcatcttggagagcgggatctatcattggttttggtatggaagaggacgggtcgacagtgttgagcatcctggaaagagccatagtgttggacggggaagctgagggagatagaacggatttactgggagagacaaaagaatgcagggcctagagaaggatatgaacgcgagaaatgatcagtaagaaacacagcgcaacgggaagagtcccaggagatcaactgtagaggaggagaatgagagtgaaggaagagagagagaaccccagaagaaggagaaaagaaaagaagacaagaaaagactagagggaggaaagctcggaggggtattcagattcactatgaatcaataaccactggatgtgatcggctgaatgtaaagcttgtccagatatccgtgtgtatgtgtcaggaattgtgtcggtagctcgacggataccgttcctttgtctgtgagatgtctcgcaagggacgcctccaccgaaaacgagagatcccaactagacaagagacaatcgcctcggaggaagacgtagacggccaaactcggaaagagatcgtggttttgttttgaattttatcaaagtgtaccggtcgaagtatagaacttacacgttgccggtgatatgttgaaggtgagagaccgtcctgactctccggctgtggggaagcgcctggataaggcgggtgcgatggcgacctgtggtccatttgacgattggcccaaaggacgtgactgggtgtttatcagttagtggatgtttgcaatgttgattttctcacggacagagctgatgaccgattcagcgaagcagagcccttcgattcgagcggatagctcggcgtgcttagaagtaaaaggagaagatataggtgttgggcgagagaaggagatgtggcaagggaagaagaggagcgaagagagagaacggaaaaaagggagggaggaaaaaatgggcaaaaaaggaacaaggctgagctttttccttgaagtgtcagcgatgagaaggggttttctctattccttgtgttcttctgtgctctctcttttgtgtttcccgattctttcattgaatgtagtgtatgctcgttgtcgttggattcatagaaagcttacttcattctatatgcctgctctttctcgcccatctgggatatagggatgagggatgccctgggatgcatgctggtgcttcgccgggatggatgtaaccagagtaacaattgatggaaatggcatatttaggaccgatccctctctcttcttttaccttcactctatcgatctcttcctctctgtacattcttccgtcaaactcatcatgtcgtctcacgaggacagagagtggaacaacggtcctgtgtacagacccaccttccgaatacctacattcgtcaaggaggttggtcttgcccagaacgaactccgaccgagtacattaccggataaagagaccttggaccgtggagagcgcgtgaaaaacatttatcaatctctcgccgctacttggagttcggacaccaaggaagatccagaaatcatcaatctatgcgaacaggatgacgacgatgacgacgacggcaacgacaacgacaacggcaacattcaagagaatggtaatagctcagatgccgaaattcagtttgtaaagtgtgtccgtcctcggcctcttcctgtgattggaacgtcatcgtcaacgctcccttcgcgtgtcgccaccagtgtcactggtgatactatcagtgcctctgtcaattctacaaagagcaccacttcaatagctacaagaaaccgttcaagcgcgcaaactcctgtctcccaatggttcatccgtcatgctttggccaccaccacgcctacgaaccagttttccttaacggctccgccgtctagcgcgggcgcgccttcccaacgagcatcactggcgtcattgatcgaccttccggatccagggaacggaccagctttcgttccaccaccccatttccatatcaaaccaggaaacaaaggctatgacatgctgaagacccttggttggtcaggtagaggactgggaaagatagaggcctctgcagaatcgactcctgctggtgcgaccgatagcgagaaaagaaggtcggtggtcaagcaagacccaagtgattgcagcacgaagaagaggatgagaaaatccacttctcaaagtttctcagatttcgcgtcctcttcatcggatgaatcttcattcgacacgcccccctccccaccgcgtctatcctccacatcatacaatgcacgttcctcgggcgcgacattcccttcgtcccgacgaaccctgatcgcgcccatatcaaccacattgaagagtgatctgctcggcattcgtccatccagctctaccggcggtcaccatcgggcgattactcacacggctcggtccatcaagcttgcaaatagggactctgctttagctgaaggtagaatgggtccgaaagcaacgagaagaaaagtcgagagagaacggaaggagcggttggaattgatggctaggttgaacagatgattctcatcttccattttcaagaaggtgaagccttccattctcgtcttgtggccaaatgaggagaccagatacatatttcggtttagatagatcgaattctatcatgtccagccgtaatcgacagtccggtttagatgagttcctcattccttcgacgaatatatgaatagcttgtcgtatgttctttttatttttccttctatcatattgatatgaacctccgaatttcagaagagaaagttcaacgcaatccttttttcttccatctccactcctcaagccctttgccgctttacctaaatttcgtctagatgtgtatcgatttgggcgcaatactcggactatatccctccacaaccacgcatatactcaggtgacatcaagccatcaatgatccatactgtcttcctcttattcatatataccatcgtgacatggtgatgatggtagtagtagcagtatcatgtatatcacaattggcttccagtagatagacttgacagtagattaggatagaaccctggctggtttcgagatatagaccgagagagtatatctcagactccactagatttttctttcacttcgtgtttgtttctcgtgtcatagagatcaatgaaagattgatcgagccgcttggtttcaatgcgcgctctgtccttgtttgaatgtcattccgtgttggcaacatacgatgtgagatatgaaacaacaaaagagataaggaaaaaggtttattggacaagggaaatattgaatcatgagaactttaagaactaagataagcggtagacagatcaagcactgtcttgaaagaatatgaaaggaggaagagaaacggaacattctgaacgagaaagagggcggtactctcgagttggcttcattatgaagcatcatctttcttttactcctcctcatggtacctgtgataagaaatgatttagttcccagagagaaagatcagtcgaccggtcaacccaagaaatgtagtctagaagctagagtgaaagaagtagacatacccagcccgtctcatctcgcctagtcgtcttcgagcgccaccaagctccttctctagtttgagaatctcgacctgctgctccatctctctgaccttgaactcgtgggcggccatcgccttatagtctaccgactcgtcctcgtctcccttggccgaaattgcctttacctgcctgacgagagccttgcaggcctccgtcacagctctcgccgctacttctaatctctcctgggtctttgacatcagactggccttcactctggaagcagctacaagttgggctgtggcggcggagacctcgttcgaggcgacgatcagctgttcgagcgagtgcgtaccagagatcactccatcagcagactcgatcatcaatgtcgtagcaaacgcgacggctttggcagcagagatcaaaccctcggtccatcggttgttcctcttgtagaactgttgaaccgagcttgaacctctaccttgatcgacaatctcctgttgagaatctgtagcagccttaatcaatcgaccaatcgcactcgtgatggccaaagcagcttcaagaatcgcatcgtggacttggacgtcgagcgcagagtatctgcctgaatccttcggtcgggacatcaatgcttgtaatcgttgggtagcagcctcgatggcgttcgcggcgttcaacatctctcgttcgacaagatccccgatatccccgttcgctttcgcaatcgggtttgacttccgttggacgaaactctcaaccactttcgacaagttcgcaagagcagcaccggtagacgcgttgttcctcaacgctacgtcatccgttccgacaaggttatacgactgaaggttcataaagaacctcgctcccgtatctccagccgatttagccacagacacaagcttatctgaggcctcatcagaggcagcgagccgggtgatccctttggaggaaacaattacctctgacaacgattgggcgagttcattagcggccttaatgacgtccacatgagaacctcctcgttttcgaccgaggaagaggttgtagatcatcgcaaactcggtcgcgttcgttgtggccttctcgatgatcgaaagcgtatactcaggggtggcgttggtgtttccggtttgtgtgggtgactcgagttcatagatggagtcatcaactttttgaacgcaagcttgaaggatagaatctgaggagggagatgcagttcgcaatgagataccagaatcaacaaatctcgtatggcaagacgaaacaaaacaaaacaactaaccgatgatctgattgagctcctttcgatgatccaagatgagtgtatcgacctgtgtggtgaacgcctgatcggcttctccggtagtctgtgcaagagcgaaagatagattgaatttcggctcatagggtacgttctaaacacagaaacgacgatagagaagacgtacgagcttgctctcgttcaagttttgcaaagtcgcgtccagactttcttgcatcacgctcaactctgcctctttgtcctcgatcagctccgcatgatccctcgcctgatcgtccaactttctgaggagatcgtcgatctgaatctgcttcgacttcaatgaatcctccaactcgtttagctgtcggttgtactttgcgatcaacgaggatgtgtcggcggacttgtttcgagatgcatcgtccgctctttcattggcaaactgaaggtctcgcttgagtcgatcgatctcttccttgtggctctgttcggcccgcaaatagatggtggagacagtgatcagagagaaaaattaaagaggtatttgaacaccaagagagacagagaaggggactaacagatttgactcgatcaatgtcgaatcgacttcgatctcgctctctgatcatatcagccagctccaagttctttgccttaacatctctctccattcgctccatcttatcgaccgcctcctgagccgagttggctcgaagctgcattcctttagacttgttgagtagctcgaggtgttctcctcggagttgagagtacaatttggcgagcgcctggtatttattcttccactcttcgacttgtcgttgaagttgtgcaatcaggtcgtccttcgattgaagttgagctccaacattggcagagaccataccaagttcggtctccagcgctttgactcgctatgaggtataatcgtgcaaggaacaacatcagatgcgtttgttggaaatccggatcagtgcctcgtacaaaacatagagaaagacgtggattgaaaagacgaaccctatcgtactgctccaacatcatctggtctctttcatattgacctctcattccaagcaactccatctcgagctgttgacctctgccctggtccatctgttggaactgcatctgttgctgcatttgctgctgccttagcagttcctcttgttgccttctctcattctcctgctggactctcagctgttccgcatgttccctctccaaccgggcggcctcgtcctgttgtcgtcgctgggctgcctctcgctcagctaccaatttcttttgcttggcttcgtactcgttcaacattcgtttttgttcttcgatatccgcattggtcgcatcgagcagagaaggggtaggagcaggagggggtgcaggcgtcgccggttttggagcggctgttcgaggtcgatcggggaggtccggcgcgttgccagattcagccaagttcggaggttcctttttttcccgttcgggatcacaggagatcagaagaagccgggtgattcagcgtatgttctattctgattggcatcaaggagaagggcgatagcttgaggccctagactcacctgaccaagcttgggtacgttgatcaatccggtcagatattttaggttcgagcactcgtagtagaactttctcaagttgtagtgctgagcattgtatcttgcctttagaggctctagcgcatccatcgattccgttcctgtgtgcagtcaaccaagcggtccagcacaagaaaggaaaaggcaagaaaagaagagggggaaaggtacttaaaaatcagcatcatgtagaatccacgatccaaagatcatgatgacaacgattagaaaagaataggagaatggaacgaacgtcggtgcatagctcgcatcatgctagttatgaatcggtagataccataactctccttgacgagaggaactaaggaagaaatcttgcattcgttgttggcggagcctctaaagtgggcaaacgttagcttttggaacgagtcgatttgatcttgaagagtcatcaaatcggtgatggtttcgtatctgttagaagattatccagattgaggtggtgagtatggcaatttacacgcaggctttgaatacctaggttcgtgtaaaaaggtaagaaaacgcgtacccttcattgggatcatcgattccccgaagtgttacatactcctcgtactcgaacaatccattgaagtctacgtgatgtcggtggaaccgaagtttggaaagaaggaactgaacataggcgcggatgagtgttccatatcctgtttgaggaatgaagattcagcacgataggaaaacagatgtagagagaagagaatcatccacaacggtcgcacatacctttcgctccatccgaagagaccgttcttccgcacgtgtcgagccatccggtttgttgatgagcatctttcagcgtctagaaaccatcagtcaaacaactgagctcagctactaccgacagcagaaacttagttctgaaggaatacaaacagaaggaagagacgtacaacagggtggccttcctggagcaacttgtggacgatgatcaacgccttaaacgtcatcacctcatccgtcaacacaggctgaactctgattccattccagacaggaatagaagtttggtagtcccaggtatacacgatacattctataatccgagcgcggaagggatacagtagagaaaaagccaaggatgagctcttctgatcagatacatccgttgtaggagaatggcgtgtttcctctgtcgacgcgaccgcatgcgacacgtccagagagtccgtctgacggtttcaaggaggatccaagattgagacaaggaaaagacgactaacttcggacgtgtttttgcttgggagcagtctcttctgcgcttgtggccttcttgatgtggaccgagagctcgatctcgctcttgtctttatcgaccggccgggtgggctgatgaactatagctctgattcgtctttcgtcttgctcataatcatcttcgtatctgttttgtttgtttgttcgtgtattagagggacgacagaataacgctttaaatcatcaactcgaggagagaatgattgaagagattgtagacagcgagagacgagggacgagatatatggagaagatacaagagatggaattgatgagatcaagaacgggaaggtaacgtacccggcgactctgccgtcttgattctgaggagtacggcgaccgtaggacattattgagacaaaactctccggagggatttaacaagtcgttgtgtgtctgctgtttgtatcctaaattgcaacagctcgatggacgaaaggaaagaggaaggcagacgaagcgaaaaaggcgataggagatgagattgacgttcaccacagcccggccaagtcatctggttacgcaagactacggcgtacgtaaccaaccgttagcagcagcgacaacaacaccaacaatgagcaccagcatgttcttttggctcgtacgggtcggacaggcaggtgttgaaccatcgaagggtacagaagcttggtggcttagaatgcatcgtgtgcgccttgctacataggaaaggcagaggaagcttccaagacgactggtctcatatcttttacgctagggttacgtcaaatcctacattatttctctgtgttgttcttgatggtcttttccctttcaatcgttcatccttctatccatctgatcgtcagtatttcttatccgtcgtttgctctacatcgatcaacatgggaaggacaagagaaataagaagaataaaagaagaagggagttctcaatgagcgagaatgactagtaatccgtttcatgaacgaaaccaagaagcaccgctcaaaatatccccttcccacttgtttcttctatgtttttctcaatttcgagcacttctcttttcttcttaaactgagagaggagaacgggcttggtacttgagatttataaagagtgtgcatgtcggaaggcgagatcgcagggtgctcgaggggaatcaaaggcgaaactgagagaacttccctattccttttttttttttttt

SEQ ID NO: 2034 - DNA, 6731 bp, Xanthophyllomyces dendrorhous
ttttttttttttggtgtttcgtccagccctgatgttaaacttcatacaccctttttagatacatactctcatgagtagaacggtttaactgacatctgctttgtttttctgtctggttatctcaacgtgatatagagttcgacgggtggcacacggaagcttatattgatggaacgtatgtaagtgatcgcggtgcatatcacgtcgtaaatgtcgactatactcatgttgagtaagttaacggtggatatgagaatgtgtagtgtacaccgtcggatatatgaagttttggcattggtttgtatttacatctcggctatatgtttcagcgactctggatataccgtgtgttggttagtctgaggacatggaaccgttaagagattttaacaaaagaagccccaagatgcctctgcgatgcattacatccattcaagacacccaaccatacacactttggaggacagtaagagataaacgttcatcgagaaaagaaaaaatccaaagagaataagaatcaatcaccacgtcccgcccgacttgatgcctagaccactcatattgatcgaccctcctcctcctgtcatctcctcgattgatttccggtactcgaccttttcaactttcacctagagagtcagtcatatgtcggtcagaagtacatcatgtcagccatcaacatccattatatctactcaagagcagtggagagagcgagagagagaacgacatcatacctctcctccgacgagtgaatacacgtaggtcactacttgaggtccttggatgtccatcagagcaaaggacgggactgtcttttctctgcattaacaagccattcggatcatacacgcatgtattaggccaagagtagacaagacgttaagggaaaacggagtggcgatgaattcttacccaggtcggagaccagaccacgctccactagccgaacctgttcatccacaaggccggatcgtgatatataccggaagaatcctgtttagccggggtagaaaagaaaatctctcttcgaaagctacacagtccgggacaaagagaggaaacataccagggttgatgaagaatctgccctccgactcgaagctttcaaacttgtgcgttcccccggtgaccaacacatcgacatccattcctctagctagtccagcgagcgcatcatgatctcctggaggaatgacctgttgaccgccgagaacccctatccgaagtgagggcggacagggaattgttaacgagagcgggtaatgcacattctgagaaaaggcaacctcattcatcagtttcgagcaaacaagtcatccaagagaagaacagacttcggcaaaaatgatgactggcagcggtttcttacctcatcacaatctcctcgaacaacattcacagccggtgctatcgaccgcagatactcatacgtctccttgtcgcaaacatttcctgtacagatgatctgctgtattttcccttttagaagacagcgtcaaatagatagcaaccgatcaactttcagtccgccaggttgaaacacggataagaaaaggacttgcctggcacctgtttcgttcaagcaagtacgcggttcagacgaacggtcagacccgaaccagagatgagagggcagaaagatgtgcgatagatatggaaaggaggaaagactgacaagcaacctcttgaacttggctggcaagtcacctgctctgtccgggatatgaagatccccgattataagaacgagcatggttttctatttatcgaagagagaaggctcggagggtgtcgaatgtgagaggatattgaagatgtgttctctgatctgtagtctgatggcttatcgaatcgtttattgcacagctttcgtgctcttccaccatctcatcacctttctacatctaacgttcccgtagaatcatcagcagcaacctcgacatcctcttgcacacgaatcaaaatctcaagagaagaagcagaagcagaagcagaagcagaagtagaaggaaaggctagagagaatgtcatcgtttccagacacatctcaaagatcgcttctatcgccctctccgacgccctggtctatacctacggccagctcgcctctacctggtgctcaagccggcgctccggatggaactccaggacggatcgctttggaggagtacaagaagagggatggtagtaaaggttcgcggacagaatcgttttccacatgaatcaagtcctgtacagtgactcgtcgcgctgatattgaccttttgaggattcgcttgattgatctgttgcctgattcgaggagatcagtggtcgtgaggttcaaggcggtaggatcggcaccgatcatgaaacagaatttctacaagatcactggaagcaaccggttccaggtaagggctcatcgatctgatatctatcttgaagaaagagaactgactcgcttggctgttggtttctctatgtttgtctgtgcttggacgggcaggccgtcattcaatttctgaggaaggagctgaattggaaacctaacgatccactagtgagtcttctagtagggtaaccgaccagaaaaattgaactgattcgcctcattatggtgacacgccctttcagtttacgtatatcaactcatcgttctcacccgcaccggacgatacggtctcgaacttatttaaagtgagccttcgtcgaatggggaaggccctcacaagattgtagctcaccgactttctttctgcatccacaacacagtgtttctcgacagaggggcatctgattgtcaactacaggtatgtctgtgcttgtactagcctctaaatattggctcacgaacgcagctaaattagaggtgattcttccttacctcgttttctttcagcactacccaagcttggggataatattccacacgtaccccttatagtctcaactggtcttgaccagttcaaagagaatctctgcgtgcggctccatgtcactcctctctagttttcgttacctacatggttataccctttagttctctattattctgtgccctcatctattcaaaggcacatgtccaaacgaagcttgtcatcgtccaacgactcccacacctgatgatctgtataattctttgataagatcactgcattctcatctgcaccctagctttcaagcttaacactgcacagacacatgagacatacgtgatccatacaagcaagactggggccgaaagtttacgccggccgattttcgccacatttaccaagtccatcagattgaccctaaacaattcatttttttttgcactggcgaagaagaagaaaaaaggtcgtcgaggtccttttctctcttctctctatccatcgggtccctctatctttccaaccttctcccctcccttccgcaatctttcaaaatgtatggatagaccgtctcttctgtttttaggatcttgcatttggcagagttgagagatgtggcaatggccgggagatcacaagctcacaaatctcgtttttcttctttttcctccttccttccttttgcctcttgtcaattttttccctctctttccaccttctatcgcaacgtgatcttccattccatgtggcaaaaatcaacctctgctgtctatatcgtctgccatctaaatacacagggttaacttcaccaccgatggttcgttcatttctcagtcattttttttttgtaaaccggtgctgatggttttttatcctctttcctgcagagattcgtgggcttatgggtaagtagagattgaagcctcctgtgacaagcatctcaatgaccaaacactgacccaaatcgagccacggtaacacagacaagcctacgaacgtgagtcgatcttttgtctggttctcaagtcgagatgatcatgttttgaccctgccttctgtctccttctcactcttctttcgccactccgttccttagatccgaaacatgtccgttatcgctcacgtcgatcacggaaagtccaccctttccgactctcttgtcgccaaggctggtatcattgctggtgcccgagccggagagactcgattcatggacacccggtaagactgtatttcttttagttctttcttcacttcaaatactcaatactcctcgcccttgtttcaacagagatgatgagaaggagcgaggtatcaccatcaagtccaccgccatctccctctacttcgagcttcccgaggaggacatcggaaacgttgcccagaagaccgacggttcgttcagttcagctcatgacaactgaaatttgattagtcgtactaaacagtcttgctcctctcttttaggaaactctttcttgatcaacttgattgattcccccggtcacgttgatttctcttctgaggttaccgctgctcttcgagttaccgatgggtaggttacaacacactcgatctgtatactaaataatctcatgtatactaaagctgatctgtgtatcttcttacagagcccttgtcgtcgtcgacaccatcgatggagtgtgtgtccagaccgagactgtgctccgacaggctcttaccgagcgaatcaagcctgttgtctgcatcaacaaggtcgaccgagctcttctcgagttgcaggtcggaaaggaggagctttaccagaccttctcccgaaccatcgagtccgttaacgtcgtcatctcgacctacatggaccccgtcctcggagacgtccaggtccacgccgagaagggtaccgtcgctttcgcttccggtctccacggttgggctttcaccctcaataccttcgccggccgatacgccaagaagttcggagtcaagaaggagaagcttctctccaagttctggggagataactacttcaaccccaagaccaagaagtggaccaccaagtctaccagcgaggacggacaggagctcgagcgaaccttcaacatgttcgttcttgaccccatctacaagatcttcgccgccgttatggactacaagaaggaggagatctctccccttcttgagaagcttgagatcaagcttacctctgacgagcgagagctcgacggtaaggccctcctcaaggtcatcatgcgaaagttccttcccgctggtgatgtcctccttgagatgatcgtcatccaccttccctcccccgccaccgcccagcgataccgagtcgagaccctctacgagggacctatggacgacgagtgcgctatcgccatccgagactgtgaccccaagggacccctcatgctttacgtctccaagatggtgcccacctctgataagggacgattctacgctttcggacgagtcttctccggaaccgtccgatccggacccaagatccgaatccagggacccaactacgtccccggacagaagtctgacctttacgtcaagtccgtccagaggaccgtcctcatgatgggaggaaaggtcgagcccatcgaggactgcccctgtggaaacatcgttggtcttgtcggagtcgaccagttcttgctcaagtctggaactcttaccacttccgagaccgctcacaacatgaaggtcatgaagttctccgtctcccccgtcgtgcaggtcgccgtcgaggtcaagaacgccaacgatctccctaagcttgttgagggtcttaagcgactctccaagtctgacccctgtgtccagacctggatcaacgacagtggagagcacatcattgccggagctggagagctccacttggagatctgcttgaaggatctcgaggaggatcacgccggtgttcccctcaagaagtccgaccccgtcgtcggatacaaggagaccgtcaccgccgagtcctccatggtcgctctttccaagtcccagaacaagcacaaccgactttacgccaaggccgagcccttgaccgaggaggtcgcccaggacatcgagaagggaaagatcgccccccgagacgatttcaagatccgagctcgattccttgccgacgagcacggttgggacgtcactgacgcccgaaagatttggtgtttcggacctgagggaagcggacctaacttgttggtcgatgttaccaagggagttcagttcatgtccgagattaaggattcctgtgtcgccgccttccagtgggctaccaaggagggagtcgtctgtgaggagaacatgcgaggtatccgattcaacatcctcgacgttaccctccacactgatgctatccaccgaggaggaggacagcttatccccgtctgccgacgagtgtgctacgccgccgctttgctcgcctcgcctggtctccaggagcctatgtactctgttgagatccagtgccccgagaacgcccagggtggtgtctactcgtgcttgaacgtccgacgaggacaggtctactcttccgagcagcgacctggtacccccatgttcaccatgaaggcttaccttcccgtcgccgagtccttcggtttcaacgccgatctccgagccgctaccggtggacaggctttcccccaggctgtcttcgatcactgggcccttatgtccggaactcctctcgataagggatccaagctcgagactttggccaagagcatccgaacccgaaagggactcaagcccgatatccccgctttggacacctactacgacaagctctaaatggttgatgtgttggatgttatgtgatggttttcctttttcctctattatctggcacagcctgcctttttttttttttttttt

SEQ ID NO: 2035 - DNA, 17872 bp, Xanthophyllomyces dendrorhous
tttttttttttttttgttcggccttcagtttttttggacgtttcttggttctgcttgccttccgtctttgtattctgacgagtcatgagattttgtctcagtcacgcagagtagtcactaactgatctgaacacgacacattataagagttcggagtagtgtcagactgagtgtatcgtcttccgtgaatatgagaactagacatcatccacagaccaggtgcagttgccaaagatgtagtcatccgatgcatctctaaacatctggcatgtaaatctccgagcgagaaatttgaactaaacattatgacgcgtttcctcaaacatcgaccttctttttggttttgttctgtacgatcaataatcttctccttgaaaactgaccactgtcatagagaatcgttgcagcatcgagagcttagtatcttccgcgcccctatatgaaaaccaatgccaccgaaacggaaaagccaatcgaatgcctcgacgaaacaatcgcacacaaagaagagagcccgaccaacacgtatagcgttcggggcaaccaaggccgaagacgagatccaagcctcagctcatggacctgctttcagagtcccaacagttcatggggaagtaaaacatctctcggcttattgcctagctgttgttgggagaaacgttcgaatgatgtttgagccggactataaagggggtggcctcaaagagacgttcgccagtacgtgatcgactttacaccttgatggttcgaaactcgcggtttagaacactctgatagacgctttctgtcgtgtttgtatctcttcctcagattatttctatgtattgccagagcatttacgcatcaaagtatgggaacggttgttggacagtgggagtgggctgttgaaggaggatctgatctctcaggtgtgctttcgtcttgagttgggtgagcccgttctgctgcggtctgactgagaactaatatacatcttcctcttctcattccacctgaccgaatgggcgaaactctcaaagtactttctctcgagctatgagatcgtcctccgtggggaccttctcccagtgctctccaacctcaaatcccttaggtctcttactttttcaacatcgaacgaacatgtcaggagattagttctctcctatctgccccaagtatcggatacgtcgattgcagatttactgagaaagatgcctgcgctggagtatatcagcttacggttagtgctcgctttatccattggatgcatccatctaattcccatgaagggtttatacccaattcttcttctgtctttggattggtatattcatgtgctattgcttgctgcgtccaaagtggatcctctcgagctgaagatgtgtccgtcaaggctatcgagaggacgcattataagacgctcagaacactcatcctatcggaaacaaatgtcaaactaccttcactagcgaatctactattgaaatgcacagagttacaagaattaaaactagcggagatagacaagatggtaagccttgattttggctctgtctcgggttccttttccagagttgatgacctcttttggttaccggtcggacagaccgatgcatccttcaacagactactggatactctctatccgacacccgaatccaactccagcatcagcttgacttctgcttctcctattccactctttcgactcactaagctcaaacttcgagggaaactcgatcgatcgatcaactcattcaacctctcccgatcgacacttcatcgtttgctctcccatttaccctcactcagctctctcgatataagttattgcgaaaacgcaatcacctctctaccttctcagttcctgtccaatctgacgaaactcagcttgagactttttactcggtgggatgggccttcaccgctggtggatcaactcatccaagcatccccaccactccagacgttaatcctcgtcaattccaacatattggtagacggtagtctgggcgcgttaacaggactcttggagaaactggtcgatagtggcgatgtcgggagaggtcatagtaggagagagaaacagttgagcaaagtgtgtttgatcggaaagatgaccacaaggggtccaatacatcagagacgacagagagtttctctcgacggtgaggaagacgatcggtcggacttgatactgtttttggagaaagttggtaggaagttaaatgtaagacgcctctctattctctcctctttctcttccgaatcgtgtcgcgcatacttaggatgaacgaaatccctcgtcgattgatttctgtgaaaacggaaatctaccgcattgtactgcaccgcacgatttatatttattttaattaaactaactaaaaaaaaacagtatctggatctctccggagcgatccttggattggacgatctacaagtattcatccctccagggtccacgctgactcacttagtactcgccgcctgtgaacttccggatcgagtgggtgattgcctattgggatgttcggatctgagagtattgaatatcgctcattccagagtagaacgttcgtgcctctatttcctcccttcacatctgtcccattcacatgaccttgcgcgaaggtaccctgagcatataaaccctcgtctgaatttccgtctcttgttccttgactgtgagccttcagtgccgacgctgttcactctcctcgatgcttgcccgagattaacgcagatagactgtacatcctgtcgaggtcagcctgtattccgtcgccgtaattctttttcctttcatatgaccattggctgatagagaaaacatgatcactcatcgatctcagggataagagtgaacgaacggcgagcgatctttcaggtttgtccatcccgtttctcttctcttctcactgtcttgacattactgcttttctgggggttcgtctctcggaccgtatatttcaccaaaactgatgaatatacgtatggatattgtgcgcttgtgtacttctatctctgttctcttggaacggaagttatggagagagagtgatttgattaatgaaccttagtttttgatccgaaagctgtcgcatattaaatatgaacacgagaggttccacgaattttgaaaaaaaaaaccgacattgatacgagtgacaaagaactagaaagaaggaaagagaaatcagaatgggatgggctgatgcggttgaaatcgcaaaatggaagggaaaagaggatagaggagagaggatgcgggagaacgattggtcggacagacgtggtaaagcatctgcgagaccgaccaaccgactgaccgagactgagttcgaagaggcagagaggaaggcgggtagataacacggacattggtgtatactttggaagcgaagacggaaagaggaagaaaatagaaaagaggagaatatgaaaatagtaacgattaaggtgcgaacgagaagaagcgtcgtcgagaagagatctaagctggattaacttagaccagacatggacgacgtatgttggaaaatataagagaggacaaaaggtagttagacgagatgttggacgaggtgtggacgaggaataggatggatagagtggagtggaaggggaagaagacctgtagccctcctaatcttgcggctcccgctcgacctgttgatcggcgaagagtgaagaaatagggacttggcgtgagatgaagctgtcaaagtgactacaggacggagagtagagaaagaggagaagaagagacagtactgtagagaacaaacagaaagcgatggataggtcaagacaatgagaagagaagaaaacaaacaaacggaaagtttgaaagggtaagagaaggtagagaacggagagcagataaatccgaggggaaggaaggggtaggaagaaaccatacgtgaagcaggcataccgatctcgttctatcgagctcgactaccagatacaaggagaacaggtccggagatggcagctaaaagtcgtgttatataagagagtgaacagaagctaccaatcctccatcaatgaaacatagagcggagatgaggaatgatagaagcggtcgggaggtgatcctatgagagcgaaagattgaaaaaggacaagtgaatgatgtgatctacgtcgtttggtattcgttatgggcgttgttgttctgcgttgacgaagggaagagggactagaagaggttgaaaagaaccgatgagggtagccgagctctccaattgcctaggctttctagaaccctttcccaaaatcatgctcagcccgtactcttcgtccagaatcgttgccccaagtcttcccacggctcaacactcgtctcctctgttacatatccacagacacaatcacgttcagtagcttatccctatccttctcaaactctctcgtgttccacctgcttccccaagggacttccctcgaccgccttaataccaagcctgagggacgggctcatccgccggcctaatccttcgaactggaggaggcgcaggcgtgactccggccttggtctgggatcggagctgcctgtccgttccgcccttctggccctctgggtcctcctcgccgacgactcgtcgaacaggcgctctgggaatggccgaggtgctcgggttggcaagctgcatctcatcagcgacagaacggggttggacactccaatcaaacacgtagtcgtactggaaagcttcccggacaaagaggtctctgaagagctttcgaaggtatgaataatcgggctgataggaaagatagagatagaggaaacgtataaagcagaaatatcagagaatgatcgaggcaagatatgcatacgcgaagaaaagcaaaactggaagatgtaccttgtcgtcgaatcggagagaccggcagtagttcaagtagatggcaaactcgttggggaaccctcgagtaagaagctcagtaggcgtggtcatctaccccgttggtatgattggtaaggataaaacattgtcaacatgagctctggtatgacctaacttacttatatcaagacagaccaagcaaaaacaaaagtgatcacaaaccttcttctccataattcgatcgtacttctgcttcttggtagcagccttcaatccctgccagggcagctgacctctgaggaaatacataagaacataacccaacgactcgagatcgtctcgccttgactgctcaactcccaagtgggtgttaatactagtgtatcgagcggtacccgtcaagttcttgttctccctgtacgggatgtgaagatgcgtcttgggatctcggtacttcttggccaatccaaaatcgatcacgttgacttggttacctcgcttgccgattcccataaggctttggattgaatgtcaagatcgagataaccgctgataatcagaggactgtcttgggagagaagaaggacaagaaggaagaaaacctacaagttgtccggtttgatgtcacgatggatgaagtttcgagagtgggtgtactctactcgagaaatctgttgattgtggtttccgtcaaaagcaagtgggcgtcagtataataaagtatgtcaaacaagaagaatccaatgagcagagagaaagtagctgacgagctgatcggcgagaagcaaaaccgttttgagagagaactttcggctgcagaagttaaagagatcctccaaactcgggcccaaaaggtcgagaaccatggcgttgtagtcgcactatcgttgttattgtcgtcgttgtaaagtaccaaaagagggccatgcattcttcaggtcagtgatctgtttgactgttggttcaaaggaataccgggagtcatgcagaaacagtcgaacaaacctcggtcccgtaccacctgacaaaaggcacaccaactccgccagccaggctcttgtacaccttgctctcatattccaactggggatgcttggccttaattgactcgagcttgatggcgacctcctcaccagacacgatgttcacaccaaggtagatatcacctgttgatttaagcgtcacgatttggtgaacgacaagagtttacccagttgatatcagtcggtgtacccattcatcggggatttgaatgatgcagaaaccaaagaaaatatggacaaggtacggaccgaaagatccgcttccaatcttcttgccgatgcgatacttgccgccaacacggagatcagttgccatttgtgtctggaagaagatttggatgtggtgtggttaaagaaattgatggtaaataggtttgtcgggagaggtaccatatagcaagggaggagagtgatggtcagggggtaggtggccatcgagggaatgaatgacggaaacaaggccagagatatggatccgtcggacgttgtgagaaggcaaagcattccgagtgcaaaaagaagagaaaattcgccgagatgagacacgaagggtaaatgaggggaaagagcagaagaggtatgtcagtcagaggatacaagatgcaagtaagaacagtgaggggcatatgcaggtaagacttgaatcgtctgcagctgcgacgggacccgacggcactatcgagacgatgtcggccgtgacatgcctgttgtgtcgtcgagcaccaggaaacgacgatggaaaaggaagagagagacgaacagtgtattgaaagattgattggtttattagagttgaagggagaaagggaaaagaaaaacagacggaaggaaggctggagcaagaacgtatgttgggtgattgacaaagtaaaccagattgaatcgttagacaggacaggaacttttactcaaacacagagcgaccaaatccggagtatgatcgaggcgaggtgcaaaagggaagaaaataaagagaaacgaagcagaggaatgcctgaagaattcacacagagatggaagaggaagagaaaaggtcgacagggaaggaatggaaagagaagggaagggaagggaaaactccaacgaaggaacaagaggaaggaaaaatctccagtacacacggtcgtggctcttttaacgagggaccggatggcgagccgtatttatcaaacctgaataggtatgagttctgacagcaagagacactaaacagacagacaccaacccagatgagaagaggtgatattgatgcagatgaatcgatgcacgatgcgttcccggtcatttggatgggtcagctgtaccaacagccatctcacatcctttttcgtttcccttgcctttctccccttttcccttttcttcctttctgccttcccgtcattcgatcttcaaacttttctttgcagattccgatagatcgatcaaaaatctgtggattcgtgaaactttgaaataacttacaaaaggggattgtgtcggggatacgctgagcggaagggagggaatgaagacaggtggagaaagtagaacaaaggcgagagattggatgcagaccccaaacagactcggccgatttgtcggttacgcgtgattttgttacacaactatccagtcatgtgaaaagcccattatcttatctatttcacaactctcccctcgttcaggccttattactcctcatccttctcaggaaccatccttagtggtcatgtttttgtataccatctcgagctgatacttcctatatgttggatacatgtgctgcctctaaacagcagaaggctaagtaaagagttccaatagactcgctagcttctcatctgttcggtcgagccttgcccttgactactttcagcataaatccttctttgacggctgaacaactgtcggacaagtctattcttctcaatcccgacaatgctatagactaccatccctcttacatcttccgattttgcgctcaaaagttccagactatcatacagctctgtatctcatgaccgctctcatcgtgctccttcgattcatcattctttccatagtacgtcttcctgtttgagggaatgaacaggatattcgtctacaacgaggcacaggtccccttcgggattatatacccaatcgcgagactgagcagtcagaggcactctgatttcgatcaaagatacatcaactctgttaatacaaacaatcatacgaacgcagcttagatgaacaataggccttggcagacccctatgtgcaaggagatgcagcaacagattgataacgattatcaagatgactcctggccgaggaacggggggtaagaaggggccgatctgatcctctccttcttctctgtgaacaacactactccgattcagttgagtgtggacattgaagacattacatgctcgatactaaagtttcttcacataaatgagtttctctacaagttttaaccacagttggaaacaacagactcgacacactgggatggtctgttatatctcaagcttcaaatacctgagaggaatatcacaatggacaggccttcttcttggcctttccttgcatcgtttcgacgacaatgacgaacgcagagtcaacgttcgaaagtctcctctttgcaatgacgtcaagtctgccgcgttcgtcttctggtctctttcttgatacattcataactttctttcaagttaggttctagtatttctcccgtaatccacttgttaattatttcatactcttccttcccaatcagcttcttctgttctttggtagatcattttctgtgcgtgattttagcgcgtctgtagcgtcttgaaaacacgtgttatatcctcccgaagtgtatgtgtaaaaagtttaatttgctgaggtttgttcacatggcagtccggattatcataaggccggtaaccctaatatcaacatggctttcccccttgcatacatttctactgaccaaggtttaattaccaacaccatcctcggccgtcttactctgcctgtcagaggcccgttcttgaaccatgctcttggcctacatatcaacgttgttcattctgatgtctaccgtcctagctatccctcaggttttggtctatacgcggacagccggtctgtctatttgcaatttcttctgagagaacaacagagcgggctatattgagttctctacatttttctaggcttccgacacgacagtattcccacggccatacagagtctgggatctctcgggcctaacaacagcatatcatttacattcacagaggatcccgccagattcactgaccaaggtcttgctgaatttgacgcgatcatgtttgtctccaactcggatgaaggtccgcccttctccctgtatcctcattttattcgagtgaacgtgtgctgaatcctttctatcccttcccaatcttgtgcaacatccatcagtcttggatgacactggtaaacaggcccttcaaacgtatctcgaccgacaaggaaacttcatggctgtccacgctggatgcgcctgcttatttaccacggatttcttcagaaaagaagtcggcgcgctttttgactatcatccaacgtttcaacaggccgtatgctcaatctttttgtactgtcatatctttcctccattccttcaactgattggtcctcgcgcctttactgttgtttcaacatgatccgatgtagacgtttctcccgctcaacacaacccatccagccatgacgatgattcccgatcgatggacatttgtgtgttcttttggttctctttcgcgctacagcctcatctctcgttgtcttcgtcgagtatccatagaagactgaccgaattacaagtaaatatttgaatcataggaagaagaagtctaccactatcgttcggatcctcgggatgtaggcgcgcagatcctcatgaccgtcgacgagtccagctataccagtttcgtctacttgttccttcttgtattcctcctgtcgtcatcatcacgacgggccgatgttcatactcgagtacagccacttatacgtgttttcgttctgattttcttcgtagatgatgggacatcctcaggaacctatcctgccgtgacatcacctcttccaataggttcgtcttatcaagtgtaccaacaaaaggaataaaaatgaataggcagacgaagaacaaacagcatgattgatagagggatttctcgataactttaccaaactatctgacttcatttagcatggtaccaagatcgaggagccggaatctcaaatgataccgttcttcccgggggtagaagttttttcacgtctctcggccattccaatcagacttggcaagtcagttgttttcttcttctctctaacttcctcctattatccctcgttttaccttctcgtcgtatcgtttcgatccataggttgatcataggttcgatttgaattctgcgtcacaattcacattgtctagaacgaaactttcctagcgcacatctttggaggcctccaatggacgctcgactcgcgcaccaccaaagcttacacttcctccggtcaagtgggaacttcatccttctcttcttcttctataacatcctcttcgacatcatcatcgtcatcctctacgacagccactgccggcatatcagtctcgaagtctggtacaacatcccattcttccactcaagcttcaacgtgagtttctctgtcctccttctccctcaagatatctttctaagagccttggggagaaaaataaaaaaatagaaactaaaatggatatctgtctaatgtggcctgatactggtgtcctttagatcctctagtccatccaccacatcctccgcgaccactagttctgcgaatcgacagtctggggttcttgatggatatctcattctcgtttcggctttaggcataagcataacggtcgcaggagtttgagcaggagcaaagtgaaattggtcctaaaaagaaaagaacaaagagaggtctttcgtcgcgagcgtaactttctttgtcggaataatctcagtttggacagcctttctatgttatgtgtatttctgatccttttcaggggctgagcgtacagtacacacacgtttgactacgcgtcattgatctcgcgtgtttctcttctctcgattagactatcacaacaacatggattcatcgcatataactaggctctgaaaagaaatccagtcacaggccgatcaatcaatcgggtaaaaaacaaacaaaaaagacaaaaagaaatacagcaggtgtcgcaggatcaaggcctagcgagaagaatggcatacaatgagaactaagaaacagagaacactaggctaatctagtttactgccctcctcggagtcgaagaacgagatgaagggtagactccttctggatgttgtagtccgacagggttcgtccgtcctcaagctgctttccggcgaagatcaatcgctgctgatcaggagggataccctccttatcctggatcttggccttgacgttgtcgatagtatcggatgactcaacctcgagagtgatggtctttcccgtaagactatgaagcactgaagataagatacgaatctcatcgatacgggtgactgaatgatttggtctacacttacgtcttgacaaagatctgcattcctcctcgcaatcggaggacaaggtgaagagtggactctgtgaaacagagagagagagagtcagtgatcttcgtcagaaagcgacgaagcctgataagttactcacccttctggatgttgtagtccgacagggttcgtccgtcctcaagctgctttccggcgaagatcaatcgctgctgatcaggagggataccctccttatcctggatcttggccttgacgttgtcgatagtatcggatgactcaacctcgagagtgatggtctttcccgtaagactaaggccatatttgtatcaagctgtcagcatggaatagtttgagaaattgtaataagggaacgtacgtcttcacgaagatctgcattcctcctcgcaatcggaggacaaggtgaagagtggactctgtgaaacagagagagagagagtcagtgatcttcgtcagaaagcgacgaagcctgataagttactcacccttctggatgttgtagtccgacagggttcgtccgtcctcaagctgctttccggcgaagatcaatcgctgctgatcaggagggataccctccttatcctggatcttggccttgacgttgtcgatagtatcggatgactcaacctcgagagtgatggtctttcccgtaagactgaaaataggcaccaatgaacagtccatcacgtcagcaaatgtaaagatatccgttcaaaggcacaagaagaatatacatacgtctttacgaagatctgcatagctgtttggatggaataagcaggtaaacacgagttagttagggatcgaatgatgaggggtggctagaagtatggatgagcagatgggcagatcgacggataaacggcctgtaggcacgccgccagcgcatctttgtcatcgccaccacacaaacacacagctcttatgacaggaaacaacgatgcatccatccaccaaggtgcctgtttcaccatgtgagcaaaaacaacagacccttaaagtgacactaagaatgaaatagcaaggttctcttgtctaaatcgtgatagcacaaacaatcctcatcgacactggtggtggcgatggatgttgttatctcttcggcaatcgccgcatccatccatccatctacacggacgagaggagataatgaaggaagagatagagaaaggaagagaatactcactgtagtagagtaggcttggtgttggatgggcaagcttgggagataggtctttttgggggttggggacaaagtagtagttgagtggtaagaaggaaatggaaggagggaagtaactggcccgttcttatcggtggccggaaagagatgaaccctcggcgggaggccaaagcgtcaagtcaggtgcccactaagacatcgacgccacaatgatgactcataaacaaggctgtgcaaggcaccagtcatttcagccctctctcccgctgcgcatcatagagtgtgggagagagacatctgttccgtcccatcttcctttatcgccacctgtttcttctgccatcgacacatctactcccgttcttttgatcaagttataaactcaagtgcaaacatgaagctctctactactcttctttcttcgttggttcttgttgggccctctcttaccaacgcgatgcctcaggtcgactcgttggttggactggcttcttggggtgccgaggctatctctggtatcggccgaggcaaagtcaatacctttcctgagggaggatggagctgggttgactgtggttcgtttattatcctttaggaagacagcttatctaaagcaatgccacatccactaaaacgtcttgcgtgaattgggttactgtacatctgataggtgtcgctggtgatgccgtgtatgtctgaattcgaagatctttcttcctgagggtctcaaacgctgcaagcttacctgatttgatcctctcggggactcctaaacttagccaagttgaatccattaacatctccccggaccctcctgtgcctggaaagaacctcactgtgtctgtcaaaggagtagtcatcgatcccatcaacgttcgtcttcttcctctgatcgtgtttccaaccagtcttgtcagccctttgtcatggagacatctaatctgtctgttctcacgactcgtcaacataggagggatcttatgccgacgtcttggtcaagctcggccttatcaagcttcttcagaagagattcgacgtgtgtgatgaagcgtgagtaccatttgtaccatcttctgcagaaacaagaacaaaacatgggatgtgtctgttgatcctgtcaatctccgatatcggatatctctgtagtgaaaacgccaacgccacagtccagtgccctgtctctcctgggtcttacgaagttagccagacggtcgagcttcccaaagaaatccctcgaggtatgtgcattttgtccgcttcaccaagttcagattcggcatgtctcaaagcactgatttgaccatacaacctgcccaccgattctgttctacaccgcagctaaattcgccatccaggttcgaggagtgactgccgaggacaaggacatgctctgccttgatcttttcattggtaagttgtttctcatctttttcgctttctgctgtctgcacaagagaaagagcaacactaacattccgtgttgtgtgtatactattatttaaacagactttttgcaccgaaagcccgctctcaactagactgatagacagaacctccctctctgttactcgttgttctgatgggaatcgctcacttattactctaattcgcatcctgcctgaatatcttgaccaatcaacacctcttttctgtctgtttgtcttctcgctcgtcttttgtagttttctgtaatcacttgtctggaggaaaccccgctctgtgcatggttgtctttacgatgatacatgctatgttttcatacgatagcagatcgacagagataaacattgcggcaaatagccatcagattagagaatttcatcgatctttttctattcagactacaaaacccctctaattaaaacacgatgggggccataagagaaaaaaacaaaaaaagcgcagcaaccccaccaaacctccgctcttccgttttttgctcctctccgtcttccgtcgttgaagtttgcactctttctctacatcctctctctcctcttcgtctcgaccagtccttagcctacctccatctctatcccgtcctccctcgtcctccctgtttatcttgaacccgccttctaaaaagaccagttctgaaaatgcaccgagccgctcttaacatcgcccgacgaacgcctgctttggccagaggtttgtccttttcgttttccccaccatttttttctctttttctcttcatctgctctggggaaagcaaacaacaaatagatacgagatatgtcgtccctttccaatcatcacaagaaactgacctatatctttgctcgcattcggattgttctcttcacctgcctttgttgtgatcttttttttctcccactccgatttgggtttaatttaccgattcatcaggtttgaccacctcggttccccgacaggccctccaaaagtacactttccctgccatgtcgcccaccatgaccgagggaggaatcgcctcctggaaggtcaaggagggagagaagttctcttccggagatgtcattttggagatcgtacgtttctgcctgttcaatctgcgtctccatctctttcctctcttttttttctcttttccggcttgaggcaacttgccaaagatcaactgtgattggagaaaacactatggatctgttggatcgtgatgagaggtttttcaggatatgcgaacgaaatcaagaagatctctcgatagcttagaaacatttgcaacaagatccagccgaccgatcaaatacctttactgtatgctgttggttatagctcgatttcaacgctaaccccgatctctcctccattcttctatgtgaccctgacaggagactgacaaggctactatggatgtcgagaccactgaggacggaatcttggccaagatcatcgtacgtttatgatgcttttgctttcatatacctgccagccgtgttctcatcggtactctttctttctcacctccttatgttgtgacgtcgcttgaatgtaggtcggagatggtgctaagaaccttcctgttggagctcttatcgctatcatcgccgaggagggagatgatctctccggagctgacgctcttgctgccgagggaggagatgccgccccagagaccgccaaggaggagtccgctcccaaggaggagtctaccaccaagaccgagtcttctggaaccaccgcttccggacccctcgacactcccaccggtaagcccgctgtcggtacccccgagaccccggctaaggcccccaagattgcttctcaagccggaggaccaaacaaccgagtggttgcctcgcccagcgcccgacgacttgctttggagaagggtgtcccgcttggtcaggtcaagggaaccggacctgagggtcgaattgtcaaggaggatgttgagaagttcaaggctcctgccgctgctgccgcttcctcctcgacttccaagggagctgccgttgccgagtacgaggatatcccggcgagcaacatgcgaaagaccatctccaagcgattgttggagagccatcagaacgtgcccaactactttgtcaccgttgagatcaacatggatcgattgatgaagctccgagaactcttcaacggtgccggcaaggagggacaggtcaagctcagtgtcaatgacttcatcgtcaaggccgcctccctcgcccttgctgacgttcccgaggccaactctgcttggttgggagatgtcatccgacagtacaagaaggccgacatttgcatcgccgttgccacccccaccggattgatcacccctatcatcaaggacgtcggttcccgaggattggcctcgatctcttctgagaccaagactcttgctaagaaggctcgggacggtaagctcaagcctgaggagtaccagggtggatcgttcacgatctcgaaccttggaatgttcggtgtctcccagttcactgcgattgtgaaccctcctcagtcgtgcatcctcgccatcggagcttcctcgcccaaggtcgttcccaacgacggacccgagggtggttacaagactatcaacgtgatgaacgttactttgaccgctgatcaccgaacggtcgatggtgctgtcggagcccagttcttgaaggccttcaagggtgtacgttcctctttttcactcttctcgaactttggtttgttttcttgagaagaggctgatgggtttatctatggtttcttcataacagtacatggagcagccccttaccttcatgctctaagcggcttgtatcatcaagatgtaactctagccaagggttttaagactagtgcttcgattctttctctttttggttccaaggctcggtagacaagacggttcctctttctttattctcgtctaacattttttcttctccatcaacctttcaaccttactgctctctctttcctcaccaaatgtcttactcgtcgtctctctccgattcttaaacttgatgtctctttctctcttcatactctttccttccttctctctcttcttctaggcgctctgttctcctctatctttttgttttgggatcttatgtataaagatttctctcatgaatcctccttgctcgtgccctcctgtgcctagtcgtttgtgatcggccaacccacaggtctcaaaccgctcttcctcgatctttgattcaacactctagtggggctcaatcaagaatctagaactgtgaccgctgaatgggatcttgccagggagggggaggagggtataagatcaagatggtgctttcgcgtatcttgaacagggagggaaagggtgatcacgcggtttggctgtcgattcacgtactttcttcacccaagactcagaagaagacacacacacacacacacacacgacacagaagatataacccaatagaacataatacaaaactgtaagacaatcgtgagagaaatatggaaagggaaggaatcccatatagagcggatatcacacaaaacaaaggacccctttgtcttatcgttcgatcgggtctcgtcaccatcgacaaccatatactttattctcacgcccgttccgactcgacgtagacaaagacagtgggacgaagggaaagattaaactttcgtgttcagaggagggagcttgcctgcgggcggtgcaaagtatccactctaaggtattcaaccagagagaatccaaacagagagagagagaga

SEQ ID NO: 2036 - DNA, 2033 bp, Xanthophyllomyces dendrorhous
caaacagagagagagagagagcaaaaaaaagtgggaggatagacaagacagatttagaccaagagcaaaaccaaagtgtatgagaatagagaaggggaatcagtactgatgatctataacccggtcgaatatctctcacccgagcttgagcatctcctttccgatttagtcccccatctccgcttccccctcagactcggcctcaagaaggaaaagcaaggaagaaagcagggaaaaaaagaagacagaagaacactcaccctcgtagcggcatcggcagcaaaccaaagtgcgactctgccagcctgcaacatcccatcggctacgtactgctggttatactcattacctagtaagtgtgtctgaggcctgaccaattccaatgtcaacgatgaacggtaggcagccagcgacggatacccagggatacccagggattcccataggatatacagatgttttggcacaggagaaaaacgggatgatagagaatgaaggataaaggcatggagctagaggtcagacgatccgaggacaacatccgagttttgacaagagaagtacgagaagagacagacgaacctcaacccggtctgagcttcgatccccgcactcaagacactgataccgaacgcgagcttgacagtttgccagacagtatgaagaggtctcatcgtttcggtttgatttgatcttttagtgagaagttgaagaaaggcgatggagggtttccatcaaaattataagaatgaaaggaacgaggttgtcaaaaagaatattgaggatgagcatctcgcaaatagccagcgagagtatatactacgaccagagtcataaaaaacacacatactctagctgatagagagagaccaaacgatgatggatggtagaaggatgggatggaggatacaccgacggtcgttcacacaagccggggatattcattggtagtcaggctcgcgcacacacgtcatccggatggacgactcggatgtggcctggaaaccatctatcgatcaattttctcttaagctctcaaagtccatttataatatatctctttccgtgtgtgcgtgtgacttgagagtgttctcttcttgaagcctataagcaggcaaggaaaacacataggaggaaacaataaagtaatacagtgggccgatagggtaggctacaaatctaagagttgttctgtgaggtcgcttcaggccgaccatgattcaagggcgtccttgccaagcttattctcgatcatctgagtgcttaatcgccaaagattgtctcgaatgactgggtcggatccctgctcggtctctttgccgggggtctcaggactttgatgcgaacgggaagagagtcagaaaaggggacgagagagtgaagaaagggagagagaaacaaaaagacagagcagaataacatactcgctgaggtagtaaccgttccagtcgttcttgatgatatcctcagaagtgccggcgtagatggcagaataagatccttggacaggagacctgccaccaaacaaagtgactgcctcgacgatctttccaatcagcccagggtacgctcgttgccaggcatcctgcatgtcggtattgaccgcaccaggatggacggagagtacatagacgttgtctgagtttggcttgatgaccttctcgagcagcccgtgggtgccttggatcatcgcgagtttcgttcgaccgtagagctcgatcggtccaatcttttcattctcttggatctctgcgaccgattggaaggtagtcgactttggtgcgaaacggtgcatctctgaagactcgaacacgatcctcggggctggcgcgccgggaagcttggacgtctttcggatgagagggtagagcaggttgatggcataaaagtgaccgagccagttgacaccaaagtgcctgtcgatcccgtcggcatcgagcccaggttgatcagagttgattcccgcactcaggatgagctgtgtgtgtgtgtgtgtgtgtgtgtgtgtgtgtgtgtgtgtgtgtgtgtgtgtg

SEQ ID NO: 2037 - DNA, 12568 bp, Xanthophyllomyces dendrorhous
tgtgtgtgtgtgtgtatgcataggagagacgtcgtcagtggccgggcaaggaaagagaaccggaagattgaaaagtgatacagacgagatcaagcctgtcctcctctttagcaagtttctcaaagacctgcttggtctctttcaagtctcctagatcacaatggacccattcgatgatggcctctggaacctcggccttgatctttgcgatcgcttcatcaccttgttcttcctttcggttgatcatgatcgtccgagcccctgcctttgcgaacgctcgagagacttcgtatccgattccgagcgcacctccggtgacgatggcggttcggccttgaaggttcggcgggacacattccttggctagccagagagagaaacagcgaagatgagcgatttcactagccgatgagttgatgagcggtatggtaggtctcaagtagcaagacacttacgtccgatgagaggagcgagaacagactgcattgttgtgagtgtgagtgagtgagtgggtgagtgagtgagtgtgttagtatggcagaatgtgaatgtatgtacgtgtgatggaactgaaagagaaagctccacagcaactgatccaaggcagcattcttatacgattcgatcctctttgatcgagcagaacgaaaagaaaagagaaggatgattcatcgagctgaactcaatccttgcccaccatgcgcactcaccaccaacgacgtgctcacgatcaagaacctccaaccgatgatatccttctttggggatgctctctatgacgttcgacgcacagccgacggagatgctcttgatcgacgcgtctcccacgcgccggctcacgtggccggcttgacgcgtgaacaggtcgcgttcaatcttttgtcacccgttccttccgtgcaatctgactcttacttcttaccttcgttctcccattctttcatctctagtcgtacgtcgttcgtcgttcgtcgggtctgcttgatctgtgaggttaatttgctgatggtcgggtcctcttgttgacgctcagcccgaaagtcaaatgcctaatcccgttcgtgtctcgtttcgttcattcgttcactgcatcctctgatcgttcttcaatctttcgtggtgacaccgacactgcctcttctggacacgaacactcatcctacatgtttctctgaatacacacacgaacacaaacacacaggccacaccagggaccgtcctaactcttgcggccaccatcctgctcgccttagcttcgttctgcacaccgttgatcaagtcactctacctcttcaaggcgacactcgacaacgatgacttcacaggtactctcacccttggcaccctcgggtactgcatagaacaaacttcatccaccaattgcagctcggcgggcttcgggtacaccctaggtgagctttctctcgttccagacaactcccgagctcttactctgtctgactttcatccgttctgtcctgtgtacatttcatcagacctcgattccatccttgccatcaccgcgatcgatattcccaccagtcttagcaaatggatcacctatgttctcatcgtggtgagcaactcactgctcttacacatgctccttccgctcttctttcaaatcaactaatcgctttgtctcttcctgtttttagaactttgttggcaagtctccttttcccttacacacgcattcaagcatgtacctgaccggcgccagctctctttttcactgtagccttttgcctggctgcactgtcgttcgtgataggattgatcgctcattgtgggcagttcggaatgaccatcttatcctctattgtagctgtaggtcttctctacctatccaccgcgtttcgttctgaccaagagctgacggagtctctaaacgtattcaccgcttgctgtagggtatcggtgcttccgtcggttcgtacttatcaattttctctctacaacgaaaccgaacttgacgtcaacatgttcggtttcaaatgttctattctacccgatcagccatggtggctttcggcttcgatatagtcctcttctttcttgcaaagaaacgaatcaactccctgtcaggcgcatcatcctctatcgggatgtccacctggctcgttcttgccggttggatctgcttgatgttttctggatgtgctttcgggtttggtcgtcgatgcattcagagtagaggtcctcgggaccccgacggtggagcacgtggtcgaaaggtcaatcccgatgatgcttacgacgaacaaatcagacaggacgccttccagcaggagcaagatcgaaaatacagactcgccaatggagatatggctggccagggaggagtcggtaatccgaaccatcttcctggcttccaaccctacgagactatcccacttacctcgaccggaaacagaggtcaggggacggatcaatggttggaggaggaggacgagcaggacgagcgagatctcggcgttggagggaacgcagctcatctaggctacagagatcaagctgagaacccttacgcggctggagccgtcggtgttggcgctggaaacgcatacgctggatcgattgcagggaggagtgaagtagcaagttacgcgatgggcggtttcaacgcaggcagaggagctggtggtagaggattggatcaaggtgcaccctacggtcagcccggtgggttgaccagaagagagagcgatgactttgcggccggtcaggccacaccaggtggctatccttccgttaccgaggccggccaagattgttagtttccttttcgttttgtttctcccttactcttagcgtcttttcccttccaattcgctaaataattttgggcttctgtaaccactcctctccttcctcttagattaccaagccgaaccgtactcggatccttacgcccagccgtaccgtcaaccatacaactctgcctccacgtcaccccctccaaaccgattcttctcgccaacgaccactgcgtcccactatgatacatactcttcgccacagctacagcaatcccaacagcagccagaccgacaagtctctccagccatgcatgcacctgcccctcaaaggttagctgaccctcaaggaaactcttatgcgaattttttagatgttcagcatcacgatcagtacgttaccagcgaagccagcggtagcggtggtattgagagaggactggatggggagggagtgaccggaccagaacccccgaggtatgaactcactgctacacctggattctcatccgatccctcgagtggttatagacaggaaaaaagcgcgttcacagggtatccttgatttttttttgttatggatttgtttctcctcttgctatctcgttcgtcttcttgttattgggtcttctacttttctctctctctctctcctcatcgatctgttcttgtcttctatctttcctccatatcttctttttgtcttggtcaagaaagagtcaaaacaatctaattggaccgaagatcagaacgatctcgttgtctttttttcctctcttgtcccagctctcttttccttccctttgttcttcttcgcttttcttgtctttgaatactggctattccacctctttctttctttttctttattcacggacaaacaaacttggttttcgatctcttttgctttatgggatgtgattgtacgatgtcaaagcatgttttctcaaagacccttcaataaatcgacattgcatggttgtttcttttgccgtctaccatctagcgccttccaggcaaggtcttgcctgttggatagatcatgtgagtcgtaaaaaataaataagaagaacaagaggagaacataacatgccttttgcggatgaaattctcaggcgggctcaaaaaaatcaacgatgatgacgatgacgttttttttttgttctttttaaaaaaaatagtgatagacgccaactgaaactcggaactcattcgactttctgtgttctttctttccttttgagaagcagttcctcctcatcctatacatcatatagagacaaacgacgagcgagcatgaatatgaatcttaactatggcataagcttaggtttgagagattcaggtgacagttggcaagaagagcgcgcatctgatcatctggaagggtgaacgatagatttcattagcgccaagcaagtttcaagtctccctccgatcacacaattcgagaccgccaaatataaggatccttccttgccttcatagccaaagcctcatttacttcgccaccatcataaacatatcgactaactggccaatcatcagtaaaaaatgactaaaccatcaaacgtgttgaccgtcgctttcttggcttgtgacaagatacctgaggaatctgaagctgctcatggagagtacgccggtatgtttcccctatgaacacgttgggctgattgaacacattgggctgattgaaccacgttatcgatcacgcttctcctatcttcttcttcttaacgtttatttattccgatcaagatgtcctccataacctttttgagccacatatccctgatcatttgaatctagagacacgcaactatgatgttgtgaacgctagaaagtacccaacagaagccgaactcgaccagatcgacgccatcgtgatctctggctcgttcgaggatgacgctgacaaggacacgacttggatcctccgtctcgctgggttccttatccgtgtgaaggatgattatccgaggatcagaatgattggcatttgtttcggcctacagatcatcgctagagctttcgggccgagtttaatcgaaaagaacgagaaaggatgggaggtcggtagcacaaaagtcaacttgacgaagttaggaaagagaattatctgggatctatcggatgacgatgaagaggagggagtcgatgttcgaggtcatatcgttcgtctgtctttgttgaactatggtgtaaagccgaccatggctcaaatacatcaattcggttttcatggtcctcctcggctcgcctacagatgatgcaacagatccattccgatatcgttcgagaggtgccagagaattttgagttactcgcatactctgaacttacgcctatccaaggcatagtcaacttttacgattcagaagacgttccacctttcactcattcggaagctcataccttaccggatgatccatggagaaaaatacatatcatcgcttttcagggttcgttcatcttcgcatgtgtacgatcctgtcggagtatgctgtgatactgacgcattctttcttggtctgggatgactgaactctgggatcttctaggtcatccagagtggtgcgcgctcttttcgctctcactaccctggtcatctccgtgctaaccttatcaaccctgctatgtgttgcttttcccgtcaactatattaggcatgacgggattttggtccctctaattgataactacgagaaggacgggacgttcgacaaagagtttgcgaaagacgcaagggaacggtccagacagcatcacgatggcaaacgactcggtcaggttcttcttcgagttcttggagttgcctagcgcgattgctctgattctgtcgagagtgtttggggaaagagaaagaagaaagattttgtagatgaataatctgtatgatgtaatgtatctgcgctactcaaacttcggtcaggagtttttgctccggccggaaaaacacgtggcggatttcagagagaactatcgtttgactatcgttttctcctccaacccatctccctgtatacatctcgtgtctccatagaaaagaaagatgaagatgaggacaagaactgacgatcaagacccattgataccgacaagtacagctcgcagtcaattatggacggtacccataaaagatcgaccgaaatcccacggttcttggttctcggtaaagcccatactttccgatcctttgaatgccattctgttcgtctgagttgaacatgtctctctttccatatgggtgcagtacattgtctttccgatcgtgtttaatataggaatcttgtctatcaacacgacccaactcttgtgtgcgtgtgtgtttcctcatttataaaggtcataacaccgtctaactctcacgaaggtttctttctctaaactcaaggctggccactggctatccttccaccgacacgtccgctgtattacaagattcttcgctccacaaaatcatcctggtgctctctcatactccttatctccatcttgttcggtccaacctcgctcgtgttgacagctggagagggaatagatcttgatgatatcgtcgtcaggcgggataagacagatgatagggtaattgggctggatcttccaaaacgggcggtcgtcatgggaaaccatcaggtttgttcccgactctctttcctttttcatgtaacacttttcgatagttctcctctgtctagctatgctaaactcgtccgtgtatataggcgtacacggattggttgtatatctgggtgcttggttattttgctggtactgccgatggagtctatatcttgctcaagaagagtctcaaatggattcctttcgtcggatggggttgccaattttttgattttctattccttgcccggtaagtctcttcatacgggcttgattctgtttgcttttctgttgtctcgtgactaacgactgattatatcagtcggtgggctcaggacaaaggtccattgttcaagtatctgaatcgattgagtacggagtctgtcaagaatcatgatcctatctggatgatggtcttcccggaagggacgattgtaagcgaccaagaacgagcaaactcgagcgcgtacgccaagaagcaagatatcgttcgtccatccttgcatcctttccttgccttccccgtgcatttattcatcagcacatctcttgaattcatttggtctccaaggacgataccatcaatgtactactccctcactcgctaggtcttcaaacgattctgcaccaattatcacaaaacctaccttctctccccgtgctcgatattactattggctaccccggcgtacctcccgctggtgcagctcaagagtatcacaatctgttctcaatcttccatcgttccgttccgccgcccgcggtccatatgcacctaaggatgtatgactctgctcagatccctctgggcgcgcaaggtggagagtctacatcagacagagaagcatttggagcctggctgttggaacgatggagggaaaaggatcggctgatggcagcctactatcgagacggcgtgtttcctacccaagaatcggagcaaggagtacaaggaggaagtatagaagttcctgttcgattcaggtcaaattgggaggcaggcaacgcgctctgttggggtttccccttggtcggccttccggtcgtatggggtatcttgggctggggagtctggaaattagttactggttaaagtgcgcctccatgagttgtattcagagtatatcttatctagaatgaacatgaggcatagggtaaatatccaagagaggttgctgtcaagatgatgtggtgaagatttgaataggctttagagaggaacatttatgtttgtcggcaccgcccgaacaccaaacaccttcatactcacccatcaccatcacttccaaccacaacgacgatagattgttgtacgcttgcagtatttctctacagccactcggaaagaccatatcaataagtgcaagctccagccagatatttacatcctttaacataacgacatacgaaagctatggccaacaacagacccagctcggcagataatgaagtcgtttttgatcaatcaacagaagacgaatgggattctaactcggtcgtcgacccagagcgtggacacgaacgttcgcctggagaaggatatcccacacaggacgggttgattcctttattctctctctcttgccgcttcctttgatgttggatgaatgctcacgcacgacctcgctttcggcttgctcgggatggtgcgactatcacaggccattaggttctcaatataggctttcccgaccagaagtcatcaaagggtttgcaaagtaagtcatcctgcttagagatccatctgtaatcacatcttaaaaagaaacgcaaagtgctctaacactcggttgggcggggtggaattttttcttcttggaaatcactatagtcgtatagttcattcggttcgttcatatatggctggtggacataacattcattctgctgaaggctcatgcttgttctatgatcttgggaatcggtttatgtgactcacagagatcatatatcatcttatatgtttgtcctcttcactcgaagattttaataatcgaggcgatcaactagcttatatacttgtcttgctctcctctaacaactctttggatgatacagctaggaatggccgctctatcgatcaccaccgtcgttctctctctacaaagtgaatgtccaccaatctcgttttatatcttggaagtagtagtgaatctggtgatgatccttgaagtaggaatcaggctcgtcgcgttcggtcgagttcgttcgcctttctctgattaacctcgccaatcgccgtcctctgactgactcgtgtttcaacctcctttcctcctcttctgggacgcatctgcgttatcttcatttcaactcaagcaattttaccaatcaatattcaaccttctagatctattgatcacgttgttctgtatcattactctactcgtcgtattttggacaccttgtagtagtcgagaggaagtcctggatgatgtgatcctcgttgttaggaatgtgtttcaattcggacggctggctgtgttgatgagaaggtgcgccgatttccttccgattacctcctctctctcgcgcatgattatggaatacctctaatcttgtattcttgtctttactatgatgatcaatctggccaatgtcatttagatccgggacatcccttctgacaaatccgacaccgatagatctttcctcggcccgtcaagcagcttatgcgctcgatcttgatctcgaggacgaagaggctggtcgactgattaccggggcgagagctggctcggtaggaggagacggcgcggggtatgtaccggtacaagctgagcctcctaggaggggggttggaccggtgggtggtgatagaggaagagacgggttgacggaagatgacgaggacatgtgggatcgattgagttaatatagagggagatctggaagagaaatgagataccccgtttgcaccttctcttctctcgatccctctgggttcaatccggcttttggtcatatatgaatggtttctttcaggataattcagactcgattcaaacttggctaggtaaacttcaaaacagctcaaagacctcatatgtttgtgtgatcggacaagaagacatggatctaagattttgatagacgcaaccttaaaactccacaccctcctcaacagcctccttgacacctctcgcaatcctctgtctttctctccatagttgcctgacagattgtactgaaaacttccattctccttcttccgcctcttctgctctctccacgcttgcgacaaggccatccagtgtgctctctccctcggcggcttcgatctcgacggctgtacatatccgcgcgagctcggatcggacggaggattcattagcgtcggatacgaaaggtaagtaaccgaggatagtgtcacgccatgcttggatgtctgtcgaggagcttgaaggaacaggaagtaggaggagacggagagcggtgatgaggttgtgggatggatgaggtgtagaagagagatgcaacgtgtattgtctgtttggtccatcatagaaaacgacgaaaacgatatcagaacagaaagaagggagagggatacctctacacgggatgagaaggacataagaagtaaaccttacccccagtacctttcttcctccaagatttccttccgtttcgcaccttcggaccccaaactactgacaatctcttcgacccatcgatcgacacaaacctcgttccactcgttcccacctcgaccttcttcgtcaggcggatagcacacgaatccatactctgccatcaagaacccgtcctcatggggcccatactgtagcaacacttctcgctttgagtcgttctgtccatccgatctcgggtccggctgatcttctgaagcaggaaggacgtaagtactcgctttcgaagcgggaacagacgaagggagtgtacaaggaatgggcgtcgaggaggaagaatggttcgccatgtcgaggatgggcgcgagagtgagatcatttgtgccggaggaaggctcgagcagcagagggaacgagagacatcgagtgttaacattcaaccaggcccagagaagggagctctgagaaagagaggttgataagtctgttgaagagtatgttgggtgggttttctatggagaagaaaagaggaagaaggaggtcagaacaaagcgcaatgagaaagcagtttatcagagatcaaagatactgaacaaaaagaactaaaggatagaatacgcaccaacactgtcttcaacactttcacatcttcccaaaaccttttttcaacgtcttgaaccaatctccgcacctccttcggcaagaaacgttctagatctctccacctcttcattcctggagcctcctgatctccctcttgatctacctcggcaacaagccatgtcaaagggtgatgccatctgaaactttgtggaagaaccttcaaaaaaggtgcccaaggatcctgggtactgagagagcttaaagccggttgattcgggttgtgcaatgctagatggagggtgacaagctgagtggctgtcaacggatagatctcgtcgggttctccgtcctcagtctgcgctttctcgagggaagtcttcgatcggctagaactcgctttctttgatttcgttaacggtagaggcgtgaattgggacggataatgggttcgaagagtgtgcgcattgatgagtgctgatgtaggtatggagagaacgttgcttggaggagcgaacttgttataagggaagcttgccgtttggtagattcctctaccggcgccttggagacagacgaaagaaagaaggaagcaagaagtcgagttcaatcagatgttcattgaaaaggacgcgaggaaaactcaccgcagctttacgcaccagggatttcttcacacgacacatagaggttttccatgccatgttcttcggtgagccatctgatcagactctgccagtcttgctcgagggtggaggaggacggagaagaagtggtcatcgttgttggcaagtatacacgctggtcgatgttgtcgtcgggggaaaaaaggaaagttgttagggttcaaacttttcgttcacaatcttatcagtcaaaatttttatctcaattttcaatcgtccatcaacaatcaaccatccagccgacaaaattgcaaacatggtcgctccaaaactgtccaagaaggaacaaaaagctgcaaaacatcaccctaaaggatccaaaggaaaaggaaaggcggaagagcccgaggatttcatcggggatgaagacgacgaagaggagactgttgaaaacttgactgctcagatcgaggctgtcaaggctaagaagagtaaagaaagcggaaagaaggtcggaccggcagtaaagaaggatcaaaaagagaagcctatcactacctctgctgctgagggtgacgaaaagacagcagagccgaaaaagaagatggcaaagtctcggttcatcttgtttgtcggtgggtgttgttcttgagctctttttttctatttctcttcagaaggcagtatacgtgtgcggttctttgaacctaatcttttcatcaacttgctctacgcatgctatctttatctaacaggtaaccttcctcgagatgccaaagtggtcgatgtggaagaattcttcgaggataaggtcaaggaaaaacctcaagttcgactattgacggagaagcctcagcctggtcaaccaaaaaattcaggcaagagtcgaggaatcgcctttattgagtcagtcattctcatatgattacttttctcacatgatccaaccactaaaccaaagaaacatcttcctgctggttcaaacatttccctaatcaaacaggtttaaagccgccccaccgcaccaagccgctctccttcttcaccagtctcccttcccacactctaccaaactgctcaacatcgagctaaccactggtggcggaggagccggagagaaccgaaaggccaagatcaccaagaagaacgaagagatgaggaaagagctcggtatgggaggcgctttggcatccgctatggagaatggctctggaggcaaacgatcgagggacgatgcaggtgataatggatcgtatcctgcggtgtctggtaaagggtgggaggatggagaggaacgaagaaagaaggtcagaagaggtggaggaggtgaatcctccgaccggggtggaaggggtggaagcagagg

SEQ ID NO: 2038 - DNA, 6944 bp, Xanthophyllomyces dendrorhous
cagaggtggaggtggaggcagaggtggaggtggaggaggtggaagaggtggaagaggtggtttcggttcaggcgccaacaggggtggtcagggagctgccccgatacggaagtggggagctactggtgctaattccgctcctcttggatagacatgacgtcttttgtccatgatctgtcaaacttcggtgtcaagataatcacgagagtacagtagtcatattatctcgcatcttttatacttattacagagccaaggaggagtatcgcaaggcattgattactatattatgagaaggaagaccattgaaccctgtcgatcttcagaaccctccaaatagatccattacgaccttgcccgccagttcttttcgctcgtcctcatcctctactttcatcaattcctctctgagtgctctgagcgagtgaaacgtactcgttaaatccgagtcctcaagttccccattctctggcggaggtttgaagcttgacgagacacttgacgacgttggaacgttcaaagacgagtttattagagagggcgtgaacgtatctgaaaactgacggtcttgaggagtgggatctgggcggagatgctgaggcggtagattgaacggatcgagggaagagctcgacgacatggtacgaattggtgacaagtccgaggaggggccagctaccgttgttgtcattgccggtatcgacgctagaaatgaggaagaatgttgatcgggaaacgactcccaattatcttcacggacatccattgctaggggttcggtggattgtttgaatttccagctgttagcctcatttccaccccgttcaaattcctcctccattcccatggccagttgtactgcgctctgaagttccccaaactcgtcgtcatccccggcggctggattgacaccatctccctcgagggagacataccctggttcgtctccatcaagaacctcctcatcagaatcggagaagaaagacttctcggcatcttcaagcgaaggcgattgagatggcaaccgattgagtgtcggcgggggagatagtccaagggagaaagaggtactagacatgtcggacaatgccgatgggcccgttgctttgagcgtaagtgaaggccaaatgtgagtttggagggtttgaagaatttgttcatggggaggtaaatctgttggggaccaagagtacagtgagatacgtgatcaaccatctagctttttggaacccatagcatagaagtacatactacgggcaacttcatcttcatctagaggagcacattcttcaatgacttcgatattttgctcatcgaatgcatgaacaagtttaggcggtagctcagtcagagatccatcggaggacgacgttcggattgctaaggaaacatcaggttcgttcgtctgaagaattgcttgaatctgaggaggaactccattgtatgcttcagtggttgatataacctgttggtaatatccatggtttctttgtcagcaagatataggaagaaacaaaacaaggcgcagatcaaatgaacagaacacacttcaggcaataaatatattagcaccgggatctcctcttcctcgtcgatctcccaactgactcctggttccccttgggcgactatcctaacgacgaaccagacatctgctgagtagtacttgttatcgatcttcaaagggacgtagtaaccatggtcttgatcacgactaaaagaagcgcgtgtcgaagcatgtgagagcaggcctgaagacgcgagtgcaagtgagtcaatcagacagacaaaacagaaacccgatcaatacgaggctgaagtatgatatgatatgaggaaacagaaaggtaacagagacgcttacgagtcagaaattctgttgcctgactctcagaatgggtatataccagtatcgagctctcaggtgtaggggtatccatgcttgacaacaaaggagctcaagagacgaggcactgagagatccaagatgacggtcggaggatggagagaaggtgagattgtgggtgtggaggaatgggcaggtatttcaacaaaaccccaattatgcccaagtcaaatgggctgatcgggggtggctcaggtcacgtgatccgtacgcgttcctcattaaacatacacgaccaaagctagacctcatcctatctcgtcctaactgaccatgtcttctttctagccgagcccagatagaaaggatccaaggagacggtgagtgtggattgtgttgtgtttggtgtggcttgataggtcgcattctttcttccgttcgctcacatctttgtttcagtgttcccaatccttcttcgtcgcgaccgcgtccagtcaagacatgcagcaggactccctacctcgaaccagatcgtctcaaaagcgtcatcgatctcaatcttcgtctcaagagaccaactttgaggaaaccttctcttacaaccaatcagaagtactcgttcctccccctgttgtccgggacaatggggtcttccaagctatagggtccagctcccagtctcagcggctccctcggaatatgtcgatagtcaatccttctcgaccatcttctacattgggtccaatacgctctaaaagcatggttccagaagttctgtaagcatgccagaaaatttgaacaaggtatagatggagaagccacttactccccttgtttccgcgatttgtagttctgccgctgtggacaaggaatctctgtcgaagtcgtcttacggatcgcagtcccaacctatctcatacgatcaaacgagtgtctacgatcaatcgctatctcaatgcattcattcattcgccagagacccaggagtacttcaagctctaggctataactcccaaattacccattcagatcataccatatatccatatagcgccccggccaacgttatctcggacgagacttttccacgaagccttttcaatcctgctctcgaagaaagcctccttgaactcgacacatcaatcactcaaggcttggagagtccatccaagtcaagccatcctccaagattacctagtccggctccaacgaattcagatcgtcaatcgtcagactctcctgccagtgtacccagtgcttttgctccttccactacacctcctcttctcccggatgatccttcccaaacaaaagacctccgatcacatgttctttcatcattcgtcggttttgacggaactcgatcgtatctttcgtcagactcaactgtttcgaaagacattactctggatgagagtggctggacagagggcagcgccggagctgagaacaaaatggagcgtggagaagaagaggaagactccgctgttttttacgagaaaacattcgatgcatccagttctctcaagggaactcaacaaacacaaaccaacgaatgggagaccacgccggcgagaacccaagtggacacccaagtagatcctcagaacgtcggaacagaatatcagcaagcactctctcctttaaagaaggggggttcttcgaagaaccgtattttcgagggttctctattggagagaagtgtagcggaggatcgagcaaagaggtcactcgtttcactcaacaagcgacgaaggattaattcaccaaaagactacgaatccaatccttttctcccgttgaagatacaaaaaaacgcgcccgttgctaacttccatcatgctctagatacccccaagcgtccagaacaatttcccgcaacatcgtccaaacagacgattgtgaccttacacgtacgctctcccggactcgccttgacgagcgaagatacgttcatcccagcgacctcatctccattgcatgtagactcgtattcccggtcgaacttgtcagagggcaatcacgagacgttcaattcttccgacgtagaagacgccacaaacctatctaagcccatgattcatcatccctcatcatcaggattctcttccagaccatcgacttggtcaagtgtgcttgacaagtctaaacctactggttcatctcatgtcaaagacctgcctcgatcgctgctagctgatgaagccgttcaaactcagtcaacattgtcttctcttccccccagctcactttccgtgcccgttcacactcaacctacatcattggttccatctttcatatattcctcgcccgataaagcagacatcagcgacaagggtggcaaggaggaggaagaagaagaacaacaacaacagaaggaggaagacgaatatgtttttggatcaactctccctcctcaacaacttgtgtccacccaatcttctgagctctccaacccacccccatcacgtgcagtaagcaaatcacaggtaacacagaacaaccaagggacactagaatcagacagcagtctcagtacgatccccagtgaaacagaatcatctctatccgaactattgactatagaagcggatcacgggatgaacagtggtcagagtgaagaaatgcgtgtcgatgaagacgttcaaatgcgaaggacacgtagtgctgataagaaggagaccgcgactgctagttcgctcataagaaccagacagcgaaccaaaggaaaacctgggctaccagatgctccaacagtatcatctcttactggttagtagtacttgtcgcgctcctgttcaatatctttttacaagatcttgattcagatctctcctctcgctggttagatccacctcactcgaaacgagttcaagattcagataggacgcttccaaattctcaaccacccaaacaatccatctccaatccgaccaccatcagaatgacacgatgcagaggtcaattgcgtctgggatctagatctgctagtcattcttcgagcttcaaggccaagcaatctaacgaaaaagacgatgactgtgccgacagcgaccagggagaagagggaagagacgacactatcgaatgcgcggatgatacggtgtggagaacagaaggattctcggcgacggctttatctatggccacagcgatgaccacaaggagcggaaatgctagaccgttatctgcgatgcctactattgatgttccgaggcgaacgcgactcgtttccagcgagtctagtcgactaagaaggacgtcaactgagcgtccatcagtagacgacttgcaactgcaacaactctttgcttcgggtagggtacagagagtatttggattgtacaaagattctggatcattctggccgttagttcatcctaagaaacagaaagctgatctgactgttgtcgacgctgcgctaatgtgtgtctttaaatttcttcatctatcacaacagagggatgatcgttgaagccagattctttggcgactaccttctaaattgggacgagccaaattcaaagccttcgaacatcaacattagagacctccgaaaatgcatgcttcgaaaaggagacgttgtttggtcaagctcaaatggagcacatcaattcattgttgccgaagactacgattctcccgaagggatcggtcccgatacagagatcagtgtgtctcttcctgatcaggtgctcgaaagaacactgagagggaaagtgactctaaagatgagggatatcgtgatagataggttgaatgtgcctcagatggacgatcgcaagctcttcacagaagacatgtacgttcaagaaccggcgttgttgactttccgaccacccgtcacacctagaaccaccatgcctgtttcgagctccaatccatcggcaacgggctcagggacagccagagcttcgtctcctattaaaaacactcgtcgaagcgggagcgtggacgacgtggctcgtccgaccaaaccgggatgtttcgcaggatatggcttcatcttcaccacacctacgttgaccgaaatcgaacggtcaaagattcaaaatacgatcgtcgaaaacggaggactcgtagggaacgacttccaaaatttctaccatgtcataaacagttcagacaccacgtcgattcaagaagaactcatatacagaaaggaaaggaaacaggacgatctaaaagcagtcttcgtattggcagagcaaccgtgtaggacaccaaaatatctgaaggcgttggctttgggtattccctgcttggcgacgagttatatccagaacgccgtatcaaatgtgagtgatatttcttgatagtatcaatcttgttcccgatgaattctcatgagccgctgttttctccgaatgatagggtgacggttggcgaggatacatgttgtccaccccattctcagagcacctcaaagcattcggttctcaacagtttgttcacccaagttggtcggtcgacagatccatcgttaagactctgatcttatcgacgccaagttatatacatcgaccgtttacgaatctgacaatgttgtatctgaaccctaagaagaatgaacgagtatgtatctcctttttgttttctttttattttctgactagagttcatggttgctgagggtcaatactctctgttcccttctaccacacgtgtaggaactagtcgtctttctttgtatagcactaggcgctaaatcgataactacaacttcggacttatctgatccttccctatcattcatatttaaatcgttcgatatcctggttgtcaaggatgacctcaaaccgtttccttcgagaacgacagtaggcaagaagagtgggaggttggagattgttaatgaagaatgggtgaaacaatgctcgatcgtcggtcaacaggttcgttcgtcgtctttgtgtggacctgttctctcgtcctacccatttttcctttccccctacaaaaatctgaccctttctgagatttactcctctgtctcttgcacatgggtgtgacttccaggtcaaacgtatgccgtggaaagtaacttcgaagaaatgaagagagaacaaaaactcaatcgtctatccgtctatccgtc

SEQ ID NO: 2039 - DNA, 6657 bp, Xanthophyllomyces dendrorhous
atccgtctatccgtctatcctgtccccttcttcttctctcctttgctttctctttcgtttcttcttggttgtttccatttttgaaaacatgttatggatgggttgtatcattcttttcccttcatttgtacttgttctgttttagttttgttatccttcgttcttttctgtcctcttttctttcttttcagtctgggtctatagtcaataggcgaagctaagaaaatctaatcataacaaacaattccttcatgcaacgaatgaatggagaacgagccacaaatgtatattgaaacgaagaaaaaaagaaaagtcaaagacgaagagaagaagggagtaagggagcaggtaaaggattcatatggtagaagaaaagagaaaaaatctgattgatacatagacttgagaaatctttggtgcaaagaaaaggagtgttaaaccggaaagagatacaacgaagatgagacccagaaataagagatatgtagagaagaataaggaaggccaaacaaagcaaaagaaagaaagaagtcttcttaaacagcgacctcggtccgtttctcgtctaaaagttccatctcctgttctccatccttcttaccctcctccccttgctcttccaccacagctctccatttttgattgatcccaaccaaaagcgccttgatgagctcgatatgctttccagcttccagccctgccccagagagagtcgactgagactgggtggtctcgtcctcgttcaaaggtctgcttatagttatgggagaagcctgggtggaagaagaagacgaagcagctagtcgaagagtgtttaatcccccaacaatgtcttccgttccggatggtctcctcagatgaatatctttaagcggtcgagtgtccatcggtgcaattgagactctctctgattgggctggaattcgggagaaggaaggataaattgaagagatcgaaggaagcgtctgcgtccggggcgatgactgtttcgtctttgaggtggacgacaaagaggcaagaggaggaggggtggaggatttactgatcgtggatcgaagatcggagtaggcggtggtcgaccgtcggccagcatcgaacgatggggtggaagctcttgaggaaggcgaagccggcgaagccgatcggctatgcgatccatctcgagaggaaccatcatggtgagcggtcgcatcagatgaagcggcggatgagtcgatcgaatgctgtcgaggtcgatagggaggaagcaagtctgggttgttgatcgagggaagcttgagggattccgcttcgggataaccaaacggtccacccttcatggccacgtccgaaggagacctctcctcggccgagtctggttcatcctcagtcttactttgcttcttgatcgactttcgctcatgctcatccaccttggacgttgacagaggagctccggcctgtagaggctccattgctctatacgaccttaagtcacctccccaagaaggaacaagcccgacgctgacggatgctcctctaggtttggcgagcgaactgaacgaaagcgcaggatgggtaattccatcgaacaacgtgcttgagtcttctggcgaagaaccagcggtcacgccttcgccgacaatcgagagcggggaaagtccgtgcgaggaaggcggagagaaagcagtgtggtttgagaacgcgtctgaagaactgctggattggtagccagacgatctgtgctgaagcgaggcttggtgagacagatgaggcgatgagttcaaggaggaagagtccgtcgaatcgtaggaagactcggctgctctaggagaatcagcgttcaagtgggtagccgtctggaagagaggcgcgttttgaagcaaggtctgcataccaagcccagtctggtttgttccacggctgatggcggtcggggcagacccagatcgattctggttggaaggaagatgagcaatcggtcggtgggcatctgatcccactctgatagtcggctgttgagggtaaagcgacgagtaagactgctgttgctgctgctgctgctgctgctgctgctgttgctggtcgagattctgcgggtacaagttcaagtcagataacgacgggtacatcatctgctgtcgctgtggctggttgttcagggtctgccgctgatgaagactctgttgctgttgctggagcatctgtaactgcaatcggtggttttcgatttggtgctgcaactgcatgtcggcattcaataccccaggatccaaaccgggcatcccggtcagtcccagttctgccagcagggccgggtcaaactgctgtgctcccagtacgttcttggcgtcttcctctggtcgaggcccgccgactaaagccggctgctgatgctgctgctgctggtactgattgtttccgttctgtccttgtacggccatagcgccgactaggagattgaacaagaatgtattggtctgagcgacctcttcttcatttcggaactctgggatcaagcttggcggtgcctgggaaaacaagtccaagtagttctgattcgtttgattgaggtttgtcgagattggctgctgggactgaagagacttgtgctgggaggtcctgttcaaagcatgcggttcgcttgagtgatatgacgggacgtaagaaggcaaagcaccatttgtacccgacaacgatttgagttgagactgaacaagataggaagcattggcgggtaaaccggtagaaacagaggctcctccgtgctggttactcgtcaagttgcgagacaactcttccaatcggagcgccatgtctataagagaaaacagagggagaacaacttttagtctggtaacgaacccataggccagagactttcaggactcactttgatcgtatgtaggctcgacccgtctcttcttaacgtcatcaaaaaatccgtcaaactcgagtcctctcttctggccgaggaactgaggttgctgtccgtgtgctcctccatagccgtgcgttgcaaaagggtgactatcggaccggaggtagttttggttgaagggatgtacgagaggcccttgactaagagatccagggcccgtggaaggatagagattctgggcaaacggatagacctggttggggatttgagggtaagcgttcatggaggacaaaccgtccaacggaggtggagtcgtcaaagatgaggtggatgccgagttcggcgacagggaagacgagcttggagaagaaaagtctacagagaggcgttcgaatgagcctggaatcacgaagagaaaaaacatgagtaaggatgtaatagtacgtaccaggctgttggggatcctcggacagtcgcttcttcttttcaagactcggccttctcgaactagcagaaccagcactcgaacggcgttcctttgcagaagatccaaagtccggatcatctgcaacagccgccttggagtatttatggacggtgtgatgttcctgagtatggattcgctcatgctttttgagatcttgaggtcgcttgaacgtcttgttacagatctaaaagtgttcgaaacaaagagagtaggacgggatcgtgagcaacctgagaaaacaaaggagataagaacaggaaagatgaacagagacgaacggcacatgagtgtggcttcaaaggcgtatgaactgtggcaaagtggaagagttgtaaacagaggatgacatcagatctctgaacagaacaacagcggcagacgatggatggtagacagatgaagagaagggaacccatggcatagagggacgatgacgacgaacctcggaggtgagaagtgatgtgatcccgctttgcacacgtaatctcgcagcccttccaatgacaagtcagacagagattctgagtcgactttcgcccgatatgactgcgaacgtgtaatcaaagatgatttgtcagctgagaacgagagaacataatgaaacgaggaaaaggagacctactcgttgcagagatggttgtagagtgtttccggatctggtgcaattttggtgcaacctacccagaggcagaggtgagtgtcctgctgctgctgagtctgggtgtgagcctgtgactgctgttgctgcatcgaggcgagattaagaatgtgtgaatggagccgagcagggagaaagaagagagctgtctattaattgtactatgtgaacaggcgagtgagtgagtgagtgggttggtgagtatggtggtcgttatgtgttctcctcaaagacaagaagaggaaaaagggagcaagaaagagaaggagaagaagaaggcaacagaagaggatgtttcttaagaggaaaaaatggccaagccatcgccaaggaaagaaagtttggcttggctacggctcagctttgaaaggttaataattcagctgcctctcgtcagacgccgagcgaagtgttaatcaccgacgtcgccgccacatagctgaacagccgacatggtgtgcagcgaattcatatctgagatcacgtgactttgaggttcagctcaacctaccaaccgccttccagcacagacaacagatcgtcctcgtttcatgttattggacttggccttactgcgagatacagaggttttagccgatcgtctacgactatggaggcgattcttatcttttcacttcagtctattcttgtacttctcttcaagtgctttgaaggtcaaccgtgcgttcctagtgcgtcattttcatatcatcaccctcataattcttctcattattctccttcttctccttgcctcactcctggtttatccatctcggttccacactcaaatcaaggctccagtcgagtaggatccctggggaagagactcgatcgtcggatgtttccgagctggtggtttgaatcaacatgagagaacgtggtcagcgttgattctaaagagacaagagaagaagaaagcgaaacccacgttaaggtagaactgcacgattcgctcgagaccgaaaccagcaccggcatgagggggtgctccgaatcggaaagcatcaacgtaacccttcatcgaatccgggtcaacatccttctctctcatcttttgacacaagaactcagcgtcgtggattcgttgagcaccagagaggatctcctctcctctcatgaagaagtcatacgagtttgagtagttggggtcggttgcatccggcatggtgtagaacggtcggatagcgagggggaatttgtcaagaataaagtagtcggtctgatacttctctcgaaccagcgctccaagcttcttctcgttcgctgtgctgtacggagcaaagacagaaaaaatgggcaaatgcatgtaagaccaatgaatatgaagagcaaaaattaggacggaaagaagaccaacctaagatcgtcgtaatctcccagctcagatccatcctcgttcttaacattagcttccctcaacatggcgatagcctccttgaaatgcaacttgacagtcttctcggggatcaagaactcttcggtcgggaattgcgttcgaacggtagcgacctccttcgcgtacgtggtcttgagctctttgaaaaggtagaggagcaagctatcgagcaactcgaggacctcatggtagtgggattcaaaagccatctcgagatccaacccagtgaattcggtcaaatgtcggtgtgtgttcgagttctccgctcggaaaactatgtgtcgagagcagatgaatagataaatgagtgatctcagtagatatgcatacacaagcaaataaataggacctaccaggagcaatctcgaaaaccctctccatatcaccagcgatacacatctgtttggccaactggggcgactgagccaagaaggcgggtcctccaaagtactcgaccttgaaaacggaagcaccagactcagtggctgctccctgaagctttggagtgtgaatctcgataaacctctgcttggtgaggaactctcggaaacattgtccaacggccgactggatcttgaagatcgccaaattggtgtcggtctagagtatatgcggaaaagaggtgtgccgcgtcagcaataacaaaaaggaaaaggggcaggcccgcccaaggcctgtaacacagatgaagacaggtctcactctaaggtcaatcactcggttgttcaatcgagtcgcgagagatacgctcgcatactgcgagtcttctttctcatagtcggcagccgaccgggaagcatcagcatacaacatagggagcgtcgcagagacctcaaccatagtgtgaatctgatagccattgaaataagagataatcgatgcgttcagatccgattacgagacctgctgataggctttcctctctgctgtacataccttcctgataacaatttcggcgttcttcacactggctcctcggacctcctcaaagggcgccttgacgactccctcgacaaggacaatgctctcggtagggatcgatgccgcatactttagcatctgctttgacacctgatgtgggtcggaagcatccttcgaaagctccataagagcctggatggaagacgactgctgtcgaagcgaaaggaagaccatcttggatcctttgaagtgtgtttatcgtcggtgatgcagtcaagcgctagtcagaagttgaggtagagggaaagaaacgagaaaaacaaaagaaaaag

SEQ ID NO: 2040 - DNA, 5418 bp, Xanthophyllomyces dendrorhous
gagaaaaacaaaagaaaaaggaagaaaactctcttaccctgggctcgagtagtggtgactctggctcggaagtagatggtctgtccgatgttggcctttgagatgtcggcgagctgggctcgctccctggtttctcgttcggccgactggtggagaggaagctttccgtagttttgcttagcaagatcctatttcagatgcaagaagatgggcaagcaagatgagcttcttttgcctcaaggataggtcaaaagatgttgagcaagaactgacgagatcgtccttctcctttcgcaacctggcctcctccttctctcgttcggcccgggcagcagctttggcagccttctcggcctccttagctcgcttcttaatttcgttcttggaaagaggctttccgtcctctctgtattgacgttgaccgatccgcgcgtaagattgttccagaccgaaggaggtagcagaacgaaagtagaaaacagggacaggataggatcagtatagagcggacgagattagaggagagaagatcaagggtctcacccaagaggaacatcaggcttggcttcaaccgcattgtcaatagcgggagcaggagtagtaggttgatcggacatgattaagaatgaatgtatgtgatgatggatatacgaagagaaaaattaaaaaaagaaagaaaaaagaaagccaagaaaaaagaacaggacagaacttagaggacagaagggaatatgatgcgtttacgagtcatagggttacggcgtaaatgcgtgacgttgtgacgttgtaaccaggtgcagctccatgaccactcaacctttaggcttaacaatcttagaccgaccgtgcccgagctcgactcggctggttggctgcggatgctgacgacaccgggaccataagggcccggcgacggcttggctgtgccctggaagagacgtcctgaccgtgtcgccttggctgcgtgaaacaatttgtgcgtgtgcgcaagtgtgggtgcgggcggcccgtgtatgtgtatatgatcctgacatgttcctgatcaggtcgttacctttttgctccttctttcccgttcctggtattctctttatttttaagttcgccgtgcctcatctacaccatcctgtcccctcttctacctctaccacccatctatccctatcgccatctctcctagcctcttcctgttagagaatggtcgccatcagtccatctcgcgaggtgctcgaattggtcaatccgcagatcacagcaacatcatcatcatcatcatcttctcctcggtcaggtcttcgtcatcataaatcactcacccagattctcgctcaacaacccaaagagagcgagatcaaaccggaggctgtcagagtctcttccgcatatctgcccaagccagcgtggtacaagaaggcctattggaaactctggtcggatggtggccgtcagcttgagaaagaccgtgggtcgcgcacagaacaagaacgtcaggccgaaagagacctcgtcagacaatgcgggacgtgggcaagagaaggatccggtgtagatccttcagacttgttccttgatgtgagtctgtccgtcttgagttgcttggtaccaaggcatgaggcagcaacctctcccgtattttcccttcttcacttgccggctgagctatggacggaatactggaacggaagcgagagacttgggaggttcatccaacgacctggcacatactgacgagagtcttttgtcatataaatagatctatggctctgttctccagacgctcaacacagacccaagagtcggcctcgtctctccctccctgttaggtgtcaccgggactgtaccgctcaccgtgatctctctgtaggtgcttatctctctatctctttcgtcacgtcaacatacgtccaaagttcaattcgctcacactccttgtctatgtgtgtgtgcagtatcccggacatcatcgcccatcatgctacgcttattacaaaggcacaacacgaagtccttctgtttacaaactattggcagccgtctaacagccagcgctcaatctgccaggctctcaagaccctttccggcaggcttggcaaagagatcactgagggcacccgtaaaggggacaaaaagataattgtaaaacttgtctatgacagaggtaccattagacaggtagatgctacaattcttcttctccgtcgttcttgatctcctttgtattcgtttgataattgcgtctaactctcttcacccatattttgcgttggcctacagttcatcaatcgacattcacccgtaccaccctcgctgtggccatctatcgatctgcctttacccgatgaaattcccaacctagatatgcaaggtaggagctcatatctactcagtttccaaatgatctttcaatgtacccctcactgactgatctcatacacgcgcgtgcgaacgtgtcacaatttccagtcctcaattatcatcgacctctcgtcggaacgtttcactcgaaattcctcgtcgtcgatcggtcggcagccatcctgtgcagtaacaatattcaggaccgaccaaatctggagatgatggttcatcttgaaggagaaattgtccagtcgctctacgataccgcgcttatctcgtttgcctcgacgctcaagccaacgcttcctctgcttagtctgcccccaccgacgctacccgacatcgaccggatgctgtttcaggaaaaaaacccctggctgagtgaaatacccttagtgggtgcagcagaggcagctaggcgattgatccggctgttgcacaagcagcagtctaaagacgaagaacagagaaaacgagaaaatgctccagagagaggtcggatgagaaatgtggtaagagggatgattgagcgaggtgtcgaggaaccagtcaaggagagcggaccgaactggttagaagagattgccgaagctgttgctaggcctatcgcctccagggcaaatagtagagcaaatagtagaggccccagtagaagaggcagtttcgattgtgtgtccaaactttctatctttttctccctttcttctgtcgcccccctcattgccactgacagatcgattccggtcaatttcttgcctaaatgtgatacagtccgacgatcacttccccagggcccccttggccaaacacatccacatcaacacactcacaaagatactcttcccgacctcactctcgacactgtgatctcaaatgctgcttcgcctccagtaaccactcggagccctgtcttctccgaaccattcggagctccttctcctacaaccgtcactaccgataccaccgttgtcggacatgccccggcgatcacttcgtctgatcaagtggcatctccagccgaactcgcccctccgcttcctcttccactcctgtctgactcattgtcttccaactccttccacaccacatccatctctcaagacgcccaccccgcggatagtccgagcacgccagatttgcttacgccagcagaatcggtagtagatgctccgtatgtctcagctattatcaacaagggagatggacaccagcagaccgtcgacgaacacgtacatccacgcgcagagggtgtaaggtttgcaaatgatggcgaagaaggcatgatcgataggtcctcgaatttagcagtcgggacagatgcatcgaacaaggagatcaacgcgttggcgataaacactggagcgggagataagaagaagttgaacaggttggagaagatgagtgaaaagctgagtgagtcggttcagctttcgactcgtgcgataatgagaaacaaagtactgatcgtgtgacctgccgcttctgacctttagacgccggtgtactttcagagcctaaacctactgtcgaggattctgacgcaatcgatcgtaaggagttttcttccttgaaatcactcatctgaagtttcattctccttatacacgacgttaacatttttgactcctttcaccttgtacattcatggttccgttcacgaagaatttatgcctcatatattccatgatcaacaccgacctgtaccaatgtgtcttgtcaatcgaggtcctcgaggggtaggttcttttcctctatatacacctttcaacgactatcatctgagccctttactcgtttcaatctcaattctccccatagttacctggtcaccaaaatctacgaacgccacagaatgctgcctggctcggcgccttcaggtttgcgcggaaaaaaatctttatccagaccccgactttcaatgcaaggccggcggtggaggctgcgctcgatgcctgccgaagaggaatagaggtgacgctctacctgggtctcgggttcaacgataaaggagaatctgtcagtacccttccattttcttctttcttttattcatctcagtcacgcacagatcctgacttccgttgtttcccatgtgtagatcccgttccaaggaggaacaaatcaagaagttgccataaggatgtatagacagcttaacaaagaaagaaaggcagaactcctgaagatcttctggtacgttggcaaggaccagagtcggccattgaatgcggccatcaaacagcgtaactgccatatcaaactctgtattgttgacgaccacgtcgggatgtgtggaaacgggtcagtgattttatccgctaccttcttatctattcctcttcatttctgcatatattgtaaaatcaagaaacaaagaatgagactgacaagacggtgtcatgcgctttctcttttttggtcatggtggttacggtcaatgtggaatgtaacagcaaccaagacacccagagttggttccactctcaagaagttaacgtcctcatcgattccgctcagatatgctcagactggatgcaagcgttaacatataatcaaaacacacacctgtacggacgacttgatgcaaaggatgggatttggagagatgagaagggtaggacggtagaagacttggatagactaaaacaggcttctgaatgaagtgttcactctcgtttctttactttctcttgtattgccactattcgaacacgcgtctcatgcgatgctttcttatcctctttcgtttttatgtaattccttctctatacacaccatatacactggcttctaccttcactctcttcgcttttttttatcttatcattgtcattatcgatttgtctctccgttcttatctttcctatacggctcaaacactcaaaaggtcacatacgtcacacagtagccttcctttccatacgtctcccaagcttctcggttttgaattccgaatcacaagctctgtctctatcgtttttcgctctaaccccggcataacaacctctttctatcctctcttctgtaaagatacacgtctcgttttgtagaagcgcaacg

SEQ ID NO: 2041 - DNA, 25332 bp, Xanthophyllomyces dendrorhous
cggcttccctcacttccgaatgaagacattcacccaagtgatcagacaatactacaaattcgattgaagagagcgttacttgtagatatacatgttgtggatgagaaaagagaaaagcagacgtgatgaaaccgatgtacacatatgaatagaatgtattttgatacacgaaagaagaaattgcagaagtcaagacatcagagatgagaaagagtagaaaaggttgaagacatacttaaggtgaaccataaaaccaagaggcaggaaggaagagacaaaagaggataaggcagaaggcagatacgctcagaatgatgtctcttcaagttcacgttgaacaacatcctcaatcgtcatcccatgtttcccatagcctttccattcatgtttagccactgttcctccaaacttctcgtcccacgccgatgacatcatctctggtttataggggtgccagctgtgatgtttgttgtgaagtaatcaaagcaaacaaagaagggttgcatgagtcagaaggatcttcttgctttgaagcacgcacagaggaaatgaggttgaagtctgaaagaaagaaacgtacgagacatcccgaacacaacgtgacgtcgatctatttcctctgaatgaatttccgttccattcactatccgctctagatggatcggcataatactcgtttttggtgccatctaccaaaggcgaggattgaaagcgatcgagaacttgcgctacccggccatcgaggttccaaatctattgagcgtatacgtgatgatgtacaagatagaatcagatagatatctatcttgcttcgacaaagaaagtagacaaaggataaacaaaacatacgtgaatcctaccgtcggttgaccctgagtagatatattgttgaccggttgtgttctctggggaaaaatgacatctgatcagtgtttgcacgaccgaatgtcctcggtaggtctggtcaaaccggaaagagagaaaatcacgatttagtcttgaagaatcatcctttgatatatacggtcattctgttgagtaagacaccataccatgatactacaatctccaggcgcagattgaaatcttggtttgggatacgctcctcgtctataatcccaaccggttccgtacttagatgccgcatcagggacattgtcgcatacagaggcaggagccatcgaacgaaggtcccaaagcttcaaagtttggtctttgccattcgatatgatgtatcgaccatctcctttagcagagaccgaagtgatcccttcagtatgaccgacaaagacaccagacggctttccagatgagagtgaccgtcgatccctgtaagaaagggcgggaaacatgttcagactgagagcaaacataacatcgtgaaagatcaaataaatgaacagagaaataaacgcttaccagactttaacatatccatcgtctccagacgaacaaagcaaatgcttgctacctttgtccgcccagcagacgctgttgacgtcatcttgatgtgcatgaacattcatggtcggttttttggcctcgatatcatatactagaagatttgatggctcatcaaaaggttagcaaagtagaacaatgtatgacatattgatgaaggacgaaccgacgatctttccatctccttgatattcgccactagcacccgcaaatatctcctttccgtcagccgagaacctgacagaccagatctaaataggtattgatgcaaaggtcaaccacatgtagcacaacattcaagtggaagagtacagaccgagacataatacatacccgaacgtaagaattcgctgctctcgagcgagaattcgtgctggagctgaaatcgagagactcaatctgtgtatcagaatctaatgggcggaacatttgcaccacaggtgactgccgatacagagaaagcagatctgaatgaggttatggttgacaaggcatgcatgataaaacaatagtagaacacaccatcgaggagtaaatcatccattcatcgtttgcgcctaggtctgcatcggtgactgtgtggatgttcaagatgatgatgagcttataaagatcacgcttgatagaaaggtcgaagatgatattcactcgtccaccctacatgagtcccttggaatcgtttcaagatcttcaaagagctctctccactacggccccgaatgccttcgtcacgatcatcgtcatatgttcctctgtgcgtcatcggtcttcttgaaaaccgactactaattggtggaggaggtggtcgaacgaacgggccagtggtaattgaaggggttgtggctgagtacagagtgagtttgaaatctaacaccatgaggaactcaagtcaaggaattaataactaatctgtggccacaaatgattcatgaactgagaaggagaaagattgtatgaccaaccccgagtagcggtatagaaaaattcggaattcgccgagtattgaccgcaataaggagcttcggttagattagctaccactgtcccagccgtgtttggaatacattcctgttttgaacaaggataagcgtcgttattattccgagcatcagagcctaacttgaaggatgaaccgcaccttgccaaaggtcgtcttgtgaaccttgcccatagatctctctcgaccccagacaagacctcctagtccttccttacttctgctacactctttcagccttccgactccaccaaactcgcccccgaaccttagcttcaacccttctttattgggctcggttttctgtccaaatgagttggaagtgatgtccggatcatcggcctcggagtaatatacatccacgtcgtcctcatctgttccttcgaaatcgtcgtcctcatcctcgttgtagtcagcgggggagccaaatatcgtattcaagttgataggtgcgccggtggatgcagcgttggaaactatcactcgaatgcgatcaatgatcccggtaggaacttgtcctgacgcagcactttgacgaagcgctgtcgcagaatttttgaagtaaacagtttagagaagcctaagagactgaacgttaggagatgatgcatgtactgaccagtcaagaatctaagcattgatgaactgttagatggtgtatttccgtccgactctgatcgcgcggcagctctcgtttccgatgtagttgctgatcgaacggtctgcccagtttcttcttcgtcttcatcttctgctctgttctccgaatcgatcaactccctcatcagcactccaaatgattctcctccctcgtcgtcttcgtcatcctcatcgcggttcctaccactccgcctactgcgagccaacaggtcacccacatcgtcatcatcatctaaaatccctctggcctctgcatcgatgagcgctctgaacatgacatcgtctggatccatgtctacgtctacgtcgacctcatcttcataatcagcatcgtcgtcttcatcatagaattcgtcgtcttcgtctccaccattgggtgtccagtcttctgtagcagtatgtgggatcggaggaagatagctctcgtctgccggcgataaggaccgcgataccgaactagatgccatgtttttctttactgaatcgatccgatctacagacggatcagaatcaggagcttactgatgttataaagagttaagagtctgctgtacaagcaaggatgagatgatggaagtggagggtgctagatatcgagagatggtcagttttatcggcgatcggatatcgccagttcgaaagtggaggtttccctgattagccccgactgaccccagatttgcccaaacataatcttaattgactaaaccatcaatattcgttcgcatacaactaacacactcgatcatagacaaacacaagactagacaaaagataacaacagatgacgacaggaaatcccagaagacaggatgacctgcagtaggaatacaacgacgacaaaaagtagaagaacgcatcacgaaagatcgctgtcgaaggaaagagggttctataccctggcctttgcccacaaggcagtcagcgccatccaggaggtgatcacactagaggatgaatagggattcagaatcagtactatgaatagcctgagagagaagaagagtagatagatgaagtggatgcattacccaatagctccgaccgtgccatcttgcagctcgacgagacccaagttcgaggcaggaatgaaggctatacgaaaggacgtcaccagatgattgaagacatgttaaatccaagagacattccattcttttgtaaacccggatcaacaagagacgaaccatcaagagagtcctgaacgatctgagtgaacaaagcggatctttgtctaccagatgtaaagaagcacagaaggatataataaactatttagtgtgtacatctccctctgaagtctgtgagagaggttacttacgcaaccaaggcctttgatctggctccatctcccttctcgttatcgaccgtcaagcttgctctcttggcctcctttcggaccttgacgaccccagcagcgcttgagatcaagctgagcaagattccagcaagccagaaccgctgagacacctttgaggtccgagcaaacttgtcaggatttaaattgaggaactttataccctgaaggtaaacaaccgaatcggtagtcaagtatccactaagacattgggaaggcacttggaaaattcagtatctcctccgtgcgctgcatatctatctatcagaaaggaccacttacgcgtaggcgacctgtcgagcaacttgagcgattcgctcaatctcggcagctttcccggcggaactagaaagattcgcgctgaagaagtagagaacaatgatcacgatatcgaagactagttagactacctcttcactctttacgggcgccaaagcagatattctttatcgtacgggggggcttgagttgctttgatagcgagctgactaaaattccgaatcagcagatagatagtcaaatcaccgtttcagcataaattctgacccatatccacgaaacatgaagcataagaaacttacaggtgctcaacaggtttgaaaacccgcatgactttgtgtcaattgcgatcaaagtcattgggtaaacctcaagtcagaaatgggcaaatggatggactcgcccggcgaaagaattctttccaaatgagtagaaacagatgccccgcttacgttttcttccgactgtaagaccacctttcagtccggtccatctgatggcaccctccttatcaccttgcctgagtaggtaccaggcgacgattctagcaaagtattgaatcaatcggtatagctatgtccaatcaaagaatgaatagagccaagtcgtcagcgaccgttatggagtgagtgaaacagacatggaagcatcttgctcactttgtctcgaccgacagtggtggagagtactttgagcgactgtgtcacctggggatgaaggatcagctgagcggggtacaacgcgagagacctatagacaaaagaagaaagagagattgatcaacagagacacacggctgaggctcgaacgagtctcatacatatcatcaaggcaacgcaggatactcacgacatggtagaagtatagttagctaaactgcagctctgagatacggaactgatgtaagtgagagacacaagagttgattgtagttgctctgtaaaagaatgtccgaagatggagcacaaagcacgcacagaccggcttgtggttacccgactgtcacgtgatgtcctgaccaagttttcctcacctctcccagaacaacttcacagcccttttcgttcggttcacacttttcaacactcacccttcctgcctttcggacacatccaacccttatctctctacgtccctcttccaggcctcgtcctttgttgtgttttgcaaacagggtcttacgacagaatttaaacacctagactgataacaatcaccatgtccgataacgaggagaactacggaaacgagtacgactattttctttgttcttgtgtccttcttgttgcggtgtatctttcgtcaagtacaaagagtttgaccgcaacaagtggattgagcctttatcatgtggctaactcacactctatcacatgatgccccgtctgcttcccttatgatcggtttggactgtaaagtcatgatgagcagatggtatgttccatgtacgcgcctgagttcgtactgtcttggtaatgatcatggctgaacctttgttctgttgacttggtcgggacattcaataggaggaggacgctgtgaacgagtatcaagatgatggagtcgatggaggtgaggatgaggctggagatgagaacgaggatcgagaccaggttcgtccattcgaattgctctacattgccgactcactggtacttacatatccaccatcttcaacttgtcacggttcaggctcattccacgcgaccaggaagtcaaagcaaacctaatgagaagcgagtgacgtctcactacatgaccaagtatgaacgagcaagaattctcggtactcgagctcttcaaattaggttggtcaccttgttttaacttcatgtccttcagagcttcagctctatgacattctctctttttccgtactgcataccttgtgtcgtttctttaaactccaaatcttaagctcacaaggactgatactgatatcttttgtggctttgtgattttatcagtatgaacgctcccgtgcttgtgccgctgaatggggagtcggaccctctcgatattgctatcaaagagcttgccgcaaagaagattccgttagtcgttcgacgatatttaccaggttcgttctttatattcttattctttttatactgtccggtctcggtgctatttcttttggcaaatggttctaactcgtacggtgtatcttctctatattgtcatcatccacaaactttagatggttcatttgaggactggcgagtggatgagctcatcaccgataactagatttcatcgtgtcttcccctccctccaccttcatctcttcccactatcacatcataaaaaacttcagaacccacacggtacattcaatatttctttcccagtcttgacgtttgtctgcgacgacaaaaaagacagctctatatccttactgaagagcgtctctcttccttcaggtactttttctttcatttctccctttgcgccgtgctatttcgaggatcatatatataggtcctttttgtttccctcctctttcttctcctttgcatatataacggaacaatcgggaatcgagcggatcgatttagctatcagaaacaaacgatcaacagcaactttcccaatcgagaaaggtcgtaaagatcatgatagatgatgacaatcgacagagtacatgatacagactgggaaaactagatcactagagatggggaacaggaactgcgaagaacgtacatatgtgcgtgagagagcaagagaggagggtctagaaacaatgggtagggtgaagcaggaatagaagaaaaaaaatcatgataacgagattgagactgattcattcgatgtcatcgctattactcctccaagattctctctttcgcttgcttcgatgcactctccacagcctcagtcacattgtccgcatgcgctcgttcttttaccttctctctcgccttctgttcctcctcttgtttctttatattaaccttctgttcctccaccagccttgccttcctctcttcttcctctttctgctttctatccttctgcatttgttctttctgcctcctctcctcctcgagtagcaccatcttggctttctccttctcttcctctaccagcctttccaactcagcctccagttgttcctcgtccacgccatcactagtacctccagcagcagcctctctcgctccaatcccaccaagcgagatggcttgttcgatctcggcatggtctgccaaagtgtccgccatggaatccatagtacgctccacattctcatgggaaagtgttggatcggctagaagagttgacaacgtctgggtcgaggtctggtaaactttgagaatctgattcaagaaggtttatcgcgaaaagaagagggaaagaaggatgattatgtctgaacagcgcgttccaaatgacagagaagagcatacatccaggttggctcaggacaaggttgaaaagaacgaacctcaatatcaccagcagctgtctcaattttcagcaacacgccctggacggtttctagactgctcagccgtttcaagacgagttcctccaacgacttctttgagcgcagatacgacattgctaccgtcttttggttctttcttaatgcctctttgacttggttagctcgtctgatcaacaaagttttgatgaaaatacacacacacaaaaggacaagagatttaagcatcagtttcaaatcgcggatgtcctgcaatatttccagatgcagagaggaacgtactcggtgattcgaatatccaattcatccatttgagattttaatcgagcaacagtagtcgccatttcaagcacaccgtggtcaaccgaggtgattggttccggcggagcagctgtcggatcaaacttgataacctgagtaccatcatgatcaagcacacgaatcaaaagattagaatctacgtctaaaggttagacgtcattaccagaaccggcacagagctcaccgagccatctctaagcaggacttgacggtctcgttctaagaatttaatcaacacggacatctcctcctcagaaagtaccactcctgggagacaacgagaagcaaacgcttgggtgaaggacgtgagggaaaacagaacgtcggtgatagatgaatgaggaattgtctggaagtaggcgactaggttggaggctgctttctggaaagacatatacgaatgatttcccagacagggaaagaagaataccacataagcgcctgaatcgaagagcaacaggatgagttgcagttgcgctcacctcgagcgtcgccttcagtacatatttgcctttaattctgctccaaacctgtccggatgtacctcgcgagatcgcaggttctgttccgaccaagctcatctgttgtagaccccaccagagcggacgggcgatcagggcggaggctatccgataagggatcgaagagaccgcgtatatcgaagtgggactcgagaggaaggtgtttagtggatagacagtctgagacgtcaccagctcggccttcctcatatacgaacacatacgagatggcttcgtttagcttgaaggcaacaataaggagtcgaaaatgacgcagcatagataagacgtacgacgacacaacccagtccacttggtctcttcccatcctccaactttagagcatccaaaagatcttcgccgactgtcaataacaacgcctgaggaccggacccggtatccgaaggcaagaggccttgctcgctcgctccctctaaaaccgacttccaccatgaaagattggccgagaaaccatgtgggttggactgcttttgagaagaaaagtctgcatagagtgaggatagacgagctttcgacaccgtgttgtaagcgggaagggtgatgatgggcttgcttgtatatgcaacagactcaggtctaacagatgaaggaggggaataagatgccggcataggaatactttatgtggtaggtgttcgggcttcaggaaagcgttatcgaagacgatgcttgtagtctgctgatgatgatgatgacgacaaggaagggaagcatgcaagcataggtaaagaactaaggggaaatcactacaaaattagacaagacgtgaatagaaaatccgaagtcaatcaatagaaacttgaatcgttttgttgcctcgctggaaggatcgtgattgacgtttgatcgttctctgacttccatctctctccttcattcacttttcttattctcttcttcctttcacacatctactcctctgtgcttggactgttacatcactatctaaacatattaacaatctaacatgtcgtcttcagcagctcccaggaaacaggagagagatttcagtaaggaggttaaagctctcattcctcaggtcacagagctggcaaaggtacggatctcttgctcacacacattccacggtcatccttgaagaaactcatttatatcttgtttaaatggtatacttgaacaattaatagaacaatcaacttcaagaagctgtcgataaactcttagttcttgagaagcaaactcgtaacgtgagtcagcctacttcacgaggtgacctccacatcaccaacttcttttgactgatgcagtctctatccgaatatattgtaggcttcggatctggcttccacttctaccatcctcactactatccccaatctatgctacaaggcttccaattacggcctcctcggatcctctgtcgttcttcttgccaaacgacacggtcaacttaaggaagctgttgtcaagatgatggatgaggtactgggttacctgccagcaatcaaagagaaggaaggagttgagcagtggttagagttgattaagacgttccgaggtgtgactgaaggaaaggtcagttgaaatatgtttaacttgcagacatgtagatcacggtcgggctgatgcgtttgacatatgttggatttctttgtaaagattcaccttgagcttcctcgagctcgtctgactgtccttttatctaagcatcacgagcttcttgcccagactgctccaccgccgtcaactgaaagtgagttgatcacagcagacccaattttgactagactccagctgattctcttccgctcggtcttcaagcctccaccgtttctgctaccgctcccaagtcgacgacttcttcgtcggaacctgagaaagagaaggagcctgtcagctcgaaagagcaccttgatcgggcggctgatttgctgagtgagcttcaggtcgagacatatagtagtatggagcgaagggagaagaccgagttgtgagtcgttaatcatcgtgaatgaggtagacagcgaacgacgggggactgcaatgcgttccgaaagctaaccgagttggttgaaactctagtattctggagcagatgcgtctggagagccaaagaggaaactggactcgagtccgggttggaggccggaaaatcaaccgagctcacttgaaagaggatggctacactgtgggtttgaaattttatgagaccatgttttgtctgagagggtttgtgctgattgccttcttctggtctctaaactctgacaggatctgaagcttaagttctacagtctgatcatcgcgttggctttggaggaagatgcatttttggatgcttgcaaggcctaccaggaggtctatgacaccgatgaggttaagaacgatgaggccaaggcgaaagaggtaagtgacacttttgaggttgattcatgcacatgaagctggacgagtgtcgtctgatgttcccgttcatgtttgggtttcctctttgaccaggcgctcgaaatggtcgcgtactttgtgatcctcgcggtgtacgacaacgagcagtcggacatgcttcacaaacttttccatgacaagaagatggaaaaagttgctctccagcagttggttctctttcctttattgctcacatgtacacgcgacttttgtttcaatctgattaatctttgaaaatctctatcttcgtattcgacagtgagcttctcaagagtttcactactagggagcttatgcgatggcctgggatcgagacgttgtacggaccgactttgagggcgtccagtgtgttttctgccaacgataagaagggtgaatctcgatgggaggtacttcacaacagagtgatcgaacatgtttgtccttcgtttttctttctctttggaaggaggaatagtcgggaacagaattttgatagactgaccgaccgagggaaacttctgttctttggctcgacagaacatccgagtggtcgcagagtactacactcgaataacaattggccgacttgccgagttgttggacttaccggaggagcggacagaattggtgctgtgccggttggtcgttgccaagacggtgtacgcaaggattgatcggttggccggcgtgatcatctttgatgcaaagaagagcggagatgatgtgttgaacgagtggagtggtaatctggaaaagatggtaagtcgctctagaaataagaggagggtacggcggaaaggattgcaaaagctgactgaccgtggaatactctcttttccatctcaagttgggcctgatcgagaaaacgagccatttgattaacaaggtatggaaactttcgatggttttatgttcttataaggcaatatagggcgcaagatgtagactgatgatgtccttttttttcttttttctcctctcttcttctgtaggagtatgctgtgcacgctgcaaaggtgatttccaagtagacacgtgatcgtattaatgtttcttcgatatgtaatcaaaatgatgacaagaaatagtgatgaatcacattcggatgagtatgttggttgtgtaggggttgcggaatatgtgttgaaggaggatcggcttatcaaggaagattgcatacgtttgcttagtgtttagttatcagaggcggagagagcaggctgaaggagacacagtaggacacgtacgagagaaagagaagagatttttaaaatggccggttagttaatttctacggtgttttagacacagacaaaacaaagaacagatctctccttctgaagcgcagtgagataaacaaacactctcaagttgttttctttcgttctttttgttgcttttcttctgttttccttacttttctgttcatctatctctcaattttctcgaggatcatgaaaaatcgaaagaatgaaatgtcgatctgtttgtgtattaacggatgaagatgtgtgtccacatgtttacttgtgtgtttaagaatcgaatcggacgaaagtgaaattcaaagagacggccgacattggagctgaatgggaatcggcgggttgaacgagacagaataaacaaggatttccctccgaaactgattgaaaggcacgccaagtcaaagagattgatggtagatggaaaggagaactcacgcaagccagtgatcgaccgggtcggcctcaattgagatttggtgatcgaatgaaaggatcgagagagttgaaagtgagctcgattcttgcgtctcaaagtgattctcttttccctatgtcttgatcatcactcttgaacaagtgaagtgggagggtgagtgagtgagtgagtgagtgggctgcatgatgtacgcaaaggcagatagctctgtgataaatacgaaacgctctggttccggaagcgagttgatctattaacgatcgagaattcatattgccaaatgtctagaccccactttaattagtccgttcctttgcggcctctgatcgaaattactatcctttttttcttggaaccgctgaaatggatgctttgaccgttgaagcgcttggatctttcagagacaggaaagcacatatagcatacagaatacattcacactcgttctcactcagactcacacaaggaccactaaggccacatcatatagcatatctgatcgaatttaatctaatgccaacgactcacacactttaatacataccttgacacacccacacatacgcatatacagactcctatcggtacaaatatcatcggttcgtgtcccttgtttcggtttcctctttcccttcctctttttctttctcttcttcgaccaccagttctgtcggttcttttttcgtctcttacctttctttctatctactcttgcttctccatctacatctttcatcctctgtacctttacttctccctctgtcacccctcacttttcttcaagacagatacgcaatcattatccctagaatgccgtacgtcaagatcaactcaaataccgggacacagaacatctattacaacatctcgacgccaacagaggccagcgccgatcagatcgatcccacaaggccgaccgtgctgtttctccatccgatctttatcgcttctgaaatttttcatcgtcagtcccctccccttcctcttttcctgtcgtgcctgttggatgtcaacccatcgacaacaccgctttcagccgtccgtccgtccattcatgctcaaccgacgttacgtccctcctctgtcaaccattctctctaaacagcccagttcacagatcctttgcttcgaaaatttaacctggtcgcgctcgactctcgattacacggcctgagtgaaggagtcctaggatcctccttcaccttcttcgttcgtgtcccttggtctacagtcaaatcactcatgtttccatttcaggccccatactcagttcttcgaccattttcccatacatacaggatgccgcggatgatatcaataactttacgaacgccctacagttgcccccggtgatcatcgttggtgtctccatgggttcatctattgctctacactttgcaacaaagtattcctcaaaagtccttggtctatttttgatcagtccactaaccgcttgggaggtgagtgaccgtgcctgaactctcttctccatcacccaaatccatggctatatgcgcatcatctgacatgcccttgtttccttggatcgatatcagcctgaagatggtgggtactatatccgactctacactgtccattttcgcattgttttttcttttgttgcacagtgctgaagtcattgatctttcctcccaaaaccagtcgccatcggccgtagagagatttgggaactctggaaggaaggcatagagatgaatgatgcagatctgaccgagcaggctatctcgggtgcccttcagctcggattcaacggacagacaacggagactaccgaaaggtaagataccatccatccctcaattatatgagcgcatatatgctcttagctaaagataaatctgcatgcttcatgatgaaccgtcaggatgctggcttcgagtatctcacactccatgaacaactggagcactgaacaaggagtaagtttccgtccccttgcttcgaaccctcaatcggccttctatctttcttaagctcaatttcttgaccggtttcttcttctcaatcctaatttcatgaaccgtcagattaaagacctcaagacaatttctgttgacttttttgccgaccgtaaacctttaccgctcaacgtactctccagcattcaatgccctctccagatgatccatgctggagcagatgtggcatacagtctggaagatttattggaaaagaagaaggactttgatgatgccggtctcaagactaacattgtaaccatccctagggcttctcatgtacgtctctttgatatcctctatttactcggccttaattcttatcctctttctctttttactctttcctctttcttataattggatatatcgaccaaacagtttgccaacgttatacatgccgaaaagtcagtaatcatgatatcacttgtgtaaaaaaagatctccgtcatgtttcatgtggctgatgtttattcatccacctttccgtccgaagaatcaatcctcttctctcggactttgtagcggcaaacgcatcgctcgaaacaccggcagaattaactcatcttgtcatctctcctttcgatcatttattcgaaactgagccagatgaggctgacgacgattattagtaacaggctttggcgtgtcctaaagttctcgcacctgattcttattctcttccgaattgctcttgatttttctttcagcatcatgaaacttcaactctacgacaccataccatatgataccataccatattctcctacgcataccatcacctcaactcttgctagactacttcatcttccttccaagttgtgcgatgtattttctgttttttctcaggaaatgcttcgtatctattcaaggaaatccactcgcccgctctatttatcttgacagtgtgttgtatatgtttgctccttttctccttcttgttcattgaaacgacttcatcctcttagtgttatcgtgtacacgtcttaatatgttgccccttctttccccaatatttttgtatcagtgtcttggatcacttcctgtggttttgaacgcatcagattccataactataaactacagaaagaacagactgttcaccctttgaagcaaaagcaaaagagaaacccaaagacaggaagagaaaggagaagagaaaagacagcctcctagaaaaatccatcctctctctctctatgccagaccaagtccggatcttaacgagactaataaatcaaaggccgatgtgtctccatggatatcccaaacgttgaccccgcccagcccggcctggagagcgaactgggctttgagcgagagcgaatcaggatcgtcataagtgatcacttggccggatgctgaagaacgaaggaaaggagtggatgaacaggcatcccatgaccgggtaaatccaccggcggcgatccatttcttggtggtactggaccagacgagagcaccttgagcaatcaaatcgttgaacatgatttgaccatccaccgcttttaagaggaagacgaggaggatcagaaaaggagagaagcttcagctggtgacccaaggggaaagagagaaagagagagggacaaacatcctccagcatcgttgtagagcgtgacggtagtagatcgtttgctcgaccaagctctcttcctgtggtctttcctcaaccctttcttcatacttgccttcctcgccaatgatgactttcgaaggagttgcccatgaggatctctcttggccccaccggcaaagtttatccagtttccgatatcaccaacagacgaaagctgcgcgcctccacgtcgtcgttcctttcgacgttcgacgagggtcgtagctgtggacgtggagatgtaaccataagcagcggtggcaaggacgatctggttgacagggaaaccggcggtcgaccatgacttcacagcggcgtatgcgtttgctaaaggttgaagagagtttccacagccgtcggacaagggggcgttaggtccaggagtgcttgatgcttttgggattagaggaaaagggacaaagaaaaacgtcaaagttagataagttcttcttctttcctcccgcacacgcatcaaaaaagatcagtaagatacaactcacaaccccagacactgtaaaaggtttgagtgaagattcagggacccgtaagtcagcgcgagagatagaaaatatccagagagagaggaatcaagatatcacaacatactcgtagaccatgatcgaaatccaatcaagtacggcggcgaacgccttgacgtcactcaatgggttaccatctgtccccgtgaacggccagacctgagtggccgccgtgatttttgccgacgctgggagagcgtttctcagaagttgaaggaagattaagaagttgccggtatcggcagcggcgacgatgttaccagattgcccgggtgtcgaaggatactcccaatcgatatcgattccatctagattgtactggttgtacagtgtgaccatctttgcaacgagcgcggttcgagcgtcggcagtggcgacagatcgagagaaataggtcgaaccagaccaaccgccgatactgagcttaactttctttccagcggcatgaccagccttcactgctcgggttactaaatttctccaatagtggaatcccaagacgccgttagtggcgcgcatataagtcttagaccacgtgaaaaaaagacgcacatagaccggtagaactcgagtcggtgaagacaatgttcaagtctgagtcaacaacggcgaaagctgttcattttgagaatagtgtaagatgatatgttcctaaatggacaattccaaggaaatgccgttctcattagaatcaacaaacatgaaagcaacacttgccgaaatcaatccaatcaactttggtccagtcaatctgttcaggagtcatcgacacccagtctggataatatgctgctactatcggttttgaagatccagttccaaccgtcgatgtcgaagtagccgccgccgtcgcgctcgatgccttggctgtcgtcgtcgttgacgtcgtctttgccaacgccgttgcagctgcgttaagggagactttggtgccggtagaaatcgcagtggtggatgcagctgcttgccaatatacggtctgggtgacggtcgcctctacggtgattgtagtggtggccgctgccgctcggggatggactctacctagaacggaggaggccagcaggagggagggaacgagaacttgagtgaaggaaaacatgtttgttttggtatttattcttatatgtgtaactgtgggagcttgagaggaaattaagctttttcgtagggggtcggatagtaaggatggattataggatggaggagaggtatcgcacaaactaccagagtttgtttcgggagaaagagagaagaagggttgataaatgagagtgaacgctagcctgagcgatgttgagtaggttgtttataaggaatggaagccgtctgtcaaagactagctgttatgggaaatggatggagaaagagggggaagaggagggaggaggctagagtttaagtagtagagacggcatgttgaggtatcgatccattgtacaaaacgggtagaccgttgggaagcatcagacaaagacgggagtcagcttccaagactatcacgaaaacaatctacagctcatttcatccgcgcctcccgttgaatttgacactaaggcatagtagcggagaggcagtgatcttggacgtacctgtgagagattagccgaagtagaaagagaaaccctcagagaaaaggttagggactaatcaatctacacaaacatacacaaacaatagtaatctaacttacagatggaggtcgatggtagaaaagaaaaagacacgaaaaggaagagaacaaactgtaagactgagacccgagaataacaagaacgaagaaggtgagcacgacaaagtagaaagtcggccaacaagcggcgcaggatgacgtaaccacgttctcactcatcagcagctcagagctactttctccgttatgagctgcagatcaaatgagaacgaacgagaacagtctaatctggtggaagagttagtcgagaaccatatgtcgtagtataactcttcttacggctcttggctcggtgtctcttgctcgtctttcctatctcgaacgacgagaatacatcaatcccgtactatcttccctcgctcttctatcacatcgattagtgaatcgagtgaacagtactgcattggcgctagcacaacttccagaagagccgtctggtcttcttgtcttcgataagcttcatatcttacattttattatcatcagacctctgaagagactgacgagtacgaaaagactcttcgtctaggatgcaagaattagcggcgttttttcggctatcctaataaccctaacatcaaccattgccgttttgataaccttcactcggttccatctcatccacatccttggatgaatggatcgatggcttgacgatgaatccgtcaacagtacgaacatctcctgtacctatcggagatgtaactcctccagttgtgtcgtctccatcttcctggacacccccaaagaagatctctggtagatccgtcggattggatcgtatgcaactcctgtccctcacaacgcctttgaccgttctatcttaccgaaagatacatatccatctgacatctttcgtctccattcgccttgtctaattctgatctcttgcgtgtgaataggtcagactatacctagtcaattattgcaaacctctcaacatgccagattagcgacacccaacgagtgagtaggtgcttccgtcatctaggccgacttgggctcccatgctgctgtcaacgaatgatctatatcgaccggagggaatgagaaaaatgaatcaaattcgctaacagatcttgtgggtctccatctttgaatttgttctttacctcctacttagcactcagatctttatatgcattcatcgaggtatgttttgttcctcccctgacggcaagtttctcatcgtattgctcaacgattttcatcttcttcccatgcctatccatttgtaaaaacgaaatttattatggatcaggttgcaataagctctttccctcgctcccgaaacttcaagcgcaccagactcaagttcatcgtgagggagacgttcccagagacactctcacatggttcgaccctgaagcagacgcaaagctcgacgaacaggaccggttggcagaaatcgatcgaagagcagaggccgccaggagaagtttcttacctttgggcagcgggggtggatagataaccctttgttttgacgttcctttccgtacttctttctctcatatttctagattttggcttgcatctaaccattgtacatctacacatgaatacagttatgccccatctttcctcttcatgctttcaagctacataggcgacgtaaacaaaatctagaaagcacaggagacgaggaatgatcagaatctcaaacgtgaatcaagtaggagagagagaagcctcgaagaggaaaaaaggacaaacagcgctgggcgtcagatccaactctttcaacgtcttctcgaaatcacctggcccaaacgtcctgttgggaaatctggtcgagagcaaaatcgagcccacgttgaacgagagagactctgaggcgagccattcggacacctcagtcagttttgccgtggagggcaaggtctttgtcaatggaggacccccggtcgagagtcgagcctgggcaagcaaaagtaggaactcaattttccggacacgatatactagacgagggtggtcgaccgaaaagaggcctgttctcacctgaagtctcgtctctggataatcacgcccagcagccggcttaccggcagcgacagtggcggctgctggtgcccctcgactaacatcaacccctcctgcctgttgagccggtacctttccttccctcaacgccttctccctggctgttcgttccgcccgagctttcttatcctcttcaatctgcgctttaatggcggctcgtgctttggcatctgcatctttctctgtattcgatatcataggccgagaaagaggatggtccgtcagatcgactgtgatcgttcataagagttgacggttagacacaacagactgacctctttttcgctccagcgcttctttgttggcctgcttgagctgtaagttttctttgatgtccaaagactcctaggttgcagacaaatcgtccgatcggaaaaggtgagtaaaaaactaggttgacggatatagctaaaacagacacttgcctttccagctttgcgacgaagagcctcgttggcctgcggccattgaatgtaatcatagtccggtcaacagagtacgtttgttgagccacggaatgcaagacgtttgtacataccttgttatcaatcgcttcctgcttggccttaacagcctatgtgttcatagagaatttgagaagcgtaagtcttatgtggtttggatgcgcttggttgagagagcttgttgaacgacttacccgcttagcagccatcttttcacgaagttcctctaggcgagcctttttctcctcctcggtcaaaggcttgatttcttcagtactttcctcgactatcagacacaagacatttgggtgcatgcattcagtgacgtaagctaacgtttagatcaatatacacacaacccaaagggaacatacacgatgtgtgaccgctcttctctgcatgaaaattggcaagagcagtatttttgaagatcttatcacactattcttccaaagaaagaagctcaaaagagatcagtctcctaggtccgccgatacccagggcaacgttgagatagcagcaactgacctcggtgcatttgatgctctgatcaagttatgggcaggatcaatccgtcagatttataggattcctctgtaagatgtacaaaacaggcaaaccttagcgtcctgtccagcttctatagctttggcttcctcctcatcctcttcatctgcctcctctggtgccggaacggcattgtccatgttggccaaaatatggtccatcgcaggctgaatgataccggccagagtaagcaacgtatccttgttatcatcaaagcgacataagatggcatacctgtagaccggagttttgggttgctttcaaagcccctatagagaagacgtcatgtacaaggtgtttgagagatcagcgttcgtcacgccaactgccagtgtggccaggagataatcggatacggagaaacgagacatacaatcaatacgagtctcttcgaagcccatggaaagtagttgggatttatcagacattgttatagacagatagagcagtgagtcagagatctatacggatggtgttcgctggacgggatggatgaaggaacgatcgagatggaactgcagatattgatgatttcatcgtagtaattccattagaacggtttgtagtcgcttgagcgaaatttccctaatgttcttccatcacgcattcaagctcttacacaatgttcatctcatgtcatcaccacctcattcaaaccattgatggttctgttgatgaatcgaagattaaattatgtccctgcttcttgattggggcgcttattatcgtagagtgatattttgaatacatggcctgtaatcataacatggtttcttggtgtagtggctatcacacttgctttacatctgtaacacgcaattggtcgccagttcgatcctggcagagaccatttctttttgtgggtgaaacaagttttatgttcttgaatctttcctttgtgcagcttgctatgttgtctaccagttctgtggtgttgtctctgattccctatcagaattcagcatgaaagggagagtgaaaggcataaacgaatgagtgatgacaatcactttttgtgaatgacccaagaagagatctgggcatctgcatagtcagactcaatttccagagcgctctcctgctttgttgttcacagcaactgtccttcttgtgattgagaaacaaaagaagagagagaggaatgtagatcatccaaaggcgaaggagaaaacgcgctgaaacgacacgatttctttccagacgcgtcagctctgaaaagttcaatctcatctcttcatctcatcatccgaatcatatagcccatggctcctgtcggcctttctaatcctgcctcgaaacatgggaaggaggcaacactgagggaactagttggcttgattcgttcgattttgacagatccagcatgttattggtacctcgccggcttgctggctataggagaacttatcttgggaggactgatcatcagatttgttccctgtaagtcttagtcttatcttcaatcttgaatctgacctcgacaagaacagtactgatgtcgttttctctttcctttgaaccgtcttgtcggcaagcagatacagaaattgattacaaagcttacatggagcaggttggtggattcctgggtggagagcgagactactccaagttggaaggtgggaccggtcccttagtgtgcgttcagctttctcgccagttgctcttgacaacttatgcgtggcccttggtaggttgcttgtggaacgagtctgacaaggattcacgtatcaacatcaaaaccaactcaaccggacagttacccagctcttcacctgtacatctacactctcctctcccaccttccgtcgcatccacaagccctgctagcctctctctttccacctgaaatccatcctcacctccttcctcagttaatctttctcgcactctacctaggccaattcttgctcaccgcattggtatacaaaaaagctcgaatgccgcaatatgcacttattccgctcacgctcagcaaacgagcgcacagcatctacatgctcagactgtttggcgacccctgggccgtcggtctagtctgggcatctatctggctatttcagaagagccgatggaatctcggaactttagtcttcaggtctgtatattcttcgtgtatgcgaccgaggtcgaatcatcgagaaactcttgaaatactcatacatcactgcttccggaattctacttcagtctggcgctaggagtcaagatgaacattctgctgtatattcccggtcttttagttctctactggaaagctcttggtccgctcggaatgatctcaaatgccgtcaaaataggactcgtccaggttagtcctttcatctccaaatatcatttcggctaggtctgatactgacctgtgtcgcccttataccacaaccctttccgttatgatcagatccttcttcctctgcccttcttcctccgatcacaccctcgtcaatacctgacgtccgcctttgatttctctcgttcattcctctacaaatggacagtcaactggcggttcgttcctgaatcgaccttcctctccagagaattccatgtcgggctcatggctgtccagctggtcgtattggctggtttcggatggcgatggtgtaggtcagaacatggaggtgcgatcggtgtcttacggagagggttgagccggcggaaaggcaatactgtcggccgatcgatcgaaggcagaggtccgtctgttttccctcaagtcatcggtttatagtctgattgtcccaacttagatccatcttttctgacacgatgttgtatcgtctttatcggctttgcgccgtctctagagatcgtggcgatcatgtttacgtccaatctgatcggcatggtcttcgctcgttcacttcactatcaattccaatcctggtactttcaccaaatcccactcttgctcgcgttgacagcatatccgctgcctatcaagtatgcctcacctactctttcattccgcaacgttctttacctttgtatcaaagcatgttgactagatccgtgtttcttttgataaaaacgaatattaaagggccgtgctctttgccatgacagaatatggttggtcgctctatccatcaagtgacatctcttccgcaaccttgatcgctgcccatatcatggttctcctcggcatttggataaacgatgccgaaggtcgggctccttcgctcccaccgtcgttatctcagagtagagctccagcgattacagagataaaggggaagaaggaacgttgatgaactcttagttat

SEQ ID NO: 2042 - DNA, 29064 bp, Xanthophyllomyces dendrorhous
ctatatatgatatgtatcgtaaacattcaagcggcgcaaccgcgaagaggaatatggcatcatacttatggatgaatgttgatggttatctacaggtcaaaggattttaataaactgacatgtaagtatatgtttccttaagacacgaaattgccgaatttgcaaaatgtaggttttctctaaaacacttacgtctttctcgaatacctttaaaaccctagagacttccttccggcttaagtcttctctatagcacatctcttggacacttgtcctgccgttgaagtattgacatatcctataggcgcacaaaagtatcagaaccaaccggggcaagtcagattaatcgaccaggggattaaagaatgctcagaaccaatatcactaacttgaggaagattgcagcatcatctacatcatggtctttacaaatcgcttgaatccatgccttttcctatccgatccgaaagccaaaagaaagaaagaaagaaagaaggggaagagcgttccagacggataacgttcagtgaaacgtattcgagtaatggcagagacagaagatcgcgcaaaagttggttacacacctgaccgaaacactcggctggatttttgatgatcgtgtcctcgagatcatcgaacaatgttttcaacaactcgtgtcccagttctggatcttcatcatctgcatctgcattcgtattttcgtccgagcttgcatctgaatcattgttgttgtcgtgttgttcgtcgtcgtcgttgtcgttgcgttttctacgaggacgggatctgtcgatttgcattcgacgggctagtctaaagaattgatagacaaggagaaacgaatgataagaacgagaattctagtgaagagatacagatggtgaaaacatactctttgatttcccgccgagctatcaaccgaactctgacaggtgcacccacgaccatatctctccgtcctgtatacaaacaatagaacgaaccggtcagatgctatctatggtgagttgatcttgcaaaaagcaaacataagcttggggattgaatactgactgagccataagagcgcctcgtaatagattcttttcatggtactatctttcggaaaagggtttattgatgcatacgctacaggcgcggccgagatccgactgaggaatcccaagagaggagctagttgggggaaggttaaatcaaagtcttcttttatttgtttgaatctaaagacaaggagaaagagggcgcgacagatgagaatatgatgaaattcaacattggaagcgaaggacttgtcatagatgaaaccgactaactcttttccttgatctgagcacatcatcgcgaatcaggagaatgtattaatctttggctattcatgtccgatacggagtctcgatcgatatagaaactgattgaaacttacttgtgcaagggaaataaacgtttcgagttcctggcttgacagggtagatgattttcgccttccgctaaatgtacacacatacacacaccattagtctcataccagtcgagtgaattgtgaaaaaaaaatattaaaaaattcagcacttgccttccaaacgagaattttggccatgggatacagatctcgctcgagatcaacctgaaggtcaacaaactgcggaagtcgagcgatatcagccagacttgagattgcgaagaccgatgattgacaagcaacggaaaacgattagcgcccgttccgtttcgcgattgagagcagaacaagaggaaggttatattgttacctgagactaggcttgatagcatctaggaacattgaaaataagggaaaggcttcctcctctgagcccaaatctccatcccctatgtcttctttctgatctccggttctgatagaaggattccttgaaccgttcatcagatcattttggtccatcgccgtcatcgtcgaacctaaccctaatgtaggacctcctagtatcgttgaattctctgtgctacctgaccctcggtcgttccgacttccccttcggtctaaacaactccatcccatactactcgctgctctggatcttcctccagacgatgccttgtcccatcgatcaaagggctccgcttgatcttcccaggccaccttactattaaccctagacgaatgtccagagaatggaggagatgacgacccaggttcgtctaacaagaggagtcctttccaaggggcgaggttagacgagctagtgtttccggaagcgccgatggtaagatcgtaaccctggtcttgatcatctcgaatagaatcctcccaccagatccaatccatgtccaccgatggaagaggaagaggaagttgaacataaagtgggagagaggcaatcttgacagttgtggcaaaagggaagtactttatcgcttcgtagacttgtttgagcgctcgtgcgagtggagatatttggagagcttgttggagatacatttcgaaagggatttcttgagttatgtacatttcgaaacggaaataggtcaatttctgatatgtcgaacatgagtgataccaagtagatggacttcaacatttcaggaaacacagcgactcactatctacatgttcacatttttctttcaaaacccgaagatccctcgattgcttcgccacccagttatcactcacctgagcatcgtaaagcgccgccgttagtttgaagatgacctctttgtagagcgcgctcaatttggagtttggtaacgactgacgacctcttgctgatgtacttggcatatcaaccacgacgactacatggaagtgattaatatacggaggtccatcaacgtcgacatcagcgttaccactattcgaaatcaaaccagtaggaatgattgtattgtctgcgtgagatttgaattgacgaatggatgatcggacggcccacggatctgtcgaagtcgaggccgaggttgaactatttgtcggtcgcgtttcaagcagggaggtaggcgtaagggaagatccctcctggacatcttccaaggtggttgttgaaggtgcagtcccaatggagaaattcgccgaagaactcatcgatgctgggacagccgatgtttgctgctcactgggaacacctgggcccggagcagtcccgcttctggatcctttcgaccgtcccctcccgagctctgccacagagccaccacttgtacttggtttgatggaaccattcatatcctcctcattcattgcccagctcccttctgctccgtttcctctcctcatcggatgcccgatgaagcatagatcatcgacaactaactcgaacctttgttgacataactccaactttggggtgagcatgcttgcgagaaaatcaatcgggaaatccagataacgctcgtaatcttctttcttgtacgacgagcttggaagtgttgaggcagatggagggactgatggtcgtccggtaggaggaggcgaatttgtcaagtgggttgagtgcgtgtttggcgtgtcctgcttgaatgcatgtaggggatcatggggcggcagtgcccgaagagatatagctggtgacggacgaggcagagaagggtgaagaggcagatgcggaagcggatgataagggtgggcaggatgaacagatgacgagcgagagtttggcccagatgatgatcggggttggcgagaggatcgttctgcgagaaggggatcaagatcctcgtcgtcctcggaggaactcgcttcagaatccgtcgaaggtctgtacatcatctcagccgtccgagatcatacagcacaaagggtcatgttgagtatcaaagaccttgagccctatgcctttgaaggacggggttgatgagagtaaggcgtgagttctcaccgctgctttcctgtccattggcttccaccccttctatcatcgactccagcatgaaagctataagtgttgctcctcaaccgtcttaccggttttggaggccatcggaaataactgacgtctctgaaagatgatgaggtgatgaggataacagctatcggagtaagaatactgttgtccgacttgtcacgtttcttcatgttgaagaagattgcaatcgcagtgggcgatggtgatggtgatggtgatggtgatggtgatgggtttcgtgtacgaagaaaaagacgcgacatttcatctcaaattgatgattattaacattcttattgtttcactacttcttgcgttcgacatgctcaaagactagaatggggagagcatcatgggatacagtcttcgttgttgaaatgaaccctaaaacatctgtgtccgagccgaaaggtagaagcatatgagctcaagctcaatccaacctctcttccctcgagcttctcatctttcccactccgtccctcaatcgactctccaaactgagctcctttccaaaaaacacctgagactccatccccttgacgacgtccgccttaattccagacttcttctgtctttctctggcagcgagctcagcttcggccgccaaacgatcttgttctcgaatggaagcaactcgagaggtccgagacgattcttcgtaaattcgagccacaagaagtaaaggaatgatagtagtgagtacaacctgtcccaggccgtttccgaagataatatggagagaagaaaaagctcacccatctcttgagcgtttcccatcatggccgctaatctcgcggctcgatcctcatctggcttgctcttcacctcggctgtggatgatgctgccgatccatcagctggccttgctgtcctagacacttctccggtctcccgacgatcatggaatgatgctgctgaaggccttgaatggctttgcgacagatttggacgagagaaagacgaagaacgtccttggccgttggaaggcggaggaggatagggctgagatctgtgtgaagagggagggggagaccgtcgtgatgggggggatcttcgatcaattcttaaattgtctcgatcgtcacctctccttcgctcgtatcgaactggcgacctatcgtcccgtcttctaccatcgcttctgtttcgatcccgagactcgtacagcctgtctcgagagtctctttcggcatatgatgacggaggcgatagcggacgtgtatggtgacgcactgagtcccttcctccttttggacttctacttcgacttcggtctcgatctctcctttctccgcttccagagtatctgtcctctcgttctttatctctctccctgtcccttcgatctggcggcccacgaagatcactgcgaatatcatcacgatctcttgacctgtcccggtcatcgtgcctagatgaactggagttcttgtttgcccggcgttcctcctttttggcccgcttctcttccttctcccgtcgtttctcctcctttcgctcctccttcagtccagccttctctcgaagttgcttcaaacgaagcggatttgacatgagcgcctggtaggctgcctgttcctgttgtttgatggcgagaagaggatcctctcgaatcttggcggctgtgtctcgggcggtattggcattctgaatagctgtgaactgttccttctcagccgcgaccttagtagagaacagcatgttagtttacaagaagatactctgtttctaaaacaacaacaatctagacaaacacacctttttttcttcgtctcccttgagaatctgatcaactcgcttctttcccagcaagtagtcctctaattcctcccccttgatgcctccacctgaggcgggtgtggcgtacatccaatcgagtttatcaacctttttctttccggtctgcatctcctgcattcgctgaagctcctgaagctgtctttcctcgtcccgctccttcatgagctgcttgagctttctgtcctcatccgcctggtaaacatttaagatattgaacgcgtagagggatgtatgagtatacacgcgagccgatagccgaagaaacccaaacgaatcagaaagcgttgctctcgagaccaaccttctttttctcaaccttccagacccgctcctattgacgaaggatgcaaacacatatagtagcggatcagcaagtggatattgcgaatactactgagattacgagaagaaactccaagagaggcttacttgattcgagatcaagacctaagcggaggtaaccaggagaaggcgagcaccggtacaggccgatatagagcggtcagtatcgctcacacagactggaataaagacacgatcaccaaggagaacataccgggtgccaggactttttcctgtgatcatagacgagcggtgaacagacggtctgcaatcagctgaggtatcaccgacaacgcgaagaaaggccaaacaaaggcaaaaaaacagacacacatgtttagatctcctccacccatcttggatcaatatgctatgctgtttagaagtaaaagtacgggtgtatgcgaccagaagaacaggatggtggatggaagtgaccaggcaggatggagagtgatggtgaggaagcgtgcgaaagagaaagtcgcttagtcagcagaaaacaatcccaatctttccgttttcaccttctctgccttttcttcctttcgacttgaccttctacctttcccatcgaccgtcggcctcgttgtctctctgtgtcttgctccctgtttcttgttggaaaaaagggtcaaaggtgagtggagtcgagtttcgttttattgcttattcctttttggttcttcagagtcgactcgacaagaatgtttacttggatctctctcgccttttctttttttcccttgaaacgcgtccggttcgatcagcagcaatcttgtgttcttggtcggactacatcctcctctctctttctctctgccctttggcctatctgctccgtcttccattctcgttccttttcccttcctgtcacaccttcgcgttcgacttggacctggccttggtcaaaagcaatcaatatagaagatggacgacagtaggtttttctctgcttccatagacgtggcgaatggctttgagcatttcatcttgactgatgctacttctacaccctcttgcctcccgcttcagttgacgaaaaaccttacgcagactccccgcatggatccgatgacgcctatggccatccgaatcatccggacggggctgatgagtacggctacgacgaagaagaagaggatgaagactacatcacccaggaggatgcgtggacggtcatcacctcgttctttgacgataaaggacttgttacccaacaactcgagagtttcaatgagttcgtcgaaaattccatgcaggaattggtcgatgaggaaggaagcttgacgttggatcagtacgatcagcataccggattgggtggagacgaaacagttcgtcatatctttctttgtgtctcctccaccttctttcttcgcctactctttgtgtgtcttataaaggacaggagacaccataagtggcaaaagtttcatccatgcgatgcggtgatcttttgccactgtatgaaacgcgtcgttgttttcgttttgtgatctcgaacttctccttttccttagcttttcacttacaaacccgttttgctccgatcgaaacagcgtcgatatgagatttcgtttggtcagatctatctgtcgaagacaacgatgaccgagtcggacggaacggtcaatgcaatgttcccccaagaagctcgtcttcggaacttaacgtgagcttaccttctgtccccagctgacaaagcgaaaaccacgcaaatgagtacaaccaagacttacgtccaagacgggcggccatcaatgctctacaggtattcggctccgctatatgtagatatgaagaagtcggtgtacagagctccatcagacgaagacccgatcgaggctgtgtgggagcacgatgaggaggaggaggaggatagcaagattttgatcggcaaggtctgtgtcgaccaaatgatgatgcttcttcacgcatagacgaatgagtattgatcgaaattttctccctggtttcttagatcccgatcatgcttcgatcgaatttctgtctgctgcacgagttggaggccgagtttcagtatgagttgaacgagtgtcccctggatcaggtctgtgtctttttgaactaatatctatccccaaactctcgagtgtctgacgctttatcacattctgctccaaacaatttcaatgttaatgcatctctagggaggatacttcatcatcaatggttccgaaaaagtgcttatcgcacaggagcgaatggcggcgaaccacatctacgtgtttgccaaagcccagccctcgcctatcaacttcttggccgagatcaggagtatggtcgagaaaggtggcaaggccatctcgatgctccaagtcaagatgtaccatcgtggtcaggagaagacggtaaattccacttgcgttcttctccgttgctagactagtcttggagctgacaaccgagcgatgatcaccacagaacggaaacacgatcaaggcaacattaccctatatccgaacggatattcctgtcgtcatcgtcttccgagcgcttggaattgtgccggatcgagaagtactcgagcatatctgctacgatcaaaacgataccgccatgctcgacatgctcaagccctgtatcgaggaagctttcgttgttcaggatcgagaggtccgttcttttctctatctgcgtgtgctccttttcactcagagtcgaggctaacttgccacccgatcctcatcttcttgcttctctcatcaccacaggtcgcgcttgactttatcggtcgaagaggaacggccactatgttgactaaagataagcgtcttcggtacgcaaacgagatccttcagaaagagatgctccctcatatctcgaccgacgaaggtttcgaaaccaagaaggcatacttcttcggctacatgattcatcgactactattggctgcattggagaggagagagttggacgaccgagatcatttcggaaaaaagagattggatttggccggtccattgttggccgggttattcagaatgttgtttaaaaagttgacaaaagacgtatatagatatctgcaaaaggtttgttcgcttgtctttcttctcttttattttgcgtcgagtgccgattttctgggttcctaatgaacatccaatcctttctttgtttacagtgtgtcgagaccaggaaaccattcaagctagactcagctgttcgctcagccactatcaccaatggtctcaaatactcactcgctactggtaattggggagatcaaaagaaggccatgcaagctcgagcgggagtgtcccaggtgctcaaccgatacacctttgcctcgacattgtctcatcttcgacgatgtaacactcccatcggtcgagacggaaagatcgccaagcctcgacagcttcacaacacccattggggtatggtctgccctgcagaaacgccggaaggtcaggcttgtgggctggtcaagaatttggcactcatgtcatatatctctgtcgggtcttatgctgctcccattcaagagttcttggacgagtggggcctggaaacgctggaagaatacgcatccgctccctcggccacgaaagtgtttgtcaatggagtttgggtcggaatccatcgagacgcaaacgagctttcgaaacatttggtaaaacttcgacggtgtgcagatatcaagtcggaagtcagtatcgttcgagacataagagagaaggagttgcggttgtacaccgatgccggtcgggtttgtcgtccattgtttgtcgtccaagaggatgaccagaagttggcattgacgaaggacgatgtgaaccgattggcggcaacaaaagaagacgattcaatcacaccagagcacgaagacttctactcatggaaccatctgctcgaggagggaaagatcgagttactggatgctgaggaggaagaaacagtgatgatcgcgatgacgccggatgatctagcagccgctcggtcagcagctgacgcagaagatatgagaaacagagagttggagaggatccagaaggagaccggtggtttgtcgttcgatatggcaggcagagtcaagagttcatcgttctcgcatacgttcacgcattgtgagattcatccaagtatgatccttggaatctgtgccagtatcattcctttccccgatcacaaccaggtatgtttcgttctcttcccactcctcgccttgtgttttctttctcttcgtcgtcgtcgctaaagccaaacgactgctcttctcgtttgcgcgattagtcccctcgaaatacgtatcaatcggcaatgggaaagcaggcaatgggagtatacttgaccaactaccaaattcgaatggacaccatggccaacattttgtacgtctttcttgttggcaaagcaggtcattttcaactcatttctcataattgcgtcttttgctcggtgaaaccaaactcaacaggtactatcctcaaaagccgttggcaacgacccgatcgatggagtaccttaagttcagagaactgcctgccggtcaaaacgcgattgttgctattctttgttactctggttacaatcaggaagattccgtcatcatgaatcagagctctatcgatcgtgggttgttccgatcgatgtactaccgagcttaccaggtgggttgcttctcttcgtttctttccttcgttctttcttgcatcagcatttgcagaatacttgctgacaacgacaatatcgaattattgttgacttttggggagttcaggacgtagagaagagagtgggtatgcaagtccttgaagagttcgagaaacctactagagacaacactctcaagatgaagcacggcacgtacgagaagctcgacccggatggtctgatcagtccgggtgtgggtgtgaagggagaagatattgtgattggaaagaccgcgcccttgccccaggatagtgaagagcttggtcaacgattggaaacccatacggttcgttgattatcttctctattcactaagttcgtcgggtttctgttgaagagctaaccaagattgccctgggacgttctagaaacgagatgtatcgacacctctaaagtcgaccgagcagggaatcgtcgatcaggtgttggtcacaaccaacggagatggcgccaaatttgtcaagatcaggatcagatcaacccgagttccccagattggagacaagtttgcctctcgtcacggtcagaagggtacaatcggtatcacctaccgacaagaagacatgcctttcaccgcggagggtatcactcccgatatcatcattaacccgcatgctattccctctcgaatgacaatcggacatttggttgagtgtctgcttagtaagttggcgacgttgttgggtacagagggtgatgctacgcctttcaccgatttgacggtcgaagccgtgtcggcacggttacgaagcaaaggatatcagtccagagggtatgtctttttagttttgttatcatctctcgctatgaatatcttaatgttgcagtaactcatcgaacatatgcttggtgggtttcgtttgtagtttggaggtcatgtatcacggccataccggtcgaaagttgcaagcacaggtctatcttggaccgacatactaccaggtaaagtctgctgatcaggtttctttccaacatagataccgggcactgataattgtatcctctgtcttttgttttgcatacagcgtcttaagcacatggtgaacgataagatccatgctcgagcacgaggtccggttcagatcttgacgagacagcctgtggagggtaggagtcgagacggaggattgcgattcggagagatggaggtacgtctttgtcatcaattttgtagtaaagcttttcagccaataactctgtgtttctgtttgatcagcgtgattgcatgatcgcacatggaattgccaacttccttcgggagaggctctttgatgcatccgacgggtatgcctctttctcttccttctttgtctcgtttgctggcattctgattcattggttaatcttcatcatgatcgataattacagttaccgaattcatgtgtgcgacatctgtggaatggcagctaccgcccagctcaaaaagcagatgttcgagtgtgtacgtattaagatgtctttttctcatcaagatccgaaagctccaagtcctgacctattgttttgttctgggttggggttctctctgtgtaggctcactgtcggaacaagacagaagtgtctcaagttcatttgccttatgctgccaagttgcttttccaagaggttcgtttgtcatcttctttattgtattgaatcagtcgacccgatgactaaatttggtgtttaacttttcctcttgggggtgttttgatgatcaaatagcttcaagccatgaacatcgctactgtgagttatccgcctttacttttcctctcagatcgccaaatctatcgattccaaacacatactgactctaactattatttcttccttgtctacttttcttgatcgtagcgattggtcaccgcatgatggattgcgttcttctgtttcttattgatatacaacccattcatcctttccttcctcacgtccttgcgtctttcgttccattcttggttacacccgccttttctttgtataacatgatctttcatatatatatcgctctctctctctctctctctcgcatggccagattttaacgtggtgcatacactgcatcaagagactgtgaactgattggaagaagcgataggggttttatgtgtctgagttttcaggcgcttggggtgactaatttatattggcgaatgttccaaagtaaaggtatatgtacaatgtacgcatttctccgttctttcgttcatccgttcattcaatcgaccgagtctcttatctcctccatctgcatcacttcttagactcaactaattgaaagaagacggagagaaaaagggaaagaggaggaagaagatcctgatcatgttttcaaactgatttaagcagactgggtctcaccaccactcaaagcggcctgcaaagcctccaacatttgcttctcttcctcaccaccgacggtctctccagcttgagggatctcttcggccgctgcttcttcagcctcagccttgatctcggcctcggcctcgacctcagccacgagatcagccacagtctcgacggcgacgtcgcctccctcggtctccttaacgtcgacctcctcagcagaagcgttcacatcctcgtagtcctcatccttgtcctctgacgaagcggccggcgtggactcggtctcctcagaaaggttcaatccggaagctggagcgggggcggaaggcgcaggcgcagaggtcttttcctcggcggcagtggcagcggcgatagcggcagcgagagcatcaacggcagggttggaagtggacgattgggaaatgttggcggaggaaagggtgttggagatggcgatgagttcacgaagggtttcgaacactgggggaaggacggtcttggcctgcaaggaggataaggtgaaagaggaggaaagacaagtcagtttgagcgcgacggatcggatgaccaacgatcgctccttcagatcagtcacgagcacttacgtagactgtaaagatggagtgtggacaatatgattagcgatcagataactgagtgagaagagaatgaaggccagcatatcaacacgtactctgcataagctcagcaggggcagggtaaatcctcaaagccctgtagaacgagatggcagcaggaacgtaagcttcgggtcctgtaaaattcagacgacatgcacacattggagaaaaaaggtcaagaaaggttagaactagatgacgcctatgaagaaacgatcgaggaccttaggaagataaggaagaagaaagaatagacacggaccaagagcggaaagcctctctccgatcgagacgttctccataaagtatcgctcctgtaaagaaagcaaattacgggtttacagaaggaagaaagtgttaatgaaaggtgatcttgatattggtatcgtcatttcgatcagaccgataacaggaatgcacgagaccggagtgaaaggacgaacgctctcctcaggcgaccgaggtgtcggctcagcagaaatctcgatgacggcctgaacgaggtcctgcttgaccttggctccctgagcggacttgacggattcgacgtggttgttgattttcttgttgtcctttcctgcaagacgaggaagaatcacgaagatggacggatgaccggtcgagtaaggaaagagagaagagaaggaaaaaagcgtgatcagtgtcgtaagcggagacatgaagagtgttgagcaatgaaacaaagctcgacacgtctttcttacagcacaactaaaagtcatcttgacgagaacaacgcattattcaagcaagatgccgacgatgaaaaggagatactcactgagcttctttctgaactgcttgtcggtctgcctcttgtaatcgaaccaggcggcgtaaccggcggccagggtgagcacggtggctcctactccgatagcgatgttgacttgtcggctgggcatgactgctaggatgattgtgcgtgcgtgagtgtgtgttgtacgatctgtggagtacaaagacactgagagaacgtctggtatgtggagagtgttggatccaaggtcgaaaggtcgaaaagaaagatggaggagaaaagatcaaaatggaggcgtaaccggaatcgtaacctgattacgtacatcgtaaccatgagcctgggtatgttcgagcccaatgaatacacacttagaacagacacatcaggctaacaaagacaggaggcacgagagttcagacgaaccaacgaggagaacatatacgagcgcgaggagattcagtgcgaagaaagacagttgtgatggaaggaacgatttgacggaagcgcaacgcgccggtgtcgtatacggtcagaacggaggtagcagtgatgtgaagcagccaacgtcagacattcgatccatatgagagcgtacaaagacaccatgcagcgagagaacagtatggaagacagaacgacatacagaccacaccaaatgaggatgcaacgaggagaccgaacaaggaaccccaacatgcgcgctcactgggctcgcactctgaccggccaacttttctcttcccttttttttccaaatcatcctagtcattttttattttatttttatttctttatttttttctatttcactccgccttcctcttccagcccatcaaccatcatctccgacaactcaatccaatgtcttcttcagtcaagccctcattctggttgcgatgcgagaccaagcctcacgagcataggtctgctctcactcccactaccgccaaggccttgcttgacgctggctttgacatcaccgtggaaagagatccccagaggatctttgacgacgaggagttctccgcgttcgtcttatcattattctcttcttcctttctttctttcttttggcctttcttctgccgcacgcatttctttgttcgtccatgactgacgacaaacgctccaacctttgtacagtgtcggttgcaagcttgttgctactaactcgtggaagaccgactgcccgcttactactcccgtgcttggtttgaaggagctcgaagagtccactgatgcccttccccagacccacgtccagttcgctcactgctacaagcaccaggctggttggtccgatgtcttgaagcgattccgaatcggcggaggaactctctagtatggctccttcttcgatgacttgatttacatttttagagcaaacaactgacttccagctctttctcttccttactcttctcttccttactctttcctttctttcgcccggccttacctctttgttcgaattaatctcgttctactaccatccgttcgtagtgatcttgagttcttgaccgacgccaacggcaggcgagtggcagcctttggattccacgccggatttgccggagctgctgccggatgtctcgccgtgggcgcccagcagtctggaggacgactaggaggcctcaagccgttcaagcacgagggtgatatggtcgagcaggtcaagtctgagcttgccaagttgggacgacctgttcgagctttggtcatcggagctttgggccgatgtggatctggagctgtggacctcttccgaaaggttggactgaaggagtgcgtgcctttgtggtttttctttcatgttcccttccgatttatactgacggcaattttttctttgtatcatactttgttcttacagggatgatatcctcaagtgggacatgaaggagaccgctggtggaggaccctttgccgaattccttgatggttcgtctgttcacaatggctgcgttagatgaacacttctatagcttgtctgatttgtcgttcttttccatcttagttgacatcatcgtcaactgcatctacctaaccgagcccatccctcacttcttgaccgaggagtacctcaacaaggccggtcaggaccgaaagctggcttgcgttgtggacgtctcttgcgagtaagttgccttccttgttatctcttgagaattgagcgtcttgctttgtatgattaactaacagtcgtcatccatttttttgactttgtatttccagcactaccaaccccaacaacccccttcctatctacagcatcaacaccgtattccctgagcccacggttgatgtcaagctcgcgtatgtctcgatcgctttgcgttctggtctaattgaccttttctcttcttctgtttcttgacgactgactggttcgattcgacttggatttatctcctaaacagtgatggccttcctgcgttgactgtgatctcgatcgatcatcttcctactcttgtgagtatccaatcttctgctcataaagtttgcgcttgccctccaagatagtccggctgacgctttggttctcattctgttctcaagcttcctcgagagtcgtccgagtcattctcgaccgctttgttgccttcgttgctcgctttccctcaacgatcgaccgaaggcgtatggacccgagcggaggagctcttcaagaagcactctgccgaggctaaagaagttaacccttagagcattgtagtttttcttcctcgttcttttttcgaacagtttcgcgatgcgttttgttttatctatagagagaagggatccccagagaagtcgagatagagagaaaagttgtaaattgtttcgcgtataggaatcgataaaaacgcgttggtgcatcatgttttcgccagtactcgggtggtctctctgagattcatgatctgcagcagaaggcatatatcctgatatctatgagaacgacatccatagaaggacagcatgtgaagcgaaactaggtaaaagaagaaaaaaggtgaaagtcttgggaattcaaagaaccaggaatataatcacttgcagaggctcacttccaccaatggtttcttggtgtagtggctatcacacttgctttacatctgtaacacgcaattggtcgccagttcgatcctggcagagaccattccttttttgactctttttggtgtttccttctgcactacgttcatcgcaacagaaatttcgttgtgcaacaggcttgccttttaggtcttgattcttacttgatactgacagcgaatagcaaggtggaaatgactggcacttggatttagaaaagaaaaagaaaaaaaaaggctgaatgcaattaaccaccgactatagtcgtcatcttcctctgcggctcccaaacgggtttgacctcctcattggttcgataccggagatctcactctcatcattgttcttggctttttctcgtccttttcgatcgttcacatgggtgtatgagcctcgtagagaaagatcgtacacttacatgttcacttgtctgccctccgaagccgtattcgtactcgtactcgcttgtcgttttcttgatcaaccaacgcaccgctgacttctgctacactgctctctcttgtctctcttggagcaagctgatgaaaagaccgtataacgttattccatacatgtacattgaggaactaacatacatgaacacccccatgtctttttacccttaatctcggttttgttttgttcttgtttttattttattttttggatgggtcatcgtttctgaccaaccgagatgttgtttgaagacatgctttgttgccaagataaaccgtgaggtcgctccaatagcaatgaagtgctaagcaagcttagctttcctctctcatttcctgatccgaagcttctcatccgacaagtcacaacctgataatcttccatcgaatacctcgcctcttttctccatctatatggtatgaggggcaaatcttgtatcatttgatgcatccagaggtggatacatcttccgtgacctaaagcacccttcttttgatcgcctcttgacttttccgtcggtcctttcgttcacttgctcctgcaagtttgatatgagtctgacgatcttgaaccacatgaacagggaaggttctctgggtaatgtcattgactgatatgctgattcgttgactcagaagcacggttcttctccttcctccctcatgcctttcactctatcccgtccaaaagactgatacaaagctttacggctttcttatatcttcttcctggctgtaaacggggtagatacctgagattgttccgaagcgcttattctcgctcgacctgataggatcaggcgagaaagtgtctctccctctctctccctctctctctctcttccttctttggacgaatcaagatccttttcgatcttccagactctttctctctctctcttccgtatactcttatcgatggggcgaaaaagacataaaaggccaaagcaatgtccgacggaatcttcttctctctattctctcatctaaacagcttcttcttaccagtctcctttctccttctcctctctcctcccctttacctcatttagttcttctgctcatatcgcaataatgcttgcctctactctgctcgctcttctccccatcggtgcttcattggtcaacgctgctgccttgctggatatccgggctgctcctactgttcccatcggtatgtatccttgccccttctatccgctttctcttctctaccttcttgcgcccttcacatcagttgatccctcatctttgtggcttcatacagttgccctcgcctaccctgtaagcttgtagtttgtcgacagattcatatgtttcttcgatattgatttcgcctttttccttggcagccttcacgtggattgtctttggatacaaacaagatcgctccgtaggttcattttattcatattgaagtacctgcgcgctcttagctgactcctcctatgtcacagctgtggaggatatgctatcggaggtcgaatcaactatcctttgagtaagcataatgttcaaccatcttccaaaactgtctttgaataaaggttgctcaacacctctttcgtttttcgttcattctttctttctttctttctttcagccggtggagatctgtctttgacccagtccagagacgcaaaggacctccagttctcgtactctacctctgctaacccccagtccgtttcggacttcaagcctttgctagccgaaaacatcactcagctttataaaggaaccacctgtgtttcttctcctgtttgtcttcgtctatctttatcacgatctctattgtcacaggtgctaatccaccgatcgatcgatgtggggccggttttgtagaatctcactacgctgggtcttagtgccggtgatcaaatcaccatcaaagtggagtatcagtctggaccttctgtacgtttgtttcatgttcgtcaccctaatctttgtgaggtcgcgatactgaagtgggttatcgcatcaaccatgtccttggatgatcgataggcaactcggttctacgaggtgcgtccaaatatatatcctcttcccctcttctctgtcgcctgggtcaacaaagatgatattaacgcttccctgtttcgtttcttgcttgtggatgaacgacctcagtgtgcagatcttaacctcgtagctgcctcttctttcaccaagccgacgtacaactgtacaaacatcattgaatccacccagaccagaggaaacgccgctcagtccgctcagtctgtcgtttcgagcgctgctgctaccgctcaagcctcttcctcttccgttgccgccgctgctgccacttcgacttcggctatcagcggagcgtctaatctcaagatcgggggaatgggaacactcggtttcctcgctgttcttgccgcctttgtcgctctctaattttgttaactcttcctctctctctttctctctatctacgaacgtgatatcatctgttctgatcgcgtctgtccttatctgaatcttgatctatcgctgtgtatacaaatgtttcagttcctttttttcttgtcttgatggaatctctttatgttctagttcaattttgttcgtctggtaagatgaacaaagattaactaagacaaaatagacctctccttgaccctttgctgtgaaatctcctgtcgacacttatatatattaaagttgtgctgttttcatgatgacacgcgtccttcttactctgcgatatctggagaggaagacatttaagagagaaataactcatgaggcataagagagcaaatggatctgtaaatggtgtagaatcactacaagggggaaaacgtcgatgaagaaatttgagaaaagatcatcacaaaacggagtgacaggctggtagattgatagaatcagaggggaaaggaggaaactagactttacagtaaatgtagaaattggccagaagaacgcttcaatgattcaactttggcacaaaaggatagatagacgaggagagaataggcgaagtgtatgcgaagagtaagaatcaaagaaccaaacgagtgtccaacaatgagctcatccgactattcttcgtcggcgttgatcttgggcttctctttaagcacaagaggttctgttatcaacgtcaatacaacacggcttttagtactcttcaccgatgaactgagaagtcaaataaataaaacggaaggagggaaagaaagactacgaacctcccatgactcgctcccaaacatctttgacgtcatccaccacggtctcgaaatgagaagtagcgtcgtaagacttggtgatgaagatgttatcctcctttccagaggtcgtgggggtgtactgaggagtgattgaaacaaacctgcaattgagaataacgcctgttagcaagttgagcgtagggtaaaaaggaaaggacaagtacacttacttctcaaggattggacccaacagctgaagtcctggcgcaatctctcgctcaggggtcgaggtctcaatgatggttgaaacgatagcgacagtgtagcctttggcagcgacattatgcgatgaagatacagaggcgatgtagatgtctagccatcaaaatgaatcaagaaacgagaagaacaagagttagctcagaggggaaaaaaggtcaatacgtgaaagcagacaggacgaaccattacgcctgttgacctggttctggggaataacaatctgaacagagtcactttcttctgtgccaggaatgttgtgcttcaataagcagatcgctcggatgaccttgccctcttccaagaccctgatctttccgccctctccgtcctccttgccagctccgaagtaatccggggatccaatgaccaacttggccttgacggtctcgcccccactcttcacaccaacaaacttgccatcggcgtcggttacgatctcctcgatctgcttatcgagcatgtacgttcctccgtggatagcagaaagtcgggcgaacgcctggggcagctcacccaatccgtacaaagggtagatgtagggcgatttaccgtatcgggccatcgaagaagtgtacaaaatgatcctctcgtacgtcggtcgagcaggcttggtcttgtagcttcatacgtcggagaggcaaaagaagagtcaggactgggcgtgttttaaaaataaaagtggaaggaacatactcgtcatccaggtagagggccatggcatgcccgatgaaatcctgagtacccgcttccaatccaaacttttcgtagatcttcttcatagagtccttgtccagatcgatacctgattaccccatacccatcaccaaaacggaatgaagaaacgagcgctttatgagtttacgaatatgtctgaacaccatagataattcagaggccgctactgatctcaagcttaccttggtgtgtggcaggatcctcgtctctccagttctgcaagaactcgaagaacttcttggcccgtcgcttctcaaagattcccatcaagctacttcgtagggcctccatctcggtcgaaggcactttagaaattcggccatctctgtagacgaatgagccggcaacctgccggaactcaaggtatcgaagaacatcggttcgtaccaagatcttgacaagctctcccgaagcgatgatgaactgaatatatcggacagcagatcgagggatagcaaggtcaaccatggaagcgtgtatgcacataagctgacttgatcgaacgcaccttagggaccaggtccagagcccagtctcgatctttgccatactcggtaggagggttagtcccaggtcggaagtgagcaaaagtctgcgagcatatgataggcaacaaactgatcgagcgttagataagatgcacaccagcaatctctctgattgatctgagatggctttgtaagaaaagacttgcctgggtcaagttcaaggaggcactctctcctccatagtactggtttctgtccatgtgaagaaccttctttccggcgacggaaagtagaccggagaggatacactcggtcaagccggtgccgagaacgataacctgttttacagaacaagcatataagcataaacatacgtgtttgtgtgtgtgtgtgcatgtgtgtagatggatgtatcagtgatctttggactatcaatcccatcttgacacaacgaacgagaaaaaaggaggaagaaatcccctgaaccggataaaacacagacacaatactgacatcatattcttcatccatgttgggctgtcaagcgatcgatgtatgcttgttcgggcaagagttgaatggatcgaacggatggggtgctgtgtgtgatggtgtctaacgaggtagaaggctggctgggtgtaacagagcctacatcagacgattgacgtaaccctagagatgtcgttcacctaacttttgggttccctagaccgttgggttcatccagaccatcagcaagcaatgtcctccagatcgtttcctcataacaaggcattctctaatccaaagtttgagtcttacaagctatccagatcagagtttacttcaacctcttttgccgtaccgggagcatcaatctctcagcggggtgtccagcatggcaagacgcctctgtccgttcgagaaattcagagtaggatacatcatgaccatctcgctgtaggctacggaggatggatgtgttgggtggacgagacatggaacatatgggccatgaagattggtgaggtcagtctcgtttgtttctctctgtgtgatccagttggatgcttttgtctggacgctcacacttcttgtgatttctttgtcgacgtttgtgtacccggtgtttcttgtagacctttgaaccagtattctcacccgtttgctcactaccagtgcccgtcgagaacgacgggtcccagccatcagaatatccttccatcacttctgtctctccaacaacatatctcgcctcggatggtcgcggccggctgtatcctgtccatgttactccttctgcaacctctctatctgggactttgggaccaagctacgaacttcttgacccttcaagccgagaactccgaccgttcaaggtcgagtgggtcgcaggagatcaaaagatcttgatttcatcggccaagcggaccaagctagatgatgacaaaggatggtccagagaggccggtttcgatatcatgctcgtcaatttcgatcatgatgacagtgatgagatggagacggattcgacttctatcaaagagctaaatattatgtgggagctacatggaaaagacgctccgatatatgtctccttcaaatccgagcacttcctgataggatcatccgaacactattcgaatctgcactcgccttcgtcctcctctgacgatactctgttaggctctaccgattcacaaccacgctcagaagattcccaaacatccttcagttggacccagacgtcgaactcgatcacaatctccgttccgcttccccaagatactcccaaatcgcatatccatatttctatctccccgaaacatcttacaatatcactcaactccagttcatcctccatgaacgtctttcccccgcttccaggattcgatcgtcgagcgtggtgggatatcgttcggcctgatgagagcttctggcagtgggaaccctccgagggactcctaacgatcgaactggaaaaaacgaatacccagaccagatggccacacttgttcctacccaactcgaccgccggagttggagacatggctgatgtcgaagagaccctttctgacgaaacaaggtcggcaattgctgccaatctcgccaagtttacgggaccaggtccatcaaacgaggaacttccatcagagttgccgggcggcctgtcgagtttgttgagggacgacatggatttggacgatgatgagcgggaggacggttccggagaggcagcaggcgaggacggagaaagaggcggagtgggtaaattggttaaatggtcattcatagggggccgtgaagagaaaaatgatgtgttagaagcaacaaaggaggaggtcaaggtcgacaaattgattggcgcagaacatgtgatcggtagcgagctggaatgggtccgaactggtttcagaagaaatgacaaccaaggagaggagatcttggttaagtactctgtatgtcccatctactttgctacagatttaccaaggtatcgtgtttctctccgccagtgattctgaaaacgaaccgtctgctcttacatccaatccagctggacgccctgcttttcaagcccccttcagactttaactctccattcacccatctcaagacattccctgcactttcctttgtgctttcttctaaacgagaaaccaaatatatcctacacactcccttggttgatcatttatcgcccgctaaagttcttgccttcacttcgcctacaacggaaggcgcgcagggtgatttgttcatctaccaagaggccgaaggtcagatgactgctccttcgggtgtcttcaagatgggaggaggagaggaaggcgctctggttggggtcaaagcggtcaaaatttcaggagaagatgtgttaatcgggctgtgtgagcaaaccattgtgttgctgagaggggtattgtgatctagcgcaactagctgccttgcttgaagtcaatcaagataatgataatatggatccttgcatcgtctggaatatgtacttagttctgggcaagccatcaacactctgcactaccagcctatctgagaaacagatcgtagaatgaatgcgagcatctcatcagcccgtcggatattgctgctcagttcgcacgcgaaagagatcgatgacgtaaacattacactccatcttgattattctccgttgtttccccccgccttctatcttcactacatccatccgccgatcaaccaagatacaaactttgtcctcatagatcttgctgtatctcgttgagcctcgctagacatatatcggacgtcttcaatgtccgtctcgcttcgtctcgcatctcgaaggctacctgttggcctccgaacgacccaatcgtgtaccagtccattcatccgacaagccctctccccctatcggcgatcgacctactctagcctagcttctcccacatccacccttgaaggctctagatcgacctttagaaaacagcatttgttccgtttcaacaagtatctttattatgtcgttcccacagcaggtctattgcttgcgtttggtggcccgaacatacagttctctgccgagacaaatcatctagcgccaaccgagcaggaacctattccttcagacgctctgtccactatcgaggatcggccacggaggacagtgttgtctctcctgaacgactacatcctcgaaccgttcttgacaggtcttaggtttcttcacctagcgggactcttcttacccgtcatctttttggtcccggtcaccttcttcggacagcgagaaaggttgaagaatggggagaagggcgatcgatctggtgcaatctggtggtataaagtcctggtcaagcaaatggagagagctgggccaagtttcatcaaggtttgtaagagatctgagcgacaataatagcgtcttgcatgccctcaaactgattgctgttgtatatctgactcaatgtagctcgctcaatgggctggctcccgatcggacttattcccagctcacctttgcgaagctctcggtcagcttcattcgaacggaaagcctcattcattcagacacacccgacgagtgatcgagcatgtcttccagaaaccgttcgaagaggtgtttgaacactttgatgatcaaccaatcggttgcggtgcgatcgctcaagtctataaggccactctccgaccggagatcgtgccaccgtcatatagagaacccaaaaagcgtgtaccaagcactccatctccggtgattcctacgacgacggtcgggatcgatttagcatctgttccacattctgcagtagctatcaagattcttcatcctagagtacaccagacgatcgctcgggatcttcgaatcatgggtttctttgcctcggttctcaatgcattcccggggatggagtggctttcattcccggatgaggtcaaagtatttggagaaatgatgaaccaacagttagatctcactgtcgaggcgagtaatctgagtcggttcgaggaaaacttccagctgagacggaccgccatcagtttccctagaccggtcagagattttagcacaaaggatgtactagtggaagagtttgagaacgcattaccgctcaaatacttcttgagaaacggaggagcccagtatgacgaccagctggccaatatgggattagatgcgtttttggtaagctttatctgaatctttctcagctactaaaacccccctctaatattcttgtggacgtatgtctaaatctcaactcggttgtaatgtttgtctgaatctggtagaacatgctcttgttggacaactggactcgtatgtaaccaccctgtttggtcaacggttttatcgacatacgttatctgacttgcttatgccgatcttatgtactgaatcagatggcgatctacatcctggaaacatcatggtccgcctattttattttgaacaacctgatctccattcgtctttctcatacacttcctctttggactttactctcaatgtgctaaccgcccgcaggtcaaatttttccgacctacgacttcgaccatgttcagtagtctctggaaatcgataataggttcctcacaaccagcctcgccttcagccaactcgactcaagccgcgaatgagtctgatgagattgtagctcgactgtctcgattatctcatgataaagaggcctggctagctgaactcgataggctttacatgggtggttggcaaccagagttggtattcatcgatgcgggcctggtcacacatttggacgatttgaataggcgaaacttcttagatttgtaagtttcaagacttctcgctgtgatagtcacacgatttggtagaatctgattgtttggttctatcgcatattcaggttccaagcggttgccgagtttgatggatacaagggtgagtaacgcatttgtgtgcgaggttttgtattcttactgatgacagtccatcgaatctccttctcgatccgattttcaagccggcaaattgatggtcgagcgttgccgaacgccccatcttgtgattgacgaagaaaactttgctctcaaaattcaacacctcgtactctccgtcaagtccaagacgttctccctcgcccaaatcaagatttctgatatcttgactgaagtcctttcagccgtcaggcgatcgcacgtcaagatggaaggtgactttgtaaacacggtgatctcgatccttctcttggaagggattggtagacagctggatccgaacatggatcttttcaagagcgctttgccgattctgagacagctgggtcggcaaatgggtacgagggaggcgatcgggcaagtacctggtaaagatctcggcgcgatgatcaaggtctgtccttttttcttcattcagtccgatccatattgatcaatacgtcgaaacttggaggcctggtattgattcttctcttgtattttgtataatgaaacgatatcatcagatctgggtttggttagaagccagagatctcatctctgcctcaatcgttgataccgatacgttcattaaatacgatagattaatgcctaatatttaagaacctcttgttcatgtttctttcctcttagataggaaagtcttctctcttcttctcctctctgctctttctggatcatgtctggctcatctatcccattctcttcctcgtgcactgttatcttgagtcatctctcgttcggcattcgtccgacaatattgtaacctttctctctttctcttcctttgtctatcgtctatatgtccgtctgagttatgatgtatctgtttttgcttggaaacattctgcattttcaatgaatcacacaatctcaatccattgtcgactaaatagcgcaagatccacgacagcgagaagat

SEQ ID NO: 2043 - DNA, 6476 bp, Xanthophyllomyces dendrorhous
aaagaaagaaagaaaatagacaaaagtgtaagaaaggggagggggattgaaacgacaataatgagagagtatcatatgtatgcgaagatgttgcatatgcgaagcagtctaggcatagatcttagatacagagtcagttcatgtacaaggagctatagaaggcattcagtctatagacaaggtcgtaggttaagagatcagcttatacacaagggtcccacaaaagatgatctatgtacatgattcaggtatgagacactctgaatataaaagacatctatggtgtgaaatataaacatcatgtggaacgtctatttccttcagatcttatcatgagtgaagccgttaatgtgaaagtcatcgggtgtacctccattgagataactccagagtcttgaaggttgtccgtcagtcgatttgagccaaaaagaggaagggttccagttggactatacaaccgataaagaaagacaaacaatttgagtcgatgaatatgggatgtgttagatttcgacggtttctaacttacttcaaagtaattctaaaaagaagttgacataatgaggtaagccaaattcgagaggacggcgagtcaggagcctagtatttgagctgacgtcaaacatagtaatagaataaagaagattctcacttcgactaggagatggccagatttatcgggtcggctgaatactgtacacatttgttctcgacatcagtattcagttttgttcgtccgagaggacaatctccaagctaacggaacatatcaaatcacgcacgccttccatagaatcgagtatctacacggtcacttgcgggaacatcccaattcagcacgccaattctggcaacgaaatcatgaccgtttgcgtaatgctcgatatgtttaactaaattccgtcatttgacgcggagaggagggcgtcgaacggaggagatgacacaatacgaaggttgcatcaggggacgtgaataagtatgtttacctcgaacgtgctgacttaccaacaggcgacccttcatgatctcgagaaggtgtcgtgactggagaattaaagtgattggctacgacgtaaaccaacccaaggatggtgaatcagtgttgttttaccgagtggactaaacgctttgggatattaaagtcctacctgcgtttccgaacgtgtaggtttccaactgcgcagatcagatccattggagaaaaagtccgcaaatatataagttctctgtcctgtagcagtagtcccattcgaaactgaccttctgcaaaaaaacctgaataatgtggtgtgaattaatctcaactcgttcattcttgaaatagagagcggcatcaaatgatagaatttactcacttgagggatatctgacaggagatagtcaaggatgagagaagatatgatgccaccctgatgagaatattaaagcctgaagagtcagtcatgctcgcatatgaagcgataaaagtagctgcagtacatacctgggagtgtgcaagaagcaccactcttttcgtgttcgcatccaagagagcccgtttgagtcgatcatagagctccaatgttccgtcttgagtggtatatgcaaactaaggcatcagggacgagaaccgcatcaggaatggtgttactgtattatgtttataacaatggtttccttacgtctctttggataatgcattcaataatgtcaaggatgaaccctgtgtggtttccaataaacatttcacggaaatgtcagacgcgttgagtaatctcgataagtaatgatgtaaaggctaccatttgtctaaaagtgcatgtgaaggagccgatgatgattgaatttcagtattcgcttggagtgacgatgtttcactcgggtcgttgctcagacctactttgttatgaactccagtgataggccggtcaaacctgtgcatgcaatccaacaattgttcatggacacatccttggaagagggagaagaacatggcagatgacaaagatgctacttgcatttgagccatgaagtcaatatccctttgaagaccttcgttcccggtgcactacaaacagaagaactttcagtttggttactatccgtcgagtgaaaggcgagtgactttcaagataacatgggccttacaattccattgatgaagaactgggataaggtaagagaagaataattggataagaaaacacaatgctgagtattctctaaaagagaaaagctcacccattcctcatcgtcacggttcgacgtaggttgatatttcgatgtgataacaacaccaggttgacatttgcttaaataaagcatgaatagcccaacggaggacgcaagggttagaagtcctaaaacgcccgacacaactgaactccagaagactgcacagatggcaatcaaggatcctacagtcagtaggaactgctcgcctatggtcgttggggtgatggcgcgcacttttgaaaactctcgggacgaaagggtgctttcagtagtgatcgagggcttgagagagattagttgccagaagaggtttttgtatttccagataaggagcagatcagatttcatcaaactgaacgggtaatccctgaaagttggttcctagattcgatgccattgttgtaaaagtatcagttcatgggtaagaaaacaacgcaatgcacttgcgttgagcacgaactggtgtaatcttttcagccttcaattgagtcaagcaggatatggtattgaaatgaacaaaatcctcccgataatcatttgcagaggacgccatgatggagattggtattgatccaagggagaacaagattcagggtgagagttacaaggagatgagacgagatggtagtatcaagtccaaaagagaaggaaacagatgggatgaatcaatgagtgaattagtttcccgtgaacgtgcgagagagaatgatgttcaagagatatgagagatcctggctcgaggatccgttagctggtcgtcgggtacagagttagtctccatagcggcttgatctctttcttgacgagattgatgagattgttgtccatccatcgggtcttcggggttacacttacgtaatcactaattgatcgttagaaggattattgcctttttttcttctctctgctctgcctttctttggaaccatcgttcgttcattaatcagagggcttcttctttgtttatcagttatgatcccatctaggacgatgcttccactatcctcagtctgtggctctacgtcgacttctagcttgaccaagtcattaacggtcaggttaggttccctctccctctcgcgaaaaatatcctcttcctcctcttcgtcttccaacacttctaccagcccacaatcgccgatcccgtccgcttctaacaatggtggctcgttttccgccggctacctcggacgtcctatcaagccgattgtcttgtctagaatgccaggggggttctactccaagagcaacagatcgacagtcaagatgtcggaggcaactgctagagaggagttccagaagtggtgtcagacgacaggagcagagttcaagtggccgaagcctaggacccgaaattggctcggagggaccagagtgagtgtggcttctttctcactttgtctgaacagcctcttggtcgtctgtccaagatgccgtgtccgtcttttcttttgtacatcatgactgatgaaaatgatgaacttcccttcttcctacagccttatccggcaaacccctacttcaagcccacccctcctctatcgtgcgatctgcaggaagaaatctatcaactctacaaaagcttcccgggagaagtcggagcagttgaacgaatgaaccttctttcagaaaagtactcgatttccaaggagcgcgtcacaggagccattaagaccggccaggtcggcgaagcttgggctaaggtggtgagtgtcgattttgtttttcttccttttcttatgttgtcatgttcttcttgatacgagaatgccccataaacatgctttctcattggcaagtcgctgacaagactgaatgtaatcctggttttctactgtgctctccctcacgacaaacagggccaacctccgcaacgtcctttcgttcgagggatggagtcttacctctgcgttcctgaacacaacgtctcgaccactcacgagagccaaccgaggtcaaacgctgctgtccaattcacccaatatcttggttctcgaatcgacatcgagcgagatctcgagacagaaaagctcgaaactggagaacgatcacatcggttcgaagattctggattcgatcctgccaccgtcaagtcgcttggtcagatgtcatgggagatggtcagggatggagaacaggctttgacatcaaagattgcgttggagaagccactccgaccgccacctgctttcccggtcttccccaacaaggtcgtcaaggaggccactcgatcacctgtttggaactttgttgacgtcggtggtaaattcaacggactcgcctgggacggtgcattgggacgtaaaggacactgcccaccttcaccgatgaaagccattaaacagttcattcctcttgtcaagactcggtctggaccttacgatccgtttgccaaacagaaggctgacagggtgaaacgagcagctagggcggccagaaaggaagctttgaacgccgctggtgaattaacgcctcatcagaagattgttgcaaagatgacgccggcagatggtggtctgccagttcatttggttcaccaagatatcatggtcaggaaggctaagtacagggaagaaaagaaggcgaacaagtaccagcttcgggttcaacaagaagcggacaagagagcagaattcaagagaatggtcaaggcgaagatcgagggattggattgaggtactcttcagaggttcatccgcgggatgtgtatgcatgtttatttcctatcttgattctcatttctttcttcttgatacacacacgtacatgtcttgaagcacaacacaacagtgaccaaacacactctcactctttagctagaaggaatgtatcgatagacactcctgagcgaagaactggtatttaagggcatgttatttttgtcatctccctttccctccgggcttctcgtttcctttctcttcgaaagtatctcaaccgaattctctacttggtcttgggctttttagctatgcgagagaagagatacaacaaaaatgtagtgcagagggccgattcaatgatgtgtccacaactgcacagagtgcatctatcacgatcaaaagaaacaagagattcaacttacttccatactttgaacgagacctcactcgaccgaccacaccagcacaatccagcgcgcctcggataatcttgtacctgtcgggttgtcaagttcgttcaagacatacaatagagcagatatgatcaacatgactgtcctctttccgtatttctttcgatccggaaatgacgaagccgcttgggaagatacaaagaagcacgcaaagggacggcaaaatcaacggactgactttactccgggcaaatcttgtgttcgacctcctctgatcaagaccacactgtgttcttgaaggttatgtccctctccgggaatatacccgtaggtgaatttaccggtcgacaacttgatacgagccacttttcggacctatctcgatgcagagcagaaggacgagagttaagtcgattagccaggttcgcctcaagacgatttagtttcagaacgagatgattcaacactctcttgactgaaccaagaggtctcaaagacagctctctagacaagaaaggcaagaggaattcgaattgagaaaatgatcataagaacaaaagacgaacggccgagttgggcttcttaggctttgcggtgaacaccctaacgcaaacacctctcttttgcgggcacttttccaatagtggagacttgagctttcgcttcgtccttctccatgggtcggtacgagcccctcggatgacctgattaagtgtcgccggccggaatagggtggttgagagtgttcgacggaaagcaggtgaagaaggaccgatcggggctggtcgagcagcaagccgaacgagggaagagataggagaaaaagcagaagccagtcgggaagacgatgatgaagccagaagcctatagggtagccgaagagaaagagccatgttggagtgagagagtaagcagagcagagcagctgcctgatgatctgtcgatggataccttcctttcgttttccttcccctcaaaggttaccgggaagcaaggctcgtctgatcggttagttaagccgataatacttgaatactcaaatataaacgactatatgtctatccgctaaataagctaaaatcatctggtaattcaaatatcaaacctgacgatgtcagggaggtgacctgagtgttacgccccggtaaccttctcctatctctgtcattcctcttgcttcgct

SEQ ID NO: 2044 - DNA, 338 bp, Xanthophyllomyces dendrorhous; identical to SEQ ID NO: 621

SEQ ID NO: 2045 - DNA, 11504 bp, Xanthophyllomyces dendrorhous
agagcataggaatagcgaagcaagaggaatgacagagataggagaaggttaccggggcgtaacactcaggtcacctccctgacataacatgtgtgagtcacaggccacgtgacccatagaagtttctatgaccatctcgaattatctcgaccgccggagaacgactcttccacgtccacacgatacacgattactgatcgcttttctagctgaccgagctgactgatccgttgaaccgagaactcgtcgacgtggaagcttacaccggagacatataagaacccttcgtgttgagtctgtggctaacctttttatcatttccattcacattcccattctcgttcattctcttgccaccactcatattcatatttcttaactcactacccttaccacctattcactacatcacaatacatcacacccaccacaccacacaacacttcaggtcgaacttgcacgctatgcctttcgtatacatccctgactcgatcgagcccacattggtgaacgccgatgccgctgattacaaagtgtaccctagagagcacgcctacctgtacgatgaaccaaggtttgacggatctcggcatcgagccccttatcctcatacgtacgcgccacctaacccatactctggatcgtaccgagatctatcgccacaccctgatccgtacgctcgtgctcatgtccatcctcatagtggtcgacaccacactcgtccccacacacctactcgaccttatctcgcttatccttacgaacctttccaagaatacgaacgaccttataccgaggtagatcaatacgctccttcggcttatcacaacgccatcaaggcggctcgacgacgagccgagtatgaggccgaagcgctggctgctgctcgagccgagctcgcagcggagaaagtcttgagagagcgagctagagctgagcaacttgcgaaagctaaacgagccgctgctatcgaggcctatctggtccaagaggccgctcgtaaggaagaaaaggaacggcagagaatgattgagaaggagagaaagcgatatgaggcggcgaaagccgctgccagagaaatggttatccgagaagaaaaagagagagcaatagcggaggctagaaacgtaagtgcatgttttttgttatttgtttcatctttttcgtgtcaagtattgtttggtcggtgaccgttgctaacgataccccatcttgtaaatctctgtttcggtttttcaaatctattctacagcgacagccagcaaagtcttttcagcaggcactccagtcggctagtcagaaacgttcagcgttctttcacgatcgagcggtttcgaagcaagccgagtccgacctagttcgacatctgcttcagataactggcctcaaccaatctcagcttcagtctcgatctagcgctgatctccgtgccaaatgtcaatccgagttcgaagccggtcaatccgcgtgtcgtcgaaagcaggcgaacgacgataaggaatacgaggccgaaatgttggcgcgtttgatgtgtcctcgacacgtgagtgagagttttgtttgtattgtctgctatcttgttttacgtttctgactttgctttacgtctttgttcaattcagcagtctgcttgttcagccgccaaccaagaagcaactccgccagctcaatcccgtccaactaccgctcaaccagctgcacctattcagcctgctgctcaacacaaagctcttgaacaggctgagattgatccacttcagtttttgcttcacctagtcgaagctgcgtcaggaaagaaggatgagtctgccccggacgcttctttccagcctaaagcctccacagcaacgtcaaccgtgcctgtatggcactgggtccctcatccatctgttcagaatcctcctgctgtttcgacttctgagcctaagcctaggatcaacccttcctctgttctgacggctacccataaggctaattctgaaacccccgttacacctgcttctacgtcttcggctccctctccgtccctctcgcaatcttcatcctctcggttacgtctatcaaccctggacaaccgactttcatctttggtcgatcgaccaagtgacaaagcgctcagtcggagcgagcttgagcatgaattaactaggctcttgcttgaggctgatgaaattgaaagcgatggagacgagaatcttaggggagaccgaaagcagtttgtcgttcgagtcgagcgtgtccttgatacgttggatgtcgaacaaaagcagccccagtcccagcctcaggagaaggctgaggaggacaaacatgacgagatcacggataaggacgaggagagcttggaacctacttcggcgcccaacactaccttggtgtctgagcctcttttggatcctacgcccacaactcaatctacggacgatgcggtggagccgtctgaggtgccctctggacctgaaaaagaggttgatcacgatttagccgatgattcatccattcaaccacagacgtctgacgaggtgaaacccgacgattttgctgaggagactccggctgtgatctcttccacggacgccacttccattacctcgttgcttgggtccactgccgctttgccttccaatcctgttgccgcaacagaggatgtaaagagcaccaatgatgctgtatcagacgtgtcaagtgaagcttcctccccgccctcttcgcctgttgtgactgcgagtcaaggggtgcaaagacgtcattctgcgggaagcaactcgagcagctccagcagcattcgacgtggtcgaaaggcttacgtagaggatgctgttgaggatggagaggatgagtttcagctcgtctaggatcacctctcctatctatccaaccataattttcttcatataacttacaaaaattaattattacatagataccagtatatccatatgtgtcattttttctttcaatcgtgttttcccgagcgaaccgttgtgtgataataatgatttttttctcgaagcctgttttccatttcatttatttgagtggtttctacgaatcaaaacttaaaactcttgttgatggcccatatttataaggtttgtaaggcccaccgaagcaaataggtgtgacctcatcggtggccggccgttagggttaaattgaaattgtgaatcttcccaatggacatcatctcttcatctccaaacgtcttgtgcgaacagcatactccttttgaccaattgctccgcacctttccacctttcatctcatctacagcatcagcccttgtgctgacaactacagttgctttctgctagagactgttgacattctggatatcttatcatcttgacaattgaacatgacaagcagatcaatcaagtgtacgtcgcaggattccatgttcctcattgttcctagaacgtgccaacgtacatgaggaatcaagataagagtgggggtcaacacaacgtctgattatactgcttcgtttcaaccctgactcattcctgttacctggtttcaggtgtcgttggtgagtctctctttccacaccgttccagatcgttctagagttgaatcagtagccttatgaaagtttggcattgacctttctgatgtgatgacggatacagtgggcgatggagctgtaggaaaggtagacatgaaccttttctcatcctaccccttttcaagagatatactgatatatgctagctttcttcatgctgttagacctgcctgctcatatcgtatactacaaatgtacgtctaatcaatcatagagtgagagactcgttgtacgatcttgacaaactgacaaagattcttgcatcatcacttaaggcctttccggttagatttatttataacaggaacctatcgcatcgattgacatagtaaaagcgctcatatgattaagtttctccttgtatggtcagggcgagtatattccgacagtatttgacaactacagcgctcaagttcactgcgaaggaacgaccatctcgcttggattatgggatactgctggtcaggaagattacgatagactgaggccgttgagttatcctcaaacggatatctttcttgtctgttttagtttggtctcggtacgtcatgctcagtttctatcgatatccaaggatcatcggattaaatgattcgtatattttattgaacgattggttgtccagcctccgagttttgaaaacatcaggacaaaggtgcgcccgagtgtgcttaagccttccggcaaacatgttgccgtgtgtgtatggagctgatgtttgagttgcgcatttttcaacccactcacctcagtggattccggagatcaatcatcattgtccagggtgagtttattagtttatctccatcgtctcgggtggtcaaaatcttgtctaactgaaaccatccctatcgttgtatagaactgcaatcatactagtcggcacgaaacttggtaaggggggtttccttcccgcagagtttcagctcagattgcagcgacacatgacatagcgctgactattcaataccgaattttgacagacttgagagaagatcccataacggttcaaaggttggcagagagacgccaatttcctattcagtacaccgctgtaagtttcttatgttctgtaatatctctaggcatttgttgacggtgcggtttacgataatcaattaggctgccgcagctgcgcgagaaataggcgctatcaaatacttggaatgctcagccctgactcagacggggctaaagacagtgttgtgcgttgcaaccatatctttctcttggcttttgcttgaatttgacgtcttggtacgccatttctaaacaaccctcaatatgttaaattttgcactttgcctaactagcgatgaggccatccgtgctgtcatcagaccatcacctaaggcgtccagaaagaagggggcttgtgtgatgatgtgagatttggactattgcgcacatagacttagtcctcacggcacgttccttctctcgcttcctatacttgtcacctttccaactgcatgttctcagctttctacattatcatcgactctacatcctttcgttgatattcttctactcgttctgaacatcataccgttcatatatcctcatatacaattattgcatcagctctcaatcttacgattctttcaacgtacgcctatccacagcacatgctccataccttctgtctctacgtatatagcctctcgtatcttacaagatctatacagttcatattgtaggtcgctctgcataccgagtttcacaatcttttgtcgtcatccttctttcccgcacccactcttcatgatatattcggctgaagacgaagagtgaacgttgatctgtgtaagaaatgatatctgtagatcagcgttagagcacttccgatacgctgatttcaagaaaagatatgcatcactataagaagttttggccttactgatatcgtgggttctccttgttccacatatgagcaagatgtacaatataaatagtggtactcgggaccacaactcatctgaacacagacattcgataattcattcgaatgtcttcgttggattcgatctgcgtgaatagacaacatatgcgtgcaaccttgaatgcattagcttgagatgatacacatagaaatgggctccaaggacgatccctgagaagggcgattagtagagacgacgcgcgaacgatacgggaacagaatagataagataagatgctggccgaaccttgggagaaatcaagtcccgctgtcttctcttcccttattcctttttgtatgcacttgatcaacatggcaaactgttccgttgagcatagcatatcctctttcgtcttcgttgcatcacattctagatggtaaaacagggacgggaaaagacagacaatgaaaaactaaaggatttggcaacgatcaacgtggggattacctaatgtttttcgtggttacggcccaagacggagtttcaaatgtaatcatccacattttgggcaagattttttgattgacaaacgaagagagaaagaaatccttcgccccaatcctcttcccggtgtcctaatcttccctcctctcccccccttgtctccttccctaacaatccaaccgtagacgagctgtgatgttagttctgagcgaatcttccatcggtttcgcccttttctcggttaccgacgagggcaaaatcggaaaggacgacctttacaaggactttgagtcccctgagagtgccaacaacctgtgaggtcctttcttttcttctcatattcttctcttccattctgagtgggaatggtcatctagatgatctgacacgtaaaaaggactataactgatatctcgtcatcttcactcttctcgcctaatgaactttttagtctcaagctcaaggctatccaccgattctcttccaccgctgatgctgttgaggacttgactcagctccaggatggaaagctttccaaggttctctccaagttccttgtggatgagatcactggttccaagtctaagaagggaaaggctgtcgaggagactttggtggtcagtgatactaagcttggaggagctatctccaagaagcttggtatcaaggtcgtttcggattctaccactatggacctctaccgaggcattcgagagcagcttactagcttgctcaaagggttggaccccaaggatttggctaccatgaaccttggtctttcccactccctttcccggtaagtcgagtctctttctcagacttttccgttctgtgtgaaagggtctggtgcagaattttcttctcagccaacgcgtgcaaaaagtgagcgaaattgactgactggacttcctccccatatcaatctgacaacagattcaagctcaagttctcccctgataaggtcgacactatgatcatccaggctattgctttgctcgacgacttggacaaggagatcaacatctactccatgcgaaccaaggtaagatctatgtgaattgacaaatttgcgtatcaagggataattctgatcatggtccatctcgaatcattttcaggaatggtacggatggcatttcccggagatgggtaagatcatcgtcgacaaccttgcttacgctaaggtcgtccgagctatgggtatgtcgaaactttttttttttcaaagtttacttcaggaatgtcagatggtaaagttttcgtgctcatgcctgctttatcttctaggtttccgaaccaacgcttccaccacttctttcgagactatccttcctgaggatcttgaggctaccctcaagcaggccgccgagctctccatgggaaccgagatttctgagagtgatatcaaccacatccactctctatgcgatcaggtgattgctatcaccgagtaccgagctcagctttacgaatacttgaagaaccgaatggctgccattgctcctaacttgactgctttggtcggtgagctcgtcggtgccaggttgatctcccacgccggatccctcctcaacttggccaagcacccagcatcgactatccagatccttggtgcagagaaggctcttttccgagccttaaagaccaagcacgatacccctaagtacggtttgatttaccacgtaagtgatttttcttgcttatctctgattgcccttataccggaaagagagaatactgaacctcatcgtgttttactctccacaggcttctctcatcggtcaggctccccagaagctcaaaggaaagatggctcgaatggtcgccaccaagaccgcgctttccatcagagtggacgctttgatggacaacgattcgaagtctgacgacaacgccccgacgatcggtgtggagaaccgagccaagcttgagtctcgacttcgagctctcgagcaccgacttggcattgtctctgttcgatcctctgctgctgatggtcgaaagcagaacaagttcgagatgactggtaacggagcgaaatacaacgatgtggccgatgcgaccgagttgattgccactcagcccgctgccactcccgccgaagagggcgccgagaagaaggagaagaaagacaagaagaagaggaagagcgaggctggcgatggcatggatgttgatgaggccaccaacggcgagctcagcaaagaggagaagaagaggctgaagaaggaggccaaggaggccgccaaggctgctgccaacggtggttagtcttcatcttttcttacttttgatgtttctgtttatgcatgctaaccatcgctcatcattatcgtgtcgacccattgacagatgcctctgaggattcctctcccaagaaggagaagaagtccaagaagcgaagccgtgaggagaacggagacgaggccgccgcaccggaagacggagagaagaagaagaagaagaagtcgaagaagtctgatgcctaagtcaatttaggtccttcttcttagattcttttctttctctgctcttttcacaactctctagcttccatgatctggctttacgtcccctcctatccggtttctctaccttgacttcgcatcctgtcttttgttcaatcctcttcgtttttctttccctttgttatttgtatcacagcccctcctcaccttctcccatcctctgcctcatcctcacccatcctctgtttcgcatcatctcttgatactttggtttcgtttttatcttttcgttcactttttccaattttcttccgcacgcttattcttttcgtacttgatgcatctaaaagggctctttatccaatgctcatatatggttcggattctcatcccctgcgagacggagtaagcatataatatggcataaatttggtacataggaactcctgagctatttgaactagtcgtccagtcttgattgaaaggaaacatcgaaacacatcaaaaatggctttacaacgtcggtaaagggactgattcgaggccaagcgaggccgaaggttgtataaattgaccggtggagccgttctgttctcgatttcggtcggatatacggacaaaggccgaagagggagaggaaggagatacttcaaagacctcttctttccgagtattcctcgcaatttctgttttctgatattctttttatctagatcgttcaatagcggctcgttgatcaagagcctggcgaaaagatcacgcgttgacacctcattcttgtcagtctgagtatgatctgaggggtttacagatgagataaaaggaaccgaacctgctggcaagtgaggctgcttccagagaacaacctgtcggcgtcttgaacttcatgaccgacctctcttccgaacgccccatcgctatcttttgtcgatgctctcggtcgaccatgatatccctatattcaatataagcccgaatggcatcatccttaagctgagcataaattcttggctgcgaggatgaactcctcagaaagagagcattaccttgacgatgtttcctcctgtaagcgtcgattcttcaaggtatgacccttcgtacgcgtgtatatgagcttcatgagcagcctgtccgagaatgcgggtagtgagcgtaggtccacagtgaagaaaaacgctccacaaggccagagacatacgagttgcttatcaatttgtctcttcttttctaaggcagcctgtcgagcgtttttgtcaaatggatacgattagcctggatgatacatcttgatgtctcaaggccaggaaatgtgtaccgacttgaaggacatgttgaattcgaccgaccatcggcgatgcagtcgtcattgctgctcgtagccacacatcccgtacagcgaacaaaacaaatttgcagtcagaaacatcatcaaaaagacacctcgtgaaagaccaacatactttgagaagtatcagcgctcgccatccttgtgcataatgtttgattgtagagtggaagcgaagcacaaatccggacgagatcatagaggatgcatgaggacgtgacgcgacttgatccgacgattacgtaactcactctttattctttacctgagatgagggatcgtgttcctgacccaaaacctcatcgcgttgctaactgtagttctcatgatacatctggtaatgaccatgtacaggtcgtccatattggatcctgtgcgcgtgtcggtggaaatgtacaagtgtgaatactgacaaacctgtgaggtgaattgagggtttgactacccagatgatttcagctgatcagctgcaccgcattccttgcgggacctgacatatcggctgtactttgcctcagaacatagaaaaggggaacgaggtgacgttagtgagagcagaagaagggggtgacagaactgtgggacaccgcctttttcgtagcattgtgccgttgtgactgatggctcttagcccctctgcctgtttcgtacagcctgtgctgaattcgagtatactgttcaactgattgacgtggccgttggtctctgcctcgtcgcgctatataaagagggttctttgaaacgacccacttttcatgttcacgactcgctgatccttcgtttggtaacttgctcctatctacaagaagaataaacactcacacttgactcttacttgactctcaacatgaagttctcctatattattgcccccaccgctctcctcgcttcagctgtgtctgcctttacggtcatcacgcctaacggatggacgacgacgggtaagcataacacaaccgctgttttctgcttgtgtctttcactaagtattgtctctctgctatatcacttttcaaaacaggtccaaaccagatcagttacacgtcagtcctttgatataatttgacgaagaatgatgatttctaatcttacttttatccttcctttatgttttaaacagttcggttgacacagaccagacctcgtttgctgcggtattgaaggcctcgagcgggactactacaatactgtctgaaagtcataacacgagcgatggaaacttcactgtctcggccacatggtaaggcttgttcttttctttcccagagagggcccttgggtcatgctgacgatctgtgtcccgatgctgcagctcggacctgtactctaccggagaaggctttgtgattagtatgtgatcttttccttgatcttccataaacacaggccgactgatgacctgttaattatttttaacaatagacttcatcatgaactcaacttcgttgaattcgatccttgcccaatcgcaaacattcaacattactgaaagtacgacgtcgtgctcagactcaacttctgcttctgcttcagccacaacatcttctacgtccaccacaacctccagttctgcctctgacaagtcatcatcggcgtccacgaagtcatccgccacgtcatctgcgactgcatcatcgagctcatctggagcgttaagcggtgcaggcgtgccatcgatgtttgttggtttggtggctttggctctagttggctcggtctttgtttgatatgtcaag

SEQ ID NO: 2046 - DNA, 66957 bp, Xanthophyllomyces dendrorhous
tttttatactcttccctctttactttccttacatgttagtttgactcgactagactaaaacatgctaggactctttagagatacgatacagatcggacgatagatgtctttcatattgtcaccatgcagccgatggctagatttcttgttgctattcttgctatcggtattattatcgttcttttcattgacatccgcttgctgcataaggttttcatagagagagtgagtcgcagaacaaacatcagaacgaccgaggatcgtatgaatatggttggaaaataaatagctagctagctagctaactggcggttttttgtcccggggggagccgttccgtaagctctacagagagggcctagaatctgtgcgcagcaggcctatcggtcggttgccctccgtagagcaccccagtcgtccggagcgaaaaacaaatgagctgaccgcaaagatagaaaatgtcaaccaaatcgaattgacgtggcggaaaaaaaccgagggtatgcgatgaagaacgaaaagacagcgagacagagaggcgcaaacagggttggatgctagacacaatgaactttcgtttgggttgagcagatggctgaatcgggtgaaagattcttcggaagaaagaaatgcattctttactctacagaatagaataagcctgatcagtctgataactcaagacgctttaactttgtgttttcctcttgtctatttctttcttctgaaccatgttcggatagaaagaacatatgtctattatgcagtcagctatcagatcatgtgttccagtaattggcagaagaacatcaatagttagagaatgctgaagaaaacaggggtgggacaaaggcccatggaaacacgagggagccccgatgatagttgaatgttgatcacctttttttcttctttattgatattctcgccttgcgtttgctatccctttctttcttccatcctccattcggtcccatcagcaagctctcacggccacaggttctaagctctgtgttctgtccaaacctcctttctctcgttcgttcgttcttttagctttcttccatactagacgtatctctgggcaatagatacatcgatcgaccgaccgaccatcactcagtctcgctttcgtccgcacccggagttggacctaccttttcttccttctttctttctcttgttgccttctcttctccagcgtttgtttgccatttggaccaacaaactgacagcacgcaatacttataatataatcgcctgtccttccgagacctcattgaacaagctcggaacctgctgggagtagcattcatcttggttcgcttgctcattcgatcgctcgctcgtctttgtacggtctagtagttcgaccaggccccgaacgctggccgtccggtgtttattctctgtcatccatcattgccaccccaatctattcggctcgtctggtttagtcttttgccaggacaatccctttctcgacattatttacacgttggtcctgcttttctatccatactttacctcaaactgtcctattgctgggcttcgggctgcactatcttagcttactgttcaccggctttaacgatgccctcgctttgtatacatagttcatcgtcttcatcttttcccgagatataatcccttcagttcgataaactaagaaccaacacagtccacactactttcccatcaagtcaaacgatcaaaaccatggagtttcctgatactcaatccttagccaacaaccttccctctgccgggtcttcctacggtcgaaacagaggtgtcccgtcgtcacagacctatcaccgcccaccggcaatgtcttccatgtttgctttcaacgaaccatccgctccacctatcactgatgatcatcaattcaatgtagcgctcggtcctactccccatcctcaccctgatccgacgatggcaagcagtgctattcgagcagaaggggcagcaggagcagtaggagcaggtgcagaacaaattaaaacctatggcgattctcggagagagagttcaacatacttacccgcacgaagaccatctcagcaagcccagtggcatgctcgtcattccggtcatgcctcttcatctcaaccccaacctcacttccaatcgcatccgcatccgcaaccgcaaccgcatttccaaccccaatcttcggcccgttcaatctcaaactcattcttgccctcacaatcagcatattcacgcacagaagtcggcactggtagctcgtcctatactactacgaccgcggagaccacccctcggctttcatccgcccctgatccgtctcgtccagaagatcacagctcgactgaacaaccctggtcgatgggataccatacctcgagaggattcccggaatctgaccaaaaccaagccactgggtctgagattgctaaccacactcgcaagagttctgattcagaagggcatgagcatgagagggaagtggtggaggaggatcagaatgaaggagacgaggaggacggaagtgaagacgggtctagcgacgatctttatggctgggttcaagaaagtgcagcagtgatgatgatagaagatggcagaggaaaggtcgtcaccggagacgcactagatatgaatcgaagtgaacagctcgctctggatctcatcggtcagtattggtcctctcaatcaaactaaacggttgaactactagctggcaatgctcatttcttctagcttcactttcaattcaggtataacacatttgattttgccgacaacaccgacacctgctctagttgttcccttccttgaggctgtaattccttccctgtgcgcttcactcgtagtgctagatatctcatcttgcaacttgtcgcacttaccggccgagctggctacgctattttcgcttgaggagcttgatgtgtcaaacaatcctcttcggtcgcttcctccatctctatccgaacttcggtcgctccgtgtgctatctgcaaacgggatcggatgctcaaaccttccttcgtcgttcgccaaccttcagaaacttcatacactttgtttacgaagaaacagattgctatctcttccttcctggttaggactcttaccgaacattgagacgcttctggtagaggacaatccgttccatgggacgtggagaccgttggttgagcagatgttgattcgttggtcgcccggtaaattagaggaccttcttttggagtccttcagaaagtcctcgaaatcagaaaatggacaaggctataactcagactctcatcagatacagtccaccgcgtcttcatctataggaatttcgtcacccttatctctgtcaccgaagaacgtaagctttctggaggaggactttgagacaatgatcattccttcggatcacacaaactctcaaccagacacccttcaaaactcctcgtttcacaattcatccgctgcctcttctccttccagctctatccctcggttacggtcaaatactgtattccagagtacctttagttctccagtcagccaaccaaccagtcttgatccccgacagtcagcgccacccgacacgcgtcgttccccgaaccatgaagaacaggaggatgatcacaattttatgcatggagactcgacaggacgattgatcccaagatatcatacttctctaggtagagaaggaggcaaactcgttagtgcggcctatagagccaggaagccgaacgatcacgatgttctggaagagtcaccgatggaggatcagagagcgagcctccgatggtctcctggagacctggccggaagtggaaaggaaaaagatggaaaagagaaagataagagtaaatggggtttcctgaagaagatgaatataggaaagacgaagaacgtgggcagtggtggtggagcgttaggctcgatagaccgccgaccatcaggacccgttcattctaatacggcgtctttattagaaggtaacactcggttccgaaggccgacgatcgcacgaactgctacatccgtcagtcaatccacttcagctggcaccagaggaggtcctctagatgtcagctcctcatccaacggctcgtcctccaaggaagggttcctctctccaggaggcttgacgtccgaggctgctctccttgccagacagaataaaagacgaagctatctatcgttggacggaccaccatctttgaacatctcaatccctaaaacttcgcctttcttatcaaccactacgttcagcaccgtccaaccgataccgtcgccttcctcgatgactgctacagaaggtaggaacaggcgattggaagatggaagctcggtgatcgatagctatattcagtcgtctgaaaactcgagtacgtctgatcacgaccatgatctccggcattcagacttgcacccactcgacttgtcttcagctgaagactacagacagagtcaatatgccgccggactccactctcttatgggctacctccgggatttaaatgatttgtgtttaccacccatcgttcattcaccagagtcatctatggctacaggatttgatatgtccgttcaaatgtcatctcccgtagccacttcagtcctcagcgggcaaacatcctcctcaactaggggaagcatcagacggccaacgttgggctcagttgatatgaaacgagaattttcagagtcttccttcaatttttcacacaacggctcgagcccaagattctcgggtatagagacgacccatagcgacgagtcgaaaggcgagagagatgggccgagaggtttcaaagatgatagagtcaagcgcagtcgggtcgttcaggaaatctatgagtgagttttatggttcctcattgcctttttccggcgtgaatggccttcacgaatagcgactgactatggtttcccgtgcgcccttattttcaaacagaactgaactcacatacgttcgtggcttgagggatctcgtcgaaatatatgtgaaaccgtctgaagcccctgcagtcggaaactccaaggacacagtgatcccacttcaggagcgtaagatcgctttcggtggcctctctggattacttcagttccacgaacagacctttttacccaaactagaggcagcggctacgccagtattgaaaggaggagatgatctggatggatcagcttcggtcaaggcggctctgggagtggcagatgtgtttaggacgtacaatccgttcatgaggatgtatagtacatacatcaagtgcgttctgctccaccttttcttgttggcctgcaattttgtttcaaattttcatgtgctcactctgtgtacgcttgtatcatctctgatagcaatttccccaatgctctccaacgctcaagcatgtggatgctatctagctcagcacccatgccttcatcttccccgggctcacccaacgctagtagcgttcatgtagtcaatatgggcctcaccatgtctgctgtcacaccacccattcccgcagagtctcaaccgctcgcttcgtctctttcattgactactactcaacggaagcggatcaaggccttcatcaaagtaggtcttcctttcacatagttcaagtaagaagagttggacgtatgtgttgatcgaccaacttccgacttttattttcggcactccagagagctaaacagcatccgaggcatacccaaatcagtctcgatgcgtatctcttgctccctgtacagcgtattccccgttacagaatgctggttagttttttctctttcttattttctactccactgattggaataaagtgcctgacttcttcgcgacggaacgcatctgacctggatctccttcagttgagcgacctgatgaagtgcacgcctccacaaacgactcaggcgtacgacgttctagaagatgcgttcaaggagatggcttcccttgcttcttgcatgaacgaggaaaaacgggatgcagaatctcgacaacgcttggtaaattggcagtcccgaattcgaggtcgatttccatctccactcgtccagccccaccgaaagcttccccttgacggcccactcacgctcatccgactcgtgaagaagaactctgaactggcagaagtcgttcatcctatcattcacgatgatggaggggatcaaacgattacccctagcaagagcttgatcaaagttgaatgcctaggcgatccagacacgacagtattccatcttgttggtgtgttgacgagtgatctgtttgtgttgtgcaagaaggataattcgaccgatagctcgttcgagttgtttgcagtcttgagaatgcagacgaaagcccagcctgccagcgtcatcagcgggtccagtcagtttgccttacctgaatattctctctccagggagatggctttgctcatcgatgtttttttttgcgtactttatcacagcaatacgagtagtggacaaccgagccattctgtactttgaagccaagagcccaagtgacgcattgaattgggtgaacagtacgtgacctccgtgtacaaaacctgatctttagagtccatcaatctcagactaattctccattttcttgataaattctgtagtgctcaatgtttctttccagatcacacgataagcctgatgcttagaccttggtcaagatatatgttcaaaacgtttccaaaattcactttctttcccccttctgccatctatgagttgttcttctgcattctttcattccatttgcctctcgaatgcattgttcttaaattttctccttctcacttttcttggtcttttcaactctgcacactctttgatcatgccgttctttcttcttctcactcccttcacctgtttcttggattgccgcctgtcttcttttcacgattttctatatcttttgtttccttttcttctttcttgatctctgaacgggggttccttcccgatggtacactctcagctttcattacaagaattgttaaattgatgaaatgcaatgtttttcaccgacggaagactattgttacgatcattcatctttggtataaatctcgatactacgaactccccaccaaacatgttccagatcgtgtccgctgctcacacttctctcgcatgtcagcgctttgagctgacaacctgaagtcgcccaaatcgaaggttgacctgcccaatctccacaactgaaaagagtaaaggtcagtgtggattcctcttcttctatgatcacttgacaagatttttgtggttgcttacaaggcaatattgagaatcagatgttgagatcggaagtgttgtgatataggacagagaggacttgcgggaaagttcgcgtccggctaggaagagagaaaagaatgttcgatcagcgacaaggcaagagaacatgtcgtctatcttaggatagaagaactacttacaatgccccactcgcctacgttgacttttcctgtatttcttcgtggctcgtttcctctcttccacatccacatcgcgattccttccgtcctggtccatctcatgccaaatacgcctccgccctgactgttgaaagcctctccccaagaggcatatctgtcggacgaagagacgctgcagccttcgtttggccattgcccatgcgcattaacgtcacagttggtcgttttagacgacccaagctggtatcgacgggatggcatgttgcagcctggggtggtgtgaagagtatatgcattttgagtctggcgatgcaccccctcctgttatgatcatacgtgaatcgacttaaagtcagaccttagacaccacaatcatagaaggtccctctggacgcacgattatatctatttctcccaatgacggccaattggttaatccagtggtccagaatgctggctgttttcagagcgcagtgtcagctcaagacaagggtacgtggatgtttaaaacaagcatattaacccaagcaccacatccatatggcatatgatctatgtttatcgatagattgcatcaaatctcaaatcagcagggcagttcagtatgaataatagttagatagaaaacctacccagatcaataagcacaacaacgttctcttccagagcttgcctgctcctcagtcgaacagatccccttcctctatgcccagagccgacgacaccttctctatcagccataatataactaacaccatcccatgctcccacaaaggtcaaatttctctttcttgactgttctttcgaaagataatctgtgaatccgtgtgttggatcggcctctgtctcgaaaacaaagtttgaaaagaaagaagaaccagaataattgtttgcaagtgagaaagtagaagtcaaagggaggtctggtatggttattgattgagtgataacatttgaaaagagatataaggctgtaaagaagaaacaagcacaaaggcaaaccaggtagggtaatctgagaaggtgtggcatgttgacaataactagctattggtcgtccaaggtcaacttcaaaggtgagttggaaagtgcacagaccgagaatgtagcttgtcgacgaggcgcccaaatgactcaacgtcttgcaaacacagatgcgcaacgtgttttccgtgtcccattgctctctcttccaatcggaatcatgtttacatcattgtagaaaatgcttaccgaatcgatccagaccaaatgtaccaaaaaggaatggtctctgccaggatcgaactggcgaccaattgcgtgttacagatgtaaagcaagtgtgatagccactacaccaagaaaccatgttatattgagtaaaggttgtaaataatatgaacaacattgactactccaactggcttcaatttgtaagtgttggagtttcagcagtcttgacataatttcatctgtaatttgtaatctcttcttgagacatcatctgcctgcctctatttgcgcggagtcccaaggctctctctccgaagagctataaatattctagcaggttccctttctgttatcctggtttctcaatccattttactgaaacacctgggtggtgtgtatatggtttgggaaaccagtgaggacttgattgggaacaagtgccagaacgaaaagtccattttcacccttttatttcagtaatattcttcagtaagtgcggtcagagaacaagaggctaatggtagtgtttcttgtaggaatgttctcgctccatattgaaggagactgagcaggacctcacagaatgtatcttgtatgaatgtactcatccgtcagaattcattggcttgaatgccattgttttcatatatgacaaaccttcatagtcaagtatacaaaactactttgttgggagattctaaacaagtggggatacacatgagatatagaagatcataagacaattaggattatcagtcacgtgacgtataaaaggttacacttccggctgctgccgcctgtcccgtttcttgcgttccccagacatcttccaaaccccaatccttctttcttcgtcttccttttggtcgttcgctcatcacgaacaaaaagcagctttgagtacaggcaagttcaaggattgtgctttttgtaaaattgtgttcgatctcctcaaggtcgcgcactgtctctcaaacaaagacttacagtacaccttcggctttttcccatctataattcgcttgaccggctcccattcgtaccgttctctccatctacagcattctctatcacgaagaaaggaagagcaacagcatcgggattcttggattcaacactttggacctctatcgttccaacctagttccaagatttcgaacataataagcctccacgtaagtttcgacttcgtcgcttcgcttgcctcatgacctgtttttcttattcagctgctgacatcacgattggtaagatatacagcaaaatattaacttatattcactaccgaactcagtttgatagctcaaaatgcccaaaggctctgcagatgtcgaaattcctcctccgagaagtatatccgtcgatacaagggttcgtatcagtgtgtttcaggtcgtatatgtactcgccttcggcttattcatcacttcttgcatttgaattcagggcgcccaaatcttgatggaagactcgcctgctgttagtttgatctaccgttctcgttggcttccaaaagtttgactcgaactgacacgtacttccattgcccatataatgatagacaagagattcgagaggaatatatctcccacatcatattgaaccggtgtcacatatcgcagttgatgtaagttaaaaccttgtcattctagagcatatttgggccaagaagttgtcagttatctcatgtcttcgcaagatcacttttcttttgttcctgatatgatatagattggaggatctctggcaaaaatagtgtatttcactcgttcacccgttccgccgaacgggtttgatcattccgcgcccggctctcctacatttcctgtacaaccttcgagtcctctttcaacttctaattcctcttcaattgtggaatccaataagccgacaaagccaaacccaaacggagcactcacacctcgcatcctttctagcgttaagggtgccgacgataccttttcttcatccttttcggcatctttgaatttgttagactcctcttctggttcttcctccactgtccctgtcgatctgtcagccttatcatcatcaaaaaaggaacaaaattctcctattttcaatgggaatagtcagagacggccaaagtcctcggtatgccgaaaccggtctaggcaaccaaagattcgacgagctactcttcccaatcttcctggagggctattgaatttcacccgattcgaaacctctcaaatccatgaatgcatcgagtttatctcatcattaatttctcaatcagccactcgcaataaggtctcaatcgaatcgatgaaaagtggagtcaaaatcatggctacggggggaggagctcataagttctacgacctattccgagacgagttgggagtcgaagtcatacaggaggaagagatggaatgtctgatcatagggttagggtttatcacggggattcctagagaagtgttttggtactcggatgaattggtctatgagatatctcatctaagcttgccaacatcgcctccagtcctttcgtccacagtacttccgaactcttcttttccagaaactgcatccccgtatccaaatgcctctacatcgcctgatccaccaacgctaccgacaccgtcatcgacaagcattaagactcccagacctgaagatcttcctcgtccatcggccgatccaccaaaattctcggtatcttttgagaatgatccgaagcctgggatgcaatttccatgtttgttggtcaatattggttcgggtgtatcaatcgtaaagattgacaaagacggttcatttgaaagagttagcggaacatcattaggcggaggtactctttggggtctgctcagtctcttgacagacgccgagagtttcgatggtacgttcaatttctttcttgttcaattacttccatcgctgccgtcgatttgtttgtatattgacttcagaagtctatattccccgggacgaacagagatgttgaccttgtcggaaaaaggtgacaacgcggcggtcgatatgctcgtcggagatatctacggacaagattattcaaaggtcggtcttaaatcatcaaccatcgcgtcttccttcggcaaagtcttccaaaaaggaccgagaacggcagatggaaaacagggagaaggcgttaagaaggggaaaagcagctggaagcaggaagatctggcgaagagtttgctgtatgctgtcagtaacaatatcggacaaatcgcgtaggttcacttttttacatatgttatacgttcatgtaagatatgtactgaacttgtgagaacggttcttgtcaaccgctcacgcccaccgttatagccacatgaacgcggagaaatacgatcttgatagaatctactttggagggtgtttcatcagaggttcgtcaatcatccacctctatacgtcgcgttcattgcttggtcagggctaacacgacatctctgttgctacaggacacccggctacaatctctaccctgtcctacgccattagattctggtcgaaggggacaaaacgagctatgttccttcgtcacgagggtttcctaggcagtatcggagcctggatcaagaacgtagaattggggccagacagtcgaaggtcgccatcgccggagaggagcgagcaagatgcatgatgttacattcgattcctataaactgtcttctgatacatagttcattcataaattgaaaacagcattgagaatgtctatcaaatttagtcaaagaaagaatgacgattgtcaagtagcacggaaaaatgcggcgatctccacttatttgactcacagggtcaccactgggcggtgcgagcatgagagtatttcaagtgtctgggcaacttttatctgattgacaaaccggagaatgcccgacaaactcatcactcatatctgattctccaaagtaggcaaaatttataggaatcaccttgttctaacaactgcatcagtcgtaaaaagacttctgattctttcactatatcgacatttatcaagttttgtagagacaaggtcattcttcttcatttctgtcatcgatgtcggtcaagaaggcatcggttcgaaatgcttcattcgacgcggaagacgcagaagcgggcaaatcttcagatcagcttccagctccaacgttcatgggattcaagatcagacctcgtccagcaggatacggaggtggcaaggagattccagaagaaagagtgaactttgtgtcatacctcctgttctcttggatctccccgatgctgagagttagtcgcgtggtattttacaacggcatgaatacccatcgctgaaactattgtgttgtttgaccttattgataggttggctattctagacctgtgagttgcaaagagtttctgttgatttcaaaagcaatggtccatcccttacttgacctatgatttgtcaacatgatggcagcttgagctcgacgatttctggtatgtcaatcaaactgattgtatctgattgtccatcagaccagtgaaatgacgcgttcgataaataaattggttttcagggagctcactgatgagtacaaggccactcgactagcgattgcgctcgagaaaaatttctacgaccgtgttcctccaagtcggcgacctatgcatctacggcccaaactctccggcttagctcaaggatctgagggtgacgagaagctttctggtatagagcttgaaaatcttgaggctcaagatcatgagcccactcaggaaatcatcaagaacaaggcaactaagacgaaacaggacgcaaaggatgagaagagaagcaaagaaccaatgcatcccccaaaggtcaccgaagatgaaattgtgtacgaccagagcctgttgttagccttgcagaaaacggtcttttggaggtacgtatatctcgattatcgtcggcatgtttgggatatattgcactactaatgactccttgttcatatttctcgacttggagagcagattctggatcggaggaatgatcggagtctgtgcagttgctttgctaacgactggtcctttggtgtcacaattaattttgaattatataactacctcttacaactacgcgcatcgagaacccggtcaggatctgcctacgccaagatctgttggctacgggattggactgggtattggtctttgggctatgcagcagggtgcgagtatatttgtcaatttgtttttgcaaagaggtctgatcaccgggtaagctctcatattctataccaaatccaggctcaaagcatctttctgagcggtgactctttttcaggttcatgctccgtgccgcattgatctctgtcatctcgaagaaatccatccgactttctggtgaagcgaggatcatccatacaaacggaaagctaactacacatatctcggccgacgcatccttcatggattatgcagctctgctttctcatgatttgtaccttcaacctgcccaaatcttgattgggtgtgtttgtcttttctcacgtcttcctttcttctatattagacattgctattgtctaaattcgcgaaaatatatgttgtgttacagggttggtattttgattcacctcataggatactctgctttggttgggctcgccgtccttgtcatcggtgtccctttccaaacttggttgttcgcccgactaattgggacccgacaaacacaaatgaaaaccgtagacaagcgagtgagattgctccaagaaattcttaatggtatccgggtcataaaatttatggcgtacgaagagtactttggcagtcgagtctcaagttatcgtagggaagagttgaaagagctaaggaaaaactctgtgatgcgaggtacgtttagatttacaagatcaagcgaaaaatacgcttgacctgataaaaatgggtccaactcgattgattttgctcaatgtgtatcgctagctttgatgacctctgtgatggcatttatccccgttttcgcggctgtcatgtcctttgtaagtgacaagctgaaacagacaattcatcaaatttatcactgacagatgaaaaccatatcattcggcttgacacagatcacctattcgctttccggccatgagctcaatgctgcagtcatcttttccgcccttcaagcgtttaataacatccgagcaccgcttctgattttgccccttgctatccaggcgatgtcagatgcatatgtgggtctcggtcgtatatcaaagtgtcttctagggggagagatcgataatccggttcctgtcatcttaaatgcggaatatgtgagtaattatttttaatatgacggagggccggttggaattggtggtcgcgcaaattctatatctcgtcctatgcagcataaactcatcaccgctgacccatatcttgtcataataaaaaatcaatttttccaggctatctcttctcatgggaactattcttgggagaccgtcgagaactcaggtgccggaagagagagtgacgtagtcagtaaagaccaaagcagcaacaaaaaccaagacaaagagaagctagcagtcacagatgggcaggattcgaagggtcaagagtctgccacgccatttgcgctgaaggatattgacctagatattcctagaggcagctttgtcgtcgtctgtggtaggattggatcaggaaaatccagcctgatacaagctttgcttggcgaaatgaaaatggtatccggaacagcggtgagtgggggtgtgattgtcttcttgtgtgcttgtgtgctcgtataaggtattgttggatacgttatgactaacgcatgctgtttcatatctcctgtgaatctatttgtctatttttgtgccgatttgtggattttctcgtctgtctgcatgaaaatagtatctgggaggatcatctgcatattgtaggtttactgtttccaaatttttcttaacacgcacattcggaggtgagtgacgtcgactgattaggtgcgcttcttcttcttgtttctttgtggcttttcgcaaacaaaaaaacgatgttcagtcccacaaaccccatggattatgtaagtgcttggttagatatatcattcatcttgagagtttttgggtctctgtgtttttcagctgcacgtagaattgcaaacaaatcatcattagatttgtctgctttccggtatgacctaccaatgcaacttgaaccttgggtgtggcccgcaaagacatgcatatgagcatgctgggggcaaaagtgctcgaaatttgatcagttgttaactatatcattgtatctgacactctcctgctctgatctgccatatcttttcaggaacgcaacgctaaaggagaacatcctcttcggctccgaaatggacgatgaacggtttactgctaccatcaaagcatgtgcatgtaagtgccacttcttatagcctgcatgagcttgtgaacatgctgggtaaattgactggcatggtcgatcgggcatcacctcatcgtttatccgcgactcttatgtttgtgacactgaatggctatatagtggagagtgacatcgctatgctgacccatgggatatataccgagatcggaggtgagagcgctatatgatatctgatatcgcgacggctgtgtagttgatatatagggcagcatagcaagttatagcgagctgacgcatgtcatgagtcgggcatatgctgttttatctcaaatagaaaaaggaatcaacttatcaggtggtcagaaggtaagacgcagttgatcatatgctatagctaagacccataaagtatgagtgatatcggcttgtttcgtctaatgcacgtcatcgcttctactttcaacactactattgctactatctcgtaggctcgagtgtgtttggcgcgcgcagtttactgtggtaatgagatcaatttgtttgacgatccagtaagcacctaatccttctctttcataatggtcgtctcacaacagaggataatgcgtgtgagctcacgactgagctcgcttggatctgctatgtttttccggtcatcactctggtgatgtagctctcagccggtatgtgtatcaacaggattgtgcttgttccttggtcggaagtcgtgtcagtcatagatgccacgtactgtctagcgttctcattcgccttttcaaccttgcattggtattccatatgatcgtactctgcagttgacgcacatgtgagcaagacgctcgtcgaaggtctggtcagcggaccgctccggaataaaactcgggttttgatcacgcaccatcttgaggttctgccgaaggcggatctgatcattacagtgagtgcgatgagtgcactgcgtaggccatgtataatattgcatattatagggaattactgatgccataaacatttacttcatattctgatatgtttttaatcgatgtattcatcaaatatttgtgtcaatacgtcaatatgatagatggtggatggaaaaattgcagaaaagggcacgtatgaagagcttctcgctgccaatggtgtactagcaaagctattggccgagcatgtgtctcagtcgagtcacgatggcgcggatgctgagtacgacgcaattgagactcgggaggatgtcgagctcaagacagtcggcattgaagtcgagcaggcggccgagcgagagcagctggctgagcaggcaaacaagctaggatctgataggacgaacgaaggcacagctgccgagcagacaaaggcgcaagatccgggggcgttgctgactatgaaggaggagcgagaagttggagcagtatctttgtctgtctatgctcgatacgttcgaagcatgggatcatatcggctcgcgcccatctgtgagtcgcttctgccaatctagttcgatcgagttctcgacagtaagcattgagaaggcttatatcccatatgtcggtctgttgtttcaaatgtcaacttagtcttaggatgctttgttcttgctcaagtaaatttgaatctctgtatgttctaaaaacttccatgaatgttctctcctcaatgcacatcactttatatcatcaggctgccaacgttggtaataccattttcttgggcaaatggtctgaaaactctatagatgggtggacccaaagtcaatgtgcgtcgaacttcgttgtttggtatagtttgctcatttgcacttaccttcactctggacaatctgtcccttctctcaatttcttccaatgcctcttttcttttattagacatgggactttatgctggggtgtgtcctgttctttctatcaatctgacatatttggatacctcgtcatggaagatatttctagagctaatatactgtatcgctcttgtcctctcagctcggtttagcctactctgtgttgacctgtaagttctgcaataccttcttcattcgtattgataccaaaactaatcttgactcaatttaatctaagttatcggatcgctcatggtgttagtatttcagttgaagtattgatttaattctacaactaattgttttccaactgatttgcatcatttctgaaaactcaaggtatctttcaacaatcaatgcgagctacaacttgttcaatgctgcctacgcgggtgtcatgggtaccccagtctcatggtttgacgcgactccggtacgtgatgcagaatgaatctgataccataaacccagtttgtttcgattgatgatattgataatggtcaacatctgttaggtcgggcggattatcagtaggctgtctaaagatatcaccacgttagatgatcagttgcctatgcagtggtaggtacaagatttggattgaaattgaacgaagatatatcaggagttcgataacagttccaggggttgagttaccgctggttgtcttactctattctcatcgatttattgtttggtaggaacacatttttgactatgagtctgaacgtcttcggaactgttgctcttgtcttttacggtacgcaaccttcttctaattttgagacgcgatggttttggacgatcaccgatatcttttgatgctgtcgttgggtctttggatagcttttccttatctgggacttatattcatcccgttgttcttgatgtactacttcgtggccacattctaccgagcgtcatctcgagaggcaaagcgtattgattccatcatgcgatccaccatatatgctcagtttggcggtaggttttcgtgatatttcgaaaagcaatagcagagagattgtactgatccgaggctttcaaaaaattttaacaacatgcgcaccgaacgctgttattttctgttcacagaaagtctcggagggtttgtttaccttgtattgacttgtgtacatagataacagagttctgattatctatcttgcccaacacgaacagaatgtcttccattcgagcttatggcgcagaacaacgattcattactcgaaccgagaacgcggttgacgtccaaaacaaatgctacttcatcatgatttcacttcagaggtacgcaatatatcgtaactcattccgggaatagtagaacatccttaacgatctcttggctgttcctgttttattctcgacagatggcttggtatccgactagaggcgcttggaaacttgctggttcttgctatctcattcttcggagtcggattcagaaatactgtggtacgacatcacactaattgattatagacatcatattgtgaaccccaagaagattgaagcgtccattgtatctttgcccccaatcgacaacagtctcctgccaaacttggcgtcgttcttacatatgctcttgctcttacgcagatctttgctcagattatcaagtcagtcctatctcctcctaacttgagctgtttgagggaatcagtggttgcatgttccttactcccaaacatttgtggtttttatttcaaatagcatctttgctcaaggtgttatgtcttccttatctatgtcgtgaccatctaactgactttgcttggctgtgtttggctattgcgttcggaaaacgttgttcagtcgaacaggacatgaacacagctgagcgagttgcgtattacgctgaactaccatctgaggcggccaagtcgacggctgacgatcctgcacaagattggccatctgcaggagaaattatgcttcgaaatgtagtgctgaagtatcgagaggatcttcctgccgtgcttaaaggcttgtcattcagcatcggtgctggtgaaaagatagggtaagtgtgagtgttatgcaagtggcatcggaagcaggcagaagtgacggatgacggccaatgaataaggcactgggactaacacactgacaagtcatttattctctggtgtgatcattgtcgttcgttacagtgttgttggtcggaccggggcaggaaaagtaagctatgatcaagcaaagcgatcttatgatctaacgcaactacacataccgaccatctaccaattctttttcatttcatctatcagtcgagtctccttcaagcgcttttccgaattgttgagctgactgagggatcaatcgaggtggatggcgtgaacttgcgatcaattggactggacccgatccggcggaagttaggaattgtgccgcaagtgagtttggtcaggtgtatgtaagtgaatgaagtgctggactaaccaatgtgtgcggctgctggttgtgaacaggatccactcctgtggaacgggactatcgcgtcgaatttggatcctgacggaacatgtactcctgagcagctgctttctgcgctgtaggtctgaactggcttgtgtaggtttgtctctgttgtcgtaacggcctaagctaattgtcttgtgcgtcatcttgtatctgtacttgcagcaagcgtacccatctgctggccgatccagacgcttcgccagaggtacaggcgcgactggagaaattcaagctgggtgcgatggttcaggtgagttttcacttgatatttgttgtctatatgttttggcggtatagcattagcctattgttcaatcgatatgtgcgctcatcttcatcgccgctgccatcgccaatggctgtaggatgatggggcaaatttcagtgcaggtgaacgacagctcgtagcgcttgcccgggtggtcgtccgagacccaaggtagatgttgttttgggtaatctgttgatcttattgtggaattccgagctgaccgactattgtaacagaatcgtgatccttgatgaggccacttcctccgtcgatatggagactggtatgttccctccattgtcttttcgacgaatgactgataaatgacgttttcatctgctttgctgtccggtcctgttcatcagacgccagtattcaggacaccatcagggttggtccatctctccattttcttctttcgtcgagtcgagccatcttgtgaacgcaataattcgactgacaccaaatctaaaacatacactaccgaaagaatgaattcaagaataagacaatcatctcaattgctcatcggtaggtactcctcgtcttactttgttcgtccctggagcttctcaccgacgttttgacctgtctcatcccccttgtagattggcgacagtcgcgttctagtaagtttggttcagtagctgaataaggaatttgaagaacatcaagcacaggccagttgcttactggccgctctatattatttccacaattttgtttgacgttgataaccgcgaacagtgaccgaatccttagtaagactgttatcttcctatttattcattttggaaatacagaaacaaaagtaggaaacttattttacgtcatctcgctgtgcgctttcgaccgacgatgctgttcatccgttcagtaatggatgctggaaaagtcgcagagttcgcatcgcccattgagttgtttgatcgggagaattccatcttcagaagcagtatgttcttcccttgttactcggttctgaggcgacggacgaaaaggtgacctgaccgatatgtgttttttttttcctgttactgatgataatgctgaaacagtgtgcgatcaagcccagctcacccggtcagacatccttcgaatcagaggagaactcgcgtagcgttctatttcatcctctctttcttcgtgaaatcttctaaattcgagatcattgttgatgtgttcactatcatcatcatcattatcactactgctcatctaatttcgtttttcactttgaaatcttcttcgttctttgctttgtggatggttctataaacagctgtttttggtgctgcttacggcgtctgatttgcttgtttatgtctttagacctctaatcaaacatcggtaatataaactctttagatacgcctagaatgtggaatgtgcaattcatgtaaagtgctctatcaaggggaatataaggttgaaactcgattgggcgaaacaatgtgaccggaaagatgccagacgaaagatactcgcagagcgggagggacaaagatttgggggattgtttttgacatatatgatagtggtgtagataatgttgtcaaggtccaaggaagaaagggaagaggggaaaagatgatctttctctgttcaggaaggctccctttttttattattgatccctcatgaactctagacgaaaacagcaaacttggcagcagcctcatcgaaagcaagatccttggcggccaggtcgagcacaagaggatgtgatggatagactgatttgagctggctacgaggaaggaaattttgatttattgaaaatggggttagttgtctatcagtgatgtcaaaggaggggatgagaaaacttactcaagtacagcctgggtgcctagtacaccagcagcagtagcgattgctcctgcttctccagtttgttcgtttgcgacctcgagcgctgcattaacgtcaccctctgcttcttctttgtgtccaagtagatgatgggccgctccatgggcagcaagaatgggagcggttcggccggtgggcgcaagaagagtctcgtcgtagaagtaataggcttgttggagagttgggccttgctattatgtgtaaggagacgaaaatgaaatggtgtaaaaatgaagatcaatgagcaatagaatgtcgaacatgacactcgagtctagactgaccgaacgaagagtgatccaggaatccatcagctgaacaagctgggagtcctcaccaaaggccttggcgtgctcgtacgctcgctttgcgagatcgagcctgtcgattgagaggtagatctgaaccaaaagtgcggagctgtattgataatttcgtcagatttcaaatagacgagaaaggaaccgatacaaacaaactcaccactccaaagagtccttgtgagcgttgagagcgtcgacggcctcttccttctcagccgctctgaaaaaggcagtaccggcagcaactcggacggcgttatcggtcgactcttcctgttcgccatcctctagctcgattaggaggtctcgaagtccgtcaagaggttcttcttggggatcttgaatgtatgatgccaggaaagagaatgccttgatttccggggcctcagggtctggtgatcgagacaggatgtcgatcgcagcatccgttgcgggagggagaagggctaggtgtgaacgggcgacatagagagctacagaagtagagtcgggaccggactcgatgagaggcgtgccggtagtgatgcctatgaattgaccgaggagcgtctgtgagcccgagatgaggagaaaagagagatggcatgactgcatgacggcctggaccacggaacaaagaacgtacactggttaaagttaccctggtggaagagatgcttgatgtgaaagagttgatcgctgtccatgttggctgatgagacgtggatgagagatgagtgtagacgggtgtgtttgctgatggagatgtgagcaaaacagaaggaaacgggtcgacagcaaaagccctgggcgggggggttgattacgtaagccaggttgtcggggatctactatacagatcactacaccacggtgtagtacattgtctatagatcgactacaaaacgggcctcgaacgtgttcaggcaaatgactacaagcctctctaatggctcgactagaacggtgattacagaaaacattacaaaacgaaccacacgttttgtagtaggctctctatagactcaatagagtaaagtgtagtgttgaacagttacccgcgtgatcataccagatgactaagcaaactatcacttgacgcgtaaccatcgacgcgtgccacgcgaccctcgacgcgtaatcagacgcgtcgggcgatcggtccccacgccttctcgcgctctcggttgatttcgctagcgccgaggatttcattcaactctttctcaccttttctctttacacgctcgctatcatcggttcatctcgggtagagcatacgtaaggcatagcacgcatcgcacccacattcgttctctcaatatctggacccatggcttcgacatctcagtcaggcccgaacagagagctttctccgaacagaccttccgccatagcatcaggctcggcatcagcgccggctcttgttaaacaggtagcgaacgagccggtcgatgccgctcatgactggcagactgggtgagcttccactttgtgtctggtctcgatcatatcagttcccccagaacctctcgaaaaagactcatggctggtctgatttggatttttctctcaaaacgttcttactttgctaaccttcgcttctactgaattgtttcctgtcgcgtgtctatatgcgttcgatcgtatcctcctggataactcctttgtttgactatgtccttttgtcgaatttctttcctgatctccatatgtctatcggtcgaacttgatggcgccctcagcttcatttgggcctttatagcaaagttccacccaaacatgatcggtaaaaacggtttggggaccgcgatggagtttgtcttcgccattgcttcttcatcgtcagacgtatatcccaagctgacctcgtgtgtggtccccacttaacgactttcatctactcgttttatctctttcgcttcctcttcttacttttccgttccagccttgaacaagcccttcataacgatggccaatccgactcactctcgtatgctttccagaagtttcttcagtgcttgaacccaacggtaaccgaccgaaatataaagtctgtcctcgtcttcctgatcatatatatcattccatactttctcttatctctgactttcgacccgttggctggtcatcggcgttccgactcaactagctttcagaccgttccccgatatcttgttcggagtaagtaatcatcctctttgttgattttgtctcgaatgtatgcctctactttaactgacgttatcttgatcacacattcaatctctccttgtcatctttcatcccacctatacttctatctatttttctatccaactcttcgctccttttctcttttacagcaatcgataactacctaaaactggatcgacaatccctctaccaccccgcctacctgtctcaccacgatccaccacgtgctccgcttcctacacaagcggaagaagacgaatggcgcaaagggctgaacccgctcagggctctctttaggctgaaccgagcagaaggcgaagtctcagaaggtgctaaaggaggagaggatgcggtcggttctagagtctggtctctgggttggaaaggaaaggtccgtatccttctttcgtgatactcactctctggaagcatacaaagcgcggtgaaacatgctaggatgtacgagagtacccagaactgaccgcaaacgatgagtctcgtcgtaccgcacttccccacctcgcagttaaaattgttaagacaactggtagattggcagctatacctggcgccttcggtcagggacaccatcaacctgcactacaaagttgtcagccagagacaaacggactttcacaaggacaccaatcctctcagtttcgttcatcttccttctttccccctttttcattcttcttcttctcgcagtaactcatcatccgttgtgctctcatcaaaacaatctggggttgcttaaattctggctttcagttgtcgaaccgttaggaatagatagatccaaaaaacgatactggttgttcgacgattcacctcgggtatatacctcgtccaacccgttcaaaaaatcttgtcctcttgttccaatctcgtccactcaaatcgagctcgaaagcgtgataaatcaactacgagccgaaccttcagctgataaatcggcacaaacaggtaacgcaaagacaaaagcggtcagaaaaaaggcggaggaacaggcaagggagaaggaactttggatggctacgttcttggaacaagagcatatgccaaagattgagaaagaacgcgctgtgagtcctttgctgctttctcttctgcttcttcttttttttttttgctactccgtatgctgtccctatagtttcttttcttctcctttctctctccgcttttttattctccgtgttctctgttttctacatttctctcctccccttacctccgtcatgattcccgccaatcagttggcttacaaattacatacattcttttcctttctaaaactgacaaaagcgccaagaaaaagcacgacgaaaactagagacccaagcgatcatgcaagcccaagcagctaaccggacgaccagaactcggaccagacaacaagctcatcgacctagttatgccgagtttgatagaaagtgcgtcctgttctcctcttccttttttctcttcttccccgtctcacttctcgagaggaaacttctgacaggttcatattaccaacctattggttctccgtccggttttttttttcttccttagtgatgtcgacgatgcaagtcccccttacccctgtctggaaacactcatcgctgacagtcctttctccaaacaatctacagtttatcgacgatcgctcatcggacgatcagtctcgtacatctaccgatcaattcgctcaatctccctcccgcgccgcgaacgattccgacgccgacccagacgcagacggaaggtactctgactccaactctgacggtgaaagccggccgtacactccagaccaggatcagaacaggaatctccgtcggtcaggaagaagctctcgactgttaccccactctctcgatccttcaagaccagggagcagtaccagtgggagtgggagcagtaccggtagacgatcagcccgttcttcccacaatcatattcaaactcacactcagccaaatggacacagcaacgggaacggcaatgggaagaaaagagggttcgtgttggatgacgaggaagacgagcagttggctatggcacttgcagagagtaaagctctagccgaatcacaagcacgagctcgagcgggagcggatgcagaaggaggagaggaggatgacaaagatatcgaattctcaaatgggaggaagaaaggtcggtacattgatccggatggagaagacaaagatgaagaagggcggacggacgttatcttagttgaggatgatgataatagggatggggatgagaagaagccgagagtgcataatcggatgggtggggtgatcgagattatagattgatgtgaatcattccctcttttcactctcttcatcctcttgatcctgacgccgcagaaagaacgtttgaagggaggcctaggactaattacacatcggttcgaacagcattcacaatcaaaaaagagagaaggaaagaatatagacatgcacatgtagagaaatataaaatgtacaaagatcaaacgtcacaaaggtttgctatacaactgtcataacaactgcaatccaaacacaatgaaagcaaacgataagagtatgatggaacaagtcaaaggacatacagattgagacggaagctgataatctatgaaaatggcgccccactacaggtgtgcattacagtccagtagatcccttgggcgccgtgagtggcgtagggctacctgagacatcaaaccccttgaggtcttcgtttctatacttctcatccttgtctgagtgatcggcgctctcagtgtcaccttctgaggagggttgttaagaaagaaggcagccaaattcagcgcaaaattcagggagtataaatcaaagatagccgagagaagagaaggattcgcaccttcattttcaatgttcactccatcgataagagctggattgagagctaaagctcctttggggatcaacgtcgcgatgagcacgacgacacagataaccgtgaattgaacgcctccgacatatttgaggatctccctagcagaaactctcgcagcgagttgccgatcgacccatttaccgagcaccgaactgagcacggcataaagcacgatgtaactcacatagaggaaagccataacggcacccagagcggaaacatctggatcgacgttctcgagctttgcaagggaactctggatgtaagctgctaatgagacatcgccggcagcccaaccgtaagaaatcgggatgaaacacgcggccaccttccatgcgtcaccaacccgacctcgagtcactgcgatgaatggcaagatccaaacaatgttcaaagccagcgcgtccaatctcaagaatggaatgggcgtttggatgacattcgctgtaagaagaacggacagcgctcccaagagttcaccaaagttggatcctccgacgatgatctgggaccaagaggacgttccgaggacctgcttggcaaagatcggcgcaagcccgttctcgaggtatcgatgaccgtagagagctatcgagtaaccagggatgagccatatgtactttcggtctcgggtaacgagtagcgcgccaaagtagatagcttttccgaaacttcgaattccgacccaggcagaatgcatgtaagtctgcttggccttcaactcgtcccgctccaattgttcgagttgagtagctgtccttttgccttcctctaagctggctacatcagacacagtcctccagactatcgcagcacaagcgaagaagatgggcgacaggaaggcagagtagttgtaaccaaacttggtgataagagagggagaggtgaacgctccggtcgtcccggcgacttcataaaggacatgaatgacggcgtccattcgcttgagctgaatacaggagagaagaaactattcatcttctagggcgcatacagtttgagcgacaagaaacaagaactcaccttctgcacatctcctccaacaatgtctcgaggaatgactcgccggatgagctcaaccatgccgtaagcgacaccactgatgatatagattgggaaaagtccatttgggttccatgtcccatattttgtcttattgttagaggttcggaacttgagctgtccgccagtggcagcgtcgcagatgaggggcaatgtagaaatcagactgaaagtcaacacggctgatgccaggacggatctagtagggaaccgtttgatgagaggggcgataaggatcgacccgatacactgcatagcagagttaatacctgaacaatatcgaaccggtgttgaggtatcagattcaatggccaggtgaaatagaagaggaatagatgaattgaactaaccagtcaagatggcaatcttggtgtacttgttcacgacaaatcgctcgttggcgatagtgatgaaagatccatctttcagtaatataagggaagagtgttaagcgcaaattcatccttcagcaacaaacttcctgtgaacctactgaagtattccaatgcaaacttgtactacaagccagcagagatgagaatttgggatgtcagtatagaatttcgtaagcctaacaacaaagtagtatcctcgcttacaaacatgattccagctgcatacttcaagatgttcaccctctcggttcgggtgaagtttgaaaataggttgaacggccacatcgtagtataaagaatttgacggagaggatcaggacagttcaagagatggagagaagaatcactcgaaaggtacgagtccaggaaagttcctttagtgagtactctgctctttagaagaatcagcgaggaagaagaaggggactgaagtatgagagagtagagctctcgaatttatgtctaagacttatgattgtgatcggtgtcactagctcaggagaggccttcggaagaccaccaagtggaaacatgatttggcgaacgttctcaacttgtaggcttctcagagaggaaagaactatccgttacatccggatgtatagtaagtacacaaaaggactgggtaggcatagccgtgaccgtgagtagaaatcaagaggtccaagaattttggactctgcgaccgcaactgagcgcgataaccgagaggaggtgagtaaaactggatcatgaggtcagtcagtcattcaagccggcttgaatgagcaagtttgttttcattctcgcttagccctgctacttgtcaaacagagattaggcgctttttgatcaggcatccaagcctatctctcgcaaaagcaagttgggaacatgatggctgtgatgggagacaactgagggggcacgttctttcgagaaggcatatctttcgtgttttggttctaatctctatcaggacgaaagaacattcgagagagggtttgtagatcagatcatcttggcgacggaagagcggtggcttggcagactgtcgcttaaagcatggtgtcttggcgagggaatgtggaaggcatgtgtacacatgaataccgtcaacgctcaacgctcaacgctcaatactcaataagtaaatgatgagcatgaaaagaaacgtttgatcaaacgtttccgccaagtgattgcaacagagatgtatcgagagtggtcagttagcgagcggtcagtcgatacagatggcgtggtgggagtaatgtagacaacgggcttagaagagattctgtagggtttttcttctagcacacatgctcttggacaaggtcaattgtagcgaacaaccaacattatctaaggacctacgacgccttcatcttgatgagaactagaaggcttacctgagagaaatctgttcctccatcaacatcctagtggaaagagagatctgcgttaataggaaaaatcaagaccatatacatatatacctgtgaattcctattgctatcaaatttctattctgtgtctctctgacatacgccttgttcagtcttgccatattgtttaacgcaagatagagcaaccaatcgataacgcaagcatgctaagttatagacctagcaacgtagatataaatgtacattccatatcaaggtacatctgccaactcatccactaatctacacatcgcttcttttcctagaggaatccaaagccatctcgcattcgccttgcctcttcccgtccctcttcctgctgtgtgttctgtcccatcttcgtacccctcctctgcctcttcctcttcttctctctcggtcacgttgtgtccgttgacctttttggaagcctccccattccctaaagcggcgggagattccccagattctaaaatcaaccgatggtctttgaattcagccaacagtgccttaaatctagtttcttcccttgcgatccatttctcctgacaggacctgaagaacaattcggtctcaattgcccaactaggtgttgtcaacatgctccctccacccgtgctctcaagcccaccggtctcaagcgaacgaagaatggcaagacagagtgacttgaacaaccgcctagctggatctgtcacagagatcaggatgaatcttgctccttcctcagtcgcggtgagcgcagcggtacttgaggctgaagttggtagatgagctgaagacgttcggaacgatatttcatggtcgtaatcttggagagtcgtgagatcatgccagaggaagttgaaactgcctttaccaagagacaacggagcgatcatgtcttcttcagggaaggtggtgctgcgatccgaggatttgtcgctttcatgttcgcgatggacagtcggaggccgagagtatagatcggtcgacgaaaaaagcaagggtgaatgaatatgttcgagcgaaagcaagaggtggatccgcggagaggaggccaggatcccaagtatagatttagacgaagcagagcgcagaagaaccgaaagatcgaatgaatgtatgatgatgaagagggaaaattcagctctctccggctgtatcacagaaggagggtgatagtaatagtgaatcttccaggccagaagctcgattcccgccattatcgaggttccagaagccgttgccgaggaggttggcaagataacagacttgacctcaggcatcaagtcctcaatacggttcaataaatctcgaataccaatcttagggaacaaaccgttcagtacgatcacatccccatcttcgctcagcttagtttctgcgaattcgttcaacgtttgacgtttgctgccaaacccataaaagagcaggttgaagccctcataaagctcgagaagccaagtatcgaatcgggcagtatgttgatcgtccgctaaggtggcgatctcagttgcgttcttatgataaccgggagatgaaaccagaagagttgaatactccttttgagtgagagagggaagcaaggaagaaaacacattggatgaagtctttgtcgttcgggcgactgagttgaagtaagcgtctgaggggatctgtcgaacgaatggcccggttgaaaccagcggtttcatctttgtcggcgtcttttggctaggggtccgtctcggagttgaagagggtgtattgacacgtgagcttggtgtactcggtgttgtgctaggctgtctcgaaggcatctttcgactgatgcggttgctgggggcagcggtgtccgaggaactctcgtcagagtcatcgccgtcctcatcagaatcttcgtcagactcgcctgcttcttgtgtcgcatccgagaaattaagatcatatgttctaagaggaatttttctggaagaaggagaatctgccgtcaaagagtcccctagctttgcgcgtttcggactgggtaacattgtcgagggcaaggcacaaggtgaagttgacaaataggttgaatgatcttgtgtaccaaagatgatagatgactttgattgatgacacggaatctgcgacgcagctcctttacctattggtatagagaagcaaacggaactttagagaacaagaccttcaaagaggagcagctcaatggagagtgtgtgtgatgatgatgatgtagatcagacaaacatcaaggtgcggatgttgttgaccaaggcgtgctgtgctcttgaagtaaatcacgtgagtggcaaacaacaaccctaaccacttgagcatcagtagcctcgcttctagatgccgctcaatctttgaatcttaatgaatatttcattatgtatacaaaactgaattcacacatgcgtgctcccaacctcctcaatgatatacatccggccttcatatgtatcagtagggcacgatcgagccatcatagctcaagaattttcctccatgagattccctagtagcctcgctgacaaccttgaggaccgcttgcgcactttcgtcggggctgatagctgtacccacgaacggattctcgtcatcgttgggattttttttttgaaggccgcatgagtcatatcagttttgacggctcctgatgaagaaaaaagaaagaagaaaacccttccaaggttaatcatgttctcctgttccatcaagttagagaagcgcgcgcgcatataaagaaaccgacctggatgcacagggaacgcaatgagtccggagtcttcgttctctagatggatcttgatagccgcatagttgaccgccgcttgagatgcgctgtaggcttcgaagggaaggttgaactgagaagccagtgccaaagatcccgcgattgaagagacgacgacgaatttgggtgcaacggctgaggctcggagaagggagtggaactccttgaaaagcacgacaggtccgatcaaattgacttcgtagtggacgacccactgtgcaggatccgactcgtgcaaaggcactacaccttccggtgaaccaagacctggaaatgttcggtatgttaacacaatattgtttgagttaccaggtccaatcgaagtagctgtttcaaaatatgataccgtcgactagacaacgccatggactcacccgcattggcgatgatgacatcgactctgccggcggccttcttgatctcttcagccgccttcttgttgctctccgtgtcggcagacacgaggccgataacgttgatcttggcctggctggtcttcgcgagctcgtggagggcagtcgaattggcaggagtccgagcaccggcaaagatgactttggcagggttgctggcgagtgctttgacgatactgagacccatccctcggttggcgccggtgactggagaggcggggcgtcgaagatagtgtaagcacgtggcggaaagagaagcaaacaaggagcacaagactgactgagatatacggtggtgtcggacactatcgtagagatatagttagttagtatgatgtgaggcttgacggctgatgagtgaaggatcaagatgagtgatggaagataaaatgagctgaacaatatgtgacggtcagatgtacaatctttttatatggatgagcgttttggaacgatggcccaacagccaacccagttgctgattcaacggtcgctatcccgggctagcatcgttcatccagtgctgtgttagtaagtgatcggtaatataatgcgatggagatatgatcaaaatcgaacgatgtccggacattgctcacaaattaaacgatgtgatccggagatcagtgtgggactcacaccgggctacgaggccgaagggcttctgatgttctgtgttgacatacttcaggtaagtaaatcaggatttgctcttgataatacactgtaagttctgtcctctccggcaggtcagcatgatttgtacatatcgatctcaattcgggtgagtcaatctgagggtaaaggtcgagatgtttgctaaaaatcagttggtcaggattgaataaaatagtttgtcgatcaaggtcttaaccaaaaagacaggcgtaactatggttacagtcataatttgactcttacttacccccgcttggacaaccccgctttatttgccaatctgttctcttctcaatcactttcagtcttatcatgtcttctctcttcttaccatccattctcattcgacagactattcttgttagaaagatctccagtggtacagggttacactcccgcaatttttatagaaacatgtctaataagattctagtcactcgaaagctttcggatgaagcgatgggcatcctccaagcgcgcaccaaagcggatattgtcgcttggcctcatgactcaacggcagacagaagctgggtgctggagaacgtgaagggagccaaaggcgttctctgtatgctaagcgacaagatcgatgacgagtttttggatgccggtcagtttttatcatgccagaggaatattctctccttcctgttctcgttgaacgttgattaattgcttgctttctcggatgtcttactaaatgtggatactgtagccggatccgaattgaaagcactttcaacatagtaagtgcacttcctctctgcgcccgtctttaaggctctctgtctttgtatgtcataaaccaagacttatcttgttgcgccgtttatcagctcggttggctacgatcacatcgctgttcaatctgccaagtccaaaggaatcaaaatcggctacactccggatgtgttaactgatgctggtcggtttctatctcccgtcctgtagtctctttgcaatatacttttgaagcaaacgacctgactctagaagggtttcttgtgtgttgccagtggccgacttgacggtgatgctagcgctgatggctctgcgccgaggaggggaggctactcgaatcgttcaagaaggcaaggtatatatattcaatccttgtcttggtttactggaaatctatgacggatcaaagactgactttgtgcctcgttctagtggccttcaatgggatgggcaccgtaagatttcctctgctcattgttcaccgagactccaacgttatgagctgatctctgcgtcatctcgaactggtagatacatgctctgtggttcccatcccgctcaaaaaactttggccttccttggtctgggtagaatttctcttggtgttctcaaaagaatgcttccttttggagtaagcacccatgtgctctactcaaactctggcagacatgatcgaaccgaagaggacaagaagatcgaaaaggaactaggtatcacacttgaatgggtctccaaggaagatctagccaagcggggtgacgttctctttgttctctgcgctggagtaggtccgccaggattgtctcgaatgaagagaaagatacacgtactgaacccgactgtttgtctcacgcctttcgtctcttttgaaagggtcccgccacggccaatttggtcgatgaaaagttcctctctttgatgaagccgacctcggttatcgtaaatgccgctcgagttcgtataccttttttctgttattatctatcctacgctccatcttgtattccaaacttcaatagggagctgattcattctctttctatacgtacagggctcggtggtagactcggatgctctggctaaagcgctcggggaaggtcgaatcctcggtgcaggtctcgatgtcgtcgctggtgagcccaacattgggttatatcatccgctagtcaaagagccccggtctgtcttctttttctaccttgttgagaccataaaacatccatcttgtctcggaacactcactctttctgtttgtgaacttggataagggcagatgtgtgattctgccccatattggatcagctacgacggagacgaggagggaaatgtctcttctaggtacgttgaaacgaagtctaatatatacttgtgatttctctcaaacctgttgcgattgcttactatatcccgggatatctctttttttgctttatacagcggtggaaaatctgattcaaggatttaacggagaacaacttcctgtagagctcaaatagactcgataaatttcggaaactgatagaccttctgctcttgcatcatgtgaaattttgaacttttgatctgcaaatgattcaatggcttgacagcatcctctgtggctgaggcgcgagtcgaaatcattgaagataatttgaatcaggtatatatgattgtcattgagattgtctactgtacagatagaattcttcaatgatcaagtaatcacatcaaaaagaaaaatagtccatgaagaacgtgaagcgttcgtgacaaatgaaaatatatacatacaaacacgaacgtatacatccggtcaagagaaagttgaaagatgatgagagcgacatcgatcataatgtccaattaatcattgagtaagaataagacacaactggataactgcagatacaaagaaaagaggaagcaaagagaaaggctccatttggatcccatcttggatgatattttacggagtcgtcgaaagtctactttcgtgatcctttatcccagaaatcaacgatcgctccaacttttgctcgtttcccattactcgccagaatcacctctttttggtccgcttggctttgttctggccccgtcccttgcgttgatttgactcctgagtgagatccagttttcgattttccctcagctttcgctccccctaacgcagcgcgcgggccgaggattcctacagatgacgacgaggccagagtagatgtcgagtttgaagaagactctctggatgctgataaatcgtctgccagattttcgagaccggagtaagtatcttcagatactgtatgatttccttgagctgaagggggtcgactcgacagagcggatgtatacctcttccgaggagggactattggggatcttggtcgatcagacggaggagagggtgagggtgtaggtgttggaagatgctgagaggccgagacatgctcctcggcatcgatcgtgttggaggattgctggtcgttgtgatgtggtagaggagagggagaatgattgtatgcggaggcaaagtcgtgagtgtcgaatgaagagaattcgtcagcaaatggagcagattgaattccctgttgaacactatccgattgagattggaatggttgttgatattgctgctggtgctgttggaaaaactgttcaggcggaggacaaggcgatgggggtaacggtcttgaacgtgccgacgcggtcgatcccgttcgacgcagcgagccggtcgaacttgtatagtaaggagaatgagatgcagcaagttctacatcaaaactggaacgaggagctggttgagtctcttgagatcttgtgaaccggcgttccgtttctcccaacctgttttccagttcattcctcaatccactaaaatcattccgcaatctccttacttcatcagcctctcttcctactttaccttccagagcgccgagccgatgatcaaatcttcccactcgatcttccaatgctttgacatgtccgacgctccaggtttccagtttttcaaaacgcttggccagcagcgcaagggttcccggaatatctagcgttgaggggttcgaagagtcgggaaccaagtaggccgatgttgtactcggcatgggaaagacagtggagggtgctgagggtaatgggttcgtcgattgatgctgagataaattccgcatacttctagaggactttagtatcagaagttaatacaaagttgcttgatctaagagtcaacgactggtccggagatgatctttgaaagaagaaagaggcagatggtcaagtacgaacggtcaatctccttggtcccttgccctctgcagtaggttctctcttaggggggctgttgtcatccttcttgtccgttctcatcagtttctcggcctcccttctgctccagtctctctcctcctttgctaatctttcaatttcttctcctgaaagtccaggtccaacgtcgagatcaggcaaagcatacgctcccacgatcttcgaacttgcatttgctgttgatccagctccaactgtttcttgatctggttgaatggaggctccaaagaaatatcccaacgattgagatcgaccatgtgctctggctcgtgggccgctctgaggaagggttgtgctggtctgaccttccgcagaagatccaaatatgggaactgctgtattgaggttgatcatgtttgcaaacttgttagccaaattccgaagagggggaggaggagtttccgagcgctcaataggtgataagggagcagcaggttggttgaagctggatgaaagcacagcggaggatgactcggtcggaatcgagtcgagagaattgctcggagggtgaaacggagggtcgactctagaatgaggccgatatagcgatctttgttcaaacgaggatggttccgggaggtcgagtggtgcaggcggaggtggaggaggagaaaccatgttgatatatctaaagcaagtccagtatggttgatcttctagacggtcgcaagtgaaagtacggagggagaaggaacaacgacaagaggctgagaacaaggcaatgtagaaaatcagcaaacacgcgttaatgacggtaacgcgacggagtttacgcgtcttgggcacgtgacgcacaagaaagctgtgcaacctgggaaacccaaattgtaaccattatctactaaggctctttcgccttcttacttggtcgtaactatcactcacctcaccatgtctttcctactcccctccgctggatcgtcctctagagcgatcttctcccgctccgtcccgctaacggcagttggaagtcagcgattcaaggccgacaagaagaagagcgccgcgccggtcaagaccggaggcaagaagccaccgccggtcgatacatcgggagattcggctacagacctactgaaaaaggttcgtcttttacctttggctttgatcagatgcacaaacatcatgtcctctgttgttttggcggatatagcgatggagagctggaagacatcgaacaccaacgtctgagcttgatcaaatcagagaacttgtccatgcctaaagaagttcaagaacaaagaaaaaaaagctgacttgtctttgggtttctcacctattcgtcctacgtatcctttcgcaaatgatacccattcttctgtcgaatataggacctatacccccctggctcggtgtctgagagtccctcctcaattcctcggttggaccgaattcaaaacatccttcacctctctccgactcctgaagttcacgacacgatcacccgagcggctcttctcgatcggctgaccaacactgaacgtcaggttcagtctcttcgagctaaacacgccgcaatgttcaacgcttgcgaagagttaagggtgtcgtacccttcgttttatgagttagcctcggaggaaaacaagcccagtggacaggctggaccggcggagaacaaggatatcaagaacttgctgaatggggttgagcaggggaaagggaaagttgaaggcttgttcccgcgagaaatgagggtgttcactgagacgcctgggaaggatgggtgggactacgagtggaagtgggtaccggaggaaaaggcaaaggaaaaggttcagttcgagcccactcagtagtcgaccgaggcacgagttgaagaatagatcgtgtatgaaaaatggaaattatgaatgccatgatcaaaaggatcaagctcgtttttggaaggtcgtcttcccttgttgtgtctctcttactcaatttggtttaggattctcctactgtgatttgtttgtagcattctgtttcctatagcgatatgctctgctcactgacagaatctgctttgccaaataaatctgaacattttcgtggcatctttacacatcgtatcaatctcctctcaatgtgatctcacctctcgcactctccgtttctcctcttcttaatttgctccaaacccacatagctccatcccaccacccgaatgccagacctcctaacagtttcgccagcatcttctctgatgatcgtccccagctgtctaatacaggccgcactcgagtttgctgcgaagcactgataaaacagaaggcagaaaggaagaaggaggggatattgtagaggatgaagaagatgacattgaaaggagacgggaacctgatctttaggacgccttgtctttgcgtttcttccagcggtgctgctcgttcgtcatcctcctcctcaaagcttgaccgggattcaaaaagaagtgacggctcagatcgtgaagaaggtgaccagtcttgaaccgttcgctttcgaatccttctggcctccagtccgatcccttttccccattctttgacccattgatcttcttccgcttcctgtccctctacgtgcccgtttccattcgcagcgaaggacgttgacgatgcagatgatcgattgccggactggccggcagtcattcctctagcgcatccgacgactaacatcacccacaaaatcgccactaacgtgattgaaagccacagtcggacagcaaacggtgctatccctggatcagccggggtcggagtcgagcctggttcttcacctgcgggggtttcaccaggtccgaatccagatgaagatatggaaacgatgaagaaaccaaaggcaagacctattcgccagagatctccattgagtcccaatgcgagcgcaaagaatacgagcagccccagtggagcaagcaggatcattgggccgaatgatcgacggatcactgaggaggcgtaggtcgtgaatggtaagtatgtgtctgggaacacatgagcgaacgaaggcgatgaaggcgtaaggagagaaaagaagaggaagggaagagagattgtgagtaccgggtaggcgtatatacgaagacttgcgaagggcataagaaagagagaaagtgttggaagcagcagagaacgtgagcgggggtgtttgggtgaaggaaagaggagctgaaggatggatcgatcagaggaggctatcagcgcgaatggttgggaattgcttgcaaaagaaagactgtcatcatacctcaacaaggtttccaatcgaaagacaaagccaaagtatctcttcgaatctcagacccgatcgatattccagactctctgactctggtatcaacctgcctggtctgagcaagatttccgtggtaagcatcgagaaaactaatctggacacgacggttgttgtatgtaaccggctgtatttaacggaaaagaagaatagtcgcgttctgtcagactaaatttcatgacaatgaaagaaacaagatcatacgaaccaaggtgagatgtttcgttccaagatccaactgatcctgtccagtacacgacctataaaactaacatccggacctctgaagctctcaaccgaatttggattttcgctggaagaactttcaagaatgtcgacactttttgtccagagatactcgagtcgacccacagaggagatgtataaagatgtcggagagacagtggctgaatgatcgtctaattgcggcggattgaccattgcgggtaggaggaagtccttgaaccaaaccaaaccaaataacaccagatgagagaaacagaaaccatcagaggaaggctatcatcagatagaggaatttgatgagatgggcatagagaaggcctgaagcgcactgtgtgcttgtctcactggatgaatcaaaacaggatggttgtccacactacaagccgttcatcttataggagagatcgtagggtgaacgtcggctgttctcccggcttatgtaatcgtttcgcccaaagccgactctgttgacattttgacatcgtattcaacatcgcctatcctgctctgatagacctcgaaagaatacgtagccatgcagtttatcgctcaaagtgatgattatggagtcctgtgcctagttggagatttatacagagagaaagaggaagagaacatatagagacgagcccaactaagcaaccgcggcgccagccttcttgctcttccgacttcccaccttcactttcttctccgccgaccttttcggcacatcagccacatcagcaacctcgatcggctcaccatttccttcctcgaccaccttcgcccttttggccgctctaccctcctcagtagcttcctcctccttctcctgagtagctgccaactttgcggcctgcttcgctcgcttcctctcggctcgagccattcggaaagcttgatcttcagcatcagccttagcggcttgttccttccacgtcaacttcttctccaatccatcttctccaacggcagcaacctgttcttcagattcgagcgcggcagggtcgttggcatagacggaggcagagggaagagggaagaggtcatcgtcgttgtcgtactctgcagaatcaaggttgccattggtaagatgagaaggcgaatccgcacggtcggttgaggaaggcttgattgggatggagaatggttctgggaggagggagccggtgagagacaggatttgagacgacacgttcaagctgaaaaaatcaagtggaaccacacaaagtcagctgagtatagaacgatgaatataaagcaaatagtgttctttttgggggacataagactaactcgatgacagtgaatttgactttttcatcatcttcacccagaatcttaccagtcacccgacttctccatcgacctgtcgagaactggatgacctcctttgcctttcctttcgcctgcgctacatcttcttcgacctgcgtctgtccatcctgctcaccctcagccatagtctcatcagtctcttctaggatcggttcaggctcaggagtgggcggcgtgtcggttaacgatgggtcgaaatagtattcatccgaggggatgtgatgcatcgggattgatacgttgaaggtcttgtgaatcaggagcgaaatatgcgacggcgacgaaatagagtgagtgccctctttgaaaaagcaaaaaagacaatacaacatgagatcaaggagaacgaatgagtatggagaaatccaaagccagctttgaaaatcagaacataccaagagtctgtccggttttgggagcccaaatgatagctccgaattgtacatcactgatagcgaatggacagtcgtttaacacgttcgacacgggagacatgaattgaagatttgaatgtgagagaaggacaccttgaagcttgggaacatatctaaggaaaagagccaattgaggctaaattatcagtacagagcctaggaaaacgcgcactgaatggccaacctgagagccgttcccatgtaagaaaaaaggaagaaagatccaaaacaaaagactgacttcatgaccaaagaatccaacatctcggcgacacctcctctcaaattgccaacgaaggccggagggacggaaagcttcatttgggtggcctggtaggtgaatggagagtgaatggtgacatcctcactatccgagccagaggacgaggaggatgccttggcgtttgcgggctttttggaggatttcttttgcgtgctgcttggatgagtcatggtcaagacggttgttctttccgtatagaactgataccgagcaagggagagtggtcttgaggattgatctggtcgaccttttgcttggttcgagtatctttctttggagaggatcttcaaaaaattagtttactgacaaaagacttaattaaatatttgaaaatcaaaaaatcatctatatgtcatgtgtgtcgaaatataccgcccacatcaccacaccatgggaacttgtccattcattcgttgtaccaacgcgcacatgccattgggttattcgccatttgatatgcacactgggttgagctgtgaagtagaatgaaaggagtctttgatggtacaaagactgatgaacagatcagaggaaggagtcagaaatttgttggactaaagaccattaattagggtaaagtctcaggaaacacaagaaaatcatgctcaaaagggagaaaagcacgtcgagcataactagaacaagaatcaaaggtgatgacttcgaaagagtatcaggaagaaaagaagaagaacagtcaggaatggatgcaagacggtgtagccgttaagacgggggatcactatgatagactataaaaaactaggagagaatagacaaagactacatagatcaagaaagattacagaatcgatcaatccattaatcattcaactagatcacaatccgatcccttgatctccatctccactctacacacactcacatatcatctgctcaacctaccgatctctggactcagtctcacaatggtcagtaaggaatacataggacaagtcgtatcagccatgagctgacactattcttctctttcaatcgacccatccaatcgggcagtcggacgatgatttcatgatggacgtcagtagtttcatcgttccttggacctgatttagagtaatgtttgtatcgcctaaccatacctatctcgttcggtgtttcacgaccatcaggatgctgctgatgaggtcagtagagtcatatgggacaactcttcttgttcccttctcctaaacttatactgagtcttgacctctggtaatctttccgtcctatctacaaggattatgaccttgactatgacgacgacgatgatgatgtcgaggacgaggaggatattgatgtggaaaacatgtattaccaggccaaaggtacgttgttgttcaaaaagtgaaagggaacacccattctaacaaacgatcaaggcgatatcgcttggttcacccttctcttgaacccctcctccaggtcaggttgaggatgacccagaagaggcattatcaacttttagagagatcgtcgagcaagaagaagagaaaggagattggtgagtcatgatattctgatcaccgtaaagagataaacaaaagtgactgaagacagaacactcattcacggccatgtactcttctaaatcgtctgggcttggcggattataggggattcaaagcgcttaagcagatgacaaagttgttgtactgcactctcgatcgcccagaagacgcgctggagacttacactgagcttttagcatacacaaagtcggctgttaccagaaactgtacgcgtcgctttgttatgttttgtccgtcttccgaaaaggaatgctaatcagtggacgtctgagcagattctgaaaaatcgatcaataatattttagagtatgttggtggtgagggaaaaggacaaggtgtccagactaatcttcagacactcgagaagttttatgaagtcacaaaaaagagtcttgaggagagcaagaatgaggtgggagtcgatcattccttatctttatattctgttgatccatgttgtcattcgggagctgaccgactggatgggtaaatatattttcaaagaggctttctgtcaaggcgaacctgaagctggcaaagctttggctcgagcggaaagaatgggaccggatgaagctggtgcgcaaaatgacctttcctgtggtttgttcatcgtatcagttaatcgaaacatcaacgctcatatgtttgaacttctcctttcgcttaaaaaactctcccctaacaggtccttacagacctccatgcattctgtgtcccgtcatcctcttcctcgggcacatcgagcgaagatcagagcaagggcacgatttgtacgtccttccttacataaatcgcacggctaatatatctagattgtgtgattggaaggattaatatgattgtgtttgcgacgctttttttgctcacagtactcgaagtatatgcacttgaaattcaaatgtattcagaattgaaggattatcgaaaactcaaggtaggtccatttcacctatgctttttggtcttacttctttcctgatcaatggacgttgaccccgatcaatcgcaggaaatctaccgagcttgcctgcaggtcaggagtgcaattcctcatccgagaattatgggtgtcattagagaatgcggtgggaagatgtggatgggagagagtatgttcaaaaatcttaatttgcatatcagccgaacatttatcaaacttctttctgccgggaaaacaaagaaaattgggcccaggcatctacagatttctttgaatcattcaagcaattcgacgaatcgggatctcctcaaagaattcaagtattgaaatatctagtgttggcgtacatgctgatggggagtgagatcaacccttttgattcccaagagacgaagccgtgagtttcttcgtcagttcttgagacgatggtagcaacagatagatgctgactttgatcttctggtccacatttcagatacaagaacgatccggagattgtggcaatgacgaatcttgtggccgcttatcaaagaagagacatccatgatgctcaaaagattttgcgcggtacgttgttttgtatccttctccatcgctatcttttcttcttcctctttattcgcgatctaatcaggtctgaattcgatttctcttttattcatcttcgggtgataattgattagaaaacaaggcaacaattttggatgatccatttatcaaggcatatattgatgatgtgctgcgttcactaaggacccagtacttgttagatcttataaagccttacacaaggatggagctcagatggcttggtagagttcgtacatcagtcatttagtttttgtttctcattcttatgtttgtgagctgaccgggatacgtgtgtgcttgttttactcctcatccagcaattaaacgtatcgagtgaagaagtcgaagatctcctagttggattaatcttggatggaaaagttaagggaaccatcgatcaagttttaggtcgactagagttggacagagggtcagttttctcttttcgtactcttcacgtgaccatcctctgacatattcttctttcctctggcctttttgacaactcgtaaacatcatgacgatggttgggaaatcttatcctcagacatgcggttgaaaaagcattatataagaacctctcgagttggtcatcgaatattcaagacattcagacgaccgtccttggaaagcatgcgctcggaggaccgccgacagaaggatcaggactgaacagggcgaacgtgccgttcttcatgagtagctgagaatctgatcatagaagagacgaaacatagccttactttgttccccgatccttctcattatgtatatgtacttatcatgagcagcaaggctgaacaaaatactgagagaacaaggcaacagaccagacaagagtgtagcggagaccgagaaaagatgtatactcatgtcgattgaaagagaaagaccgtatgcagcaggatctgcactagaaagttcaacgcttgtacattttcctcctggcggaactgaaagagagaaaagtttcgcttacgtacttatacgatagtcgactgtcggtcagaacctccttcgacaacctttgcttcttcccatccatctctgcccataggacatccttcattgcttgcggtctcacccgtgacagatcgtaatggctcctaggaaacaatctggctctgtaggcccctcgaacgctcaacaacctggtctatctcaccatcagccgatagcgtcatccagctccaactcaaattccggcccaaacttgagtacgaacacgaatttgaagcgaaactcaaactcgaacacgggtgtcagtccaaactcgcttgctcttgcaaggctcggttctggttctggtcctggtcctcaatcgggaactccttcaacgccatccggctcgaattttctctcgacgtctggagggacgacggcagcaaccacagctgctggggagcactcaaaagatgataaagtgcccgcgtttcttcataagctttcgaggtgcgtatcttccggctctgattatctggattccgagcagttcagtgaagaggatgatcagtgaaggaagaccggtcggagaaaacacggaagaatctgatgacgcgtcaacctaaacggaaagaaacgtgctgaaagagacttaatcatgtcttcctctacctccctgttccaaacccgtgtgttccgtcgagcgaatgtaggatggtggatgatccagaactagatccatacattcattggagtgaggatggagaatcttttgtcggtgagttcctacacatcctgggcgcgtatggaccatccgatcaaatgacaatttactgattgacagtttgacaatgtctcattcttcgacgtctagtgcctaattcggaaacatttagtaaagaagtcttgcccaaattcttcaagcatcagaacttcaatagctttgtccggcagctcaatatgtgaatagcagggctttttttcacttctctttggtgaaggaaaacgatgccatgtactcatgcttgaacataactcatcatgcgctttacaaaggtatcgattcaacaaggtgatggatgaccgacaaggctcactcaagcccgaaacaccgactggataccttgtctacaagggacctaacttccgacgtggtcaagccgatttgctgggcgtgatctcacggaaaggcaaacaaaaagcatcctctgctgctgctgctactgggatgaatgggaacatcagcatgaaaggctctccaatcgttcctgtagagggagcgattgatgctactaccacgttcaacagtattgctcaacttcgagcccaacaaacgatcctctcggatgaactgaaagaactacagaactcgaaccagcatctctggcaagaggcgctagcttcaagaaagaggcataaacggcaccaggatactactgatcggatccttagatttcttgctggtgtatttggaccatcagcagcgagagatattgcttcggacggtggatcgagtgctggggtcggaccgcctagtcatgatccgacgtgtcatgacgaatcaggagacggaacaaacgcaggaaccaacaaggatagtgctgggaagagagaagttgcaatcataccgagaaataggggactcatgattggaaatggcgggcaggtatctaggagactggcaccgagtgaagtggaggaaattgagctgccatatgcggatggggagaacgagcttttagaagaaattgaggaaatttcatctagtgagttgatatcatcgttcctttatgtttgttgattgcgctcgagaaattcaatttaacggatcaatcattatcacgttaaaatgaataaaataaaaaggcaggttcacccaccctctctcacaagcgatgcaagacccctcacggactctcaatcggcctgcgcttcctactcgatcatctcgtttcaatcgccaacaattcagcccagaagataggtttactactctttcgcccaacgggccttcgatctcgtctccttccgaccctacgactatcagcgcgcctagtccacagcctttacctccatcagcgtcatcgtcgaccggaacaggacttgaagtttcttttccgaagtttagacggacagagagtgcacctatttcacaaacaatgactcggtcttcgtcctatatacctacattaccatcatcatcggcggcggcgatggcaggtgacagccatgctgcaaacaccttaccagcttcagaaatagatgctgcgccaagtccatcagcctctcaagcaccactttctccgtttagccaatggatgaatattgatccatccactgcctctggattttctccacggacaacacagagtatactatcttcgatcgggtcgttcggcttgccttctccttcagtctcccatactgtacctgtcggttcgaccaactcctttggatcagaatatcatcaaccccatcaactctcatcgacgacgactgcgagtgcagggcaactgccccatcagaattcacatatagcaggtctggtaactaaccaaccatatacgtctccaggggcgtcctcattccaatcatcatctggtggtacacctgcctcgatcacccctactcctaccccctctacggacgcaaattccgcgaaccatccaacactgcctcccttccctgttccatctgcactggaaaccaacggacagttctctccctcaatccttggtcaattatcgtcatcattttccggttcattggcgagaaactatgaatcagcagacgccatcgcagctgatgtggacgcccttcaggataacatcgacgccttggttgcctcgctcggtgtaggattcaacgttgataccacgcttgcgactcaaccaccatcgacatcttcaaactcgacgacaccgaacggacacaacggtgatcatctgacgagcgaaccctgggattctcctgaacttcccgctcctgtttcaccatcctcattggcaaaccagcaggtcgatccgtccaacccggtggcgtcttatcctcaacatccttcagatctgagcatgtactctcttttcaacgatctatcagattcctcccacccgtctccatctcagtcgacaaaggcgacgacaacgacgacgacaacggcacctgtacaatctgtgcctttgacgagagggctggttgactcttcgatggattcgccgataccagctcaacatgtatccgacgatgagtttgacaggttgatggctgcgaacgaacgggccggatcaatgcctgctgtcaaagaaccgagcgtcgcaacaggatcagaaccaagaactgaagaagcagacgtagaaggaggtggtggtccgaagaaccggaagagaaagtcaggggacttggaaaggccattggatggcacggacgggttgaccgaactttcgaccttatcgaaaaggggaagaacttgagagaaaaagagaattacctactgccatccttcatttgtctcatgatgcatctgaataatataaagatgtgatgtataaaatgtatttgtttcgcttggttctagatcgccacacaaagctgggctcggtttgtgcatcggacgttgtttgtttccacgtaatggtcacttcatcggcttagcttgtcataatcacttttctcgacgcctccatacccatagaacacacagagaagcaaatcgcgttgtgaaacacaagaaaatgaaacggcatccgagagggagcaacagaaagtaattcgagaagagaggagaaaagtcagatgaaacagagctagacagacaaacaaaaaagagagacgggaaaaacaacaagagattcagaggaaataaacaacaaaacaaagagtaagacaaagaaaaggaaaaaaaaagttgaaaaatgatcatatgaagtagattggttggaatatacagatgcggaaggagaacaagcgatgctcaatggcgggtaatctccgtttttctctcgtgtatatcaaaggagaaaaggaagcaaagagagtggttgcgtgtagattaagtaggctcaggtgagagtaacgaaaaaggtataccaagacgaaaacaagatagcgaggaaaaaaaagtaagggctcgtcctggattgaagacgaaagcaacggaaagcaaggtgaagccatcgaagcaggtatgctcatttggaaaggaatcgggttaagatgtcactgttctgttgttttaattgatctatgtttcgagccgagtctaagtttggttttttgaagagcaaaaaaaattatgatcagcgttcccgaaatcttattagacacgatatctggagccggtaaaaactcaccccaaacacggcctcgcgtcggttttgaaggagacgtctgagtaggttgactatgcgtttgcgccttagaaggagcgacaattccaaaaacatcaggctgagcttgaatgcctatatctcgatgaggaggtgaatcggtttgaacgcccgagacggcatattgagtggagagagaagagctgtgatgatgaccgtggtggtggtggtgatgatgattagaagttcgactgtaagaggcactccctgaggatcgatgtccaggacgtttggcacccccagtaggccgggaaaagtacccgccgtccttgacgttatcatcatcctcgtcgctatcctcttcctcgtcatctccatcgtcacctcgatctcggcttctctcttggcttctccaatcaatgtcgatatccttgcttccccggcgccctcggtcgttgtagacaatctcgcccttgatggcaggcgtgatcgctccggaaggtttcgagacctgttttgttccctggagcctattggcgtaatttttgattccaggcatgctgtcccaggcgtttcccttgtaggatcgcatggcctcctcgaacgacaagaccggtcgaggggtcgggaccggggtcggttcaggtgaaggcgtggcggcatgaaaggacagctgagggatgacaggagattcagacgaggaatttctagctgaaggctcagcaaaagtaatcaacgggtgttctgggataggaggagtatctcctcgggggaacacccgagaaggggtcttccgatggcctctgttccaaggaagagaagaatcggctttaacggggactgtagggtttgcaggggtgatatatctgttgaatttatcacaatacagacaatatcgacagttagacaggactgaggtgaattacaatagacagctgagaaaacataatggctgacctgccgtcgtcgaccactgctggcaacttccagctctctttgacttttccttggcctgccgcccaagctcgctcctgttctttggcctcctgtccagaaagatcccaagcgttcttgtagtgctggttgatgtcaacctgcatttgatagttgtctttaggaggggacgaccgagcaggatcccactgggcaaagtacgggattccagtctcgggctggattgtgtgaggagcaggagcatggacggtcggttgctgatcttgttgaggctctgtttgcgtaggaacagggaatgaggctgcaaagggcgggaaaggctcggcgataggagctggcggaacggattcctgccgtcgaagaagatcaactctaccttcgaggggaagagagacgtaaccttgatgttgcttatcggtccatcctcgggtagccacatctcttaattcatcgaggttcaatctttcgctcggtccttgttgataaggctggttccaggcagcctgtgtcttggggatttcccaggttccgatttcttccactcgcttgctttgacgaggtcgaacatacctgtcatagacagcgtctgaaaatgttttgaaacgaagctggctcatcagtgttgttttcgtaggtgatttgaaatgcaactgcaaacttacaccatcggtcgactaggccaccataatcataagcaccctcggtgtttgggaaagcgttgaacgaaggaagttggccgactcgatagtcaagtgtggaccaaggtttctgagcaccgatgaaatgtacacaatggatctgtcgcccatactgtgcgtaggctggagcgtaactgtacgaagcaagacatgatcaatcagcttgtccatagatgcttttccatagaagcgcatacactcacgtgtaagcggccgtaggcgtagtattgtaactatggggaagtgaggcagagtaagagtcagccacgtgatagaagctgaggagcgaaggaataaagacgcaagtatacatacgtgaaactgattctattccacattggccgaccttcttctccgttaaagtactgattgagaatgctgtggaaagagaatgggaaaccaggagaaattttacgatcgtcgcaaagatgagtggggtgtctttgtttggagggtcaaaaaaagaagaactacgagaggcttacccttggtcgcctccgtcgaatgagccctgtccgacggaagattcaccatctccattcatcatctccatcaaccccacaaacgtttttagggatggctgcaggatcaacactccagagttgaagcaatcaggccaccctgtatctggcgaggcgctgaaactgatgtcatagagggaaaaaggttcaaacaaaaaaggatgtggaaacgtcaaggtataaacttgggcgcatttgaaggcaatcaaaatagtacatacacatcaggaagggcaaagagatgggtgatcggtcgaagagggagaacatcggcatctaaaaagataactttggcgaagtttgtgagtcgaaagacgtgtagcttggtgagaacggtgttgagatcatggcgacctgtgagaaggtcaagaggaacaatagatcagcatggatcaattgtcggaatctgtacgctattattatctgtttttgtggttgcagaggcttcgggatcgaatagatagagcttacccaggagctctaaaccttttgattgatgaacatgctccagcacctccaccccgacaacactgtcccatacttcgcttaacgctttgatggaagctgcatcgaccgtttcgggagtgacgatgcataccagtttaaaatggacggagtggacggaggatggatggagagctcgtaaggcatgtccaaggacaaggacgcccggtctgaatagagagggtgacaaaaaaggctgattagttggagagccctctctagctgggatccgaggctgctcttgagtgagatgagtgaggaaacaagatcgggatgtgatattgggagaacaccatgcgtgcttcgagctgcctgcctggtcttgatgccactgagccatctttccaaggccgcgcaactctatctccccccccatcgaacttttctcgcttccaggctgggaaactctccttggacggacgcgtgctattgaaaaaaaaacacgactgctggacactcacagataccaatcagaggtgagaagagtaacaaaagcaaaactagttggctgagacatccctaggattccgttggaagagtttcaagaacaaggagaagagaacagctgtcagacgaagaagaaagataactgatatgccctgtatttgtctgacgcagaaaggagaagaaaaaaaaggagagaagaacaggatccactcactacgttctatcctgcttactttcctgcttcccacttggacgttccgagcgagacacagacacacaaagagatgtgtagagagagcaaacggctgtcgatgatacgaccaacgacgagcagagatgggagtaagagtctgaccgagagaaccaagccgatcgccgcgggtttcgtgcggtcccccaacaagacggaagcggtcagcttccccgcaacagcagctccggagaaaaaaccctgttcctatttttttattttattttcttttcttttctttctctgccttttgtctcgttagaccaatctcggtgggccagaactacaacatatatatattcccaaatacttatcgttcgccttcggcttccgacagttgctcatccaactctgtcaatttggccgtcgtctcgtttgcctgcaaagcctcatgtaacgtctcgaatccgcctttgccctgttcgacatctagaaacggaaacaccgtatacagatcccagacagatagatagaaagacatcggctctcgccagtgtcaaaatgagtgcattgaaaaaaaaagtaagaagacaaccccaagtcgtgacagaaagaaaagaacttaccatccaagcctatactcaaatgaatccgatggtccgtgactctagactgttggacattgtctgtttgacgatacgataacaacaacaacaaaaaagacccaaaaaaactctattcgtttcagtaccggcgaactaaataaacgagatatacgtcttccatccgacgcacatgttcgtatccgatcgcctttaccagtccctttgatctgggccctccgactctgttggatgtctgaagcgcgttcttgtcgtgcccggtccaacagacgcgaccgaaggactttgatggctttagctttattctgatgggtataatgaggggtttgttttatttttgaaatattaaattgcaactcgaagttcagtatgaaaacactataaacaaagaatcaaaccgtctgccgacgcatgaacagcatatacttacctctggttgagatctcgaatcttgcattgatactgtgataccagttggaagatggaccagccggacggctgaatcggtcgtgttgacatgctgttcaatgtagaatgagaatcttcaagcagttaacaccaagcgatgagatgttggcaaagaaagaaagaagctctgacctgaccacctgcacctcctgagcgcatagtgtctatccggacatccttcatgtcgagaatatcgacatcagcactgtctccttctgtcagtggccctgtaggaatgacctgtttttatcaatcacactgttagctttttatcttgacaaacgcaattcatacaatatttggccatgtgatggacttgcatagacaacggcggccgaggtcatgatccttccagctgtttagaaagagagcgcgatataaaccacatgttcatcaacgagaaccagggtttcacgtataccaagtcgatgataatggattgcaattcttcactaacccttgtcggcttcgctaatcatctgtagtcggtgcactccagtctcccatctgaatcggccgtacacaccgccctgccaacgattgtatgcctccgatacgctcattacttgcccttcttccgtcgcccaaccggcttcatctacagaactcggattccagacctcgataatcaacttggcatagccccatgccccgactttcgacccagtgattgcgatcgtccgactctccaagattcgatgtctccatccgaggcgggtaaattctcgttcgtaccacaaaaacaagtttaatatccaaagcgcgctgtctggtccaccctcaccttgggagaactcaatgatgatcggggcctggtccagttgaggttcatcagccgaggaagatgcaagagagaccaacgttttttcaagagcgagtcgagcgtttgatcgatcagtcgaaagagtagccagatcctctgaggctagatcttcgagctcgggtgtcgatcggagtagatcttgatattcgttccaaacctgtatacatcgtccgaatgtcatgagcccgagtgatactctttctcttctcatccgacaagagaaattcaaacatgataatgaagaaacatgattcattgaatatcgagaaaattcatccacaccttctctgcatcaagacagtcttgaaccgatttttccacttcgccagcctgtttcctaagctggagtacgtctatcggattggacgtgtcaggcgacttttcctccttttccaccgccaaacgtctctgttcagccagccgtttgcccagctggacgagattgcgcatgtttgtcggctccgagtttgtcgaatacaaacgacaagacgatggcgatgaccgccagcgagaatcttgtccggtaaacacgagtggaccgccgactcggcttcggagaccttcgtcagaacgctgtaaacgtcctggccgtaatggacggagagccagtcggttcaacgtcgacggtcggaaagatcccttcatgaaacccgatacgacgtccaggccgtattcttttttatctttctttggatcaacgagaaggcgacagaacgagaagaacaggaagtctctatctgatcttgtttctctcttcctctctgtcgactataggttgaaccagccaggtgagattcaagtctcgaaacgcaaactagacttctctcaaataatgtattacgtaatacgtgatcatcattctcgtcatgtctgtgcgacttgacttgtaggtgattcactagcatgatctgtttgtcagagtatcaagtttgtgtgtgtgtgtgtgtgttgatgtgatagtggaccgtcgaatgcagagacaaccattccgacaaattctttctcaagccatggtttcctcattcgaacatcatcagaagcttggtataatatttgtacatagatctttactctcgtcccgttcgccaactacatccgtccaaacaggtcctacgagttgaaaagaagctgagtatagtaacttttgaaccagacaatcggagaagaacgtcagatgagatggaaccgatcaaataatgcttgatatcacgaagaaaaggtgcaacgagaaagcgaagaatgatccgtacgttttggtgtcgttatcccaatgatcccacgtagcgttcagatcagcgatgtcctcggagtcttccgatacaatctctctggctgggatagcgaacgcaatggtttcatagggttctgctgcaatctgtcgcacggtggaacaattgcaggaacgaaatcgatcgtcccaaaaggaaacaccaaaagaataaagtcgagacaaaaaggaataaaacactcagttagatcactgcgttctctttcacaagaaaactaacactcaaacggaacgttgcatccatcatcgatcaaagaataaatcaatacgaacaagtaggtactgaatggctcgattgggaatctctctcctctgctcaaaggcagacataaatctacggataggtctgactccatccttgatctcgggcaagtttgcttggaagagcaatcccaacctgtgtggggcagtaggctcacgaatcttggtaactttgtaccctaccatatgcggccagaaaagagtgaaccgtgattagaagccgcgacgaggtggattgactcgctctcatcgaaggaaaagaatgtttgtaaacagcacgaaccaggccttccgattttgacaaagttctttttgagcacctcttgagttttcggtagagtaattaaaagctggttgtccttgttatctctggctgctcgtctagctaagttggtctgatgcttctttccctgggtatgggcgagataggacccttcatttgtgtgaagtgtcaaacaaagtcgacattcaatcgttcccagatgagttcggaggatatacgggtcctgttgataaggagaatgcgtgaagacacagcaatagattagtgtcaaccccgcaacagaatagagaacacaagaaggaagccttactttggccaaatcaatcgtctccatagcgagctttcggagacgctcccttcggtcgacattagcctccgagtttcctgccggtcctcctcctccaaacttggatccaactcggttttggtaatctgatcgggttcgagatagacatagcgtgatgatagagtacgtgaagaaaaagacgcgtttgtgttggagggtatatagaacggaagagatgcgtgagaaaccacgtatcaacgatcggatggcaggtctaaatgaacatgactaaaaactttgtaagactcggaagcagcttacccattatgcgttaacctcgaacgaaatatgaatgtatggtgatatagtagtagcaataacgattctgctggtggtggttgtcgacgatagaaggagaaggtgaagagtcggcaatctgaaattgattaggaaagtctttgaaattctgtattcgtttacttgcgagatttcctaattcgtcgttcactccatcggtcgacttcttctcaacattaacctctccgagtcgggtcattctcattcttacgtatagacatatgagccagggaagctcgttccgttatctgaacaggctttcagcacgttcgaactaccaaagtgagtcaggaatatgtacaatctagacttgtcgtccaaattagctgaacctccgatcttctcaatcgctttcagcattcagcttcggacggttcgaacggaatggccaatctccagttccggtcggatcctcatctcatcggtcaacgttctccacaagctcttgtgcaagaacagatgctcgaagaagcccgataaattctttggacaaagatcggtcttcgaatgcttcttcagttgacctcgaccagcttgagaacggctcacttgagattgatgaacccacaaacaactcgaccattcatccctctttcccttcaccatcttcacctccgccgtcttcacctccgccgtccgcacctccgccatcgtcttcatcacaaccgcattctctgtcatggccgtcagcacctcaacctgtgtcgtcttcacagccgataccactgtcgtttgcaccttcatcgccgcctccaccacgcgcctccctttctcgatcgaacttgaccccttcattcgattctttcagctcacactctcctcctcaatccaaagcgacttgccaccaagctagtgaaaaaagttcaacgtctagcgcacctctatttgttcaaactctactagtagccccaacaaatgcaaacccaccttctgcttctccctcagaggctgcaataccaaagagcatcggacagcaactcattgatcgtcaaaatgaccccgtcgctttgaggagacttgccaattggctcatgcaagaccgacaccgagagaaggattttaaagattgggggctgatatgtcgtatgtgttttcttttgataagctttggtgtgacctgagagttattttgccatacatgagctatcttctcactgccttgttgaacatttagggatgtgtccacccgacctagctattcggatgttgtcctcaccccatgcgtatggcttgaagcctatgcagaaatcacctatcatatctagccaggtgtatcatcttcgatccgtcatctctaagctagtcctctctcatcctcaatcctctgcatcctcgctctcgacatccaatgccgagaacacatcttacaacttgatgcataatcccagcaagttaatacctctgcttaaccagttgatcaagctttccgagctttatctacccggtgatccgtatatcttactcctagctcttcgcgcgtacgcatctttccctgggataggtgactcggggcgggcaagagtgatagaactcattcacacgaatcaagcttcctggtggcctgatccttctttcaatcccatggatagtgatcatgaaggatcccgcaccgctcgctcacccagtttgaactttaaggcattgtccatttcgctaaagaaccaacggtttgaggatgtgaaccgacatcgattgactgacctggatgcatggaccattctcaagcaagtcgacagactccggttactcgcggaccttagcttggaggtctgttcgagctgggaccgtcaacccgtcccggcgcctcttcaaaaacagcgactccggctccttcgaccgctacaacaactagagagactctcggatgctcctcctttgtcagaccacactccttcttccacatcgtcggaaacagagacagctcatcggccggcgatcgtaccctacgagcagatcgctaggttcgtcactcccgccctgtatcaagcgcccaccgacccgatcgtccttctcttttcgatgtatctccttcacttgacatctgtcccaggcgacgcgcctcttcgcactctctccgctcaagcgttgggtcccaacggcgtcgagcgggaagttcgaggagggttcgaaagtacgaaagagatgtcagagacgtatcggttgatgaagaaggctataagcgtgttgaagaatgtgtggggtcaggaaggcgaggtcttatgggaggtcatcaaggaggatctaagatctcaggtggttgaggctgagaaattgaggcatgatcgggcaaagggcaagacgggttcattgaaacggatgagttagcgtcatgaagttgtatatcaaataacgttcagaactatattcggcctcataagcgaactagccgacattcaaagaaagagaaatccctttagatgtttgcaagtcctcattcaaaacaagttcatattatcttctttttgatgttgcgacccgggttccaattaattatctacttcgaaggagaatgtcgttgatctcaatcccaggaccctgtgtcgagtgaaggtacattttcgtgaccaccgtcacttgatgaatgaaaattaaaatgaaaggagaaatgaaggagataatgtcagaacttgagccaacattgacggctttggcaaaatgaaaacggatggtatatgctacgaacgtttgggcgaagagatatcgaacgatgctcctccagacattcccgaccgccggacagcctcgaggaaggcgagaacgttggcttccacgtccgggtactgccagtccggctaagatgatggttgaagtccgcgtaaagagaagccatttgaattagcgttcgaattggacatattcctgatagagtataatgtatatatctttttcgagagaaagaatgaatggccttactcgggcaatagcagcggcaacatccccggtcttcgatactttccaatctagagcgcccaggttattgctgatggcggtggtcacatcgtttaccacagttcctctcttctcagctggaagaatccccttggtgccgaggaatcggaccagggtcttgtcggtcatgatgttgtggtggaatctagcagtggagaatgcttgactcggaatagggatctctccatccaaaagctttatgtggattcatgttgaaaaggaatacatcggccgggtttggaattttcgaatggggcatgattcgatgatgtgatttacaatcaagtacggaatcatgaagaggaaagtggaaagacgcatggttagagactttgttctcttgcagccaactccggtttctatacttgaaaaggagaactctctgacgggacggacgaaccttagagaacagctccactccaccagcataagttgctccggcatccaaggcctcttgaacttgatggggttcacagaacatcaacaaaacaggtggctttgtcgagggatcgcgaggaaagttcagtcgtcccctcatcgaaggcttcttcttgtccaactcgaccgaaagctgaacatctattcctgaccatgggcggccaacttcccaagactaacctcagtccgaaatgttgtttcaagtttcaggccatcaacacagagttcagcatgcaatatattatagcaaagcaggtgatagttcttaccttgagcgtgttgaaggcttcctcaagactcatcgagtcttccgaaaacacgatcttcgcctttttctttgaagcatctcggacggaggacattgaaaagtttcgtacgatagacgagttgaccacattcatagagcttgcctaaaataaaagaagcatttgttttggacagaggagatcgactgattagttgaaagcattccgcaaaggaagagaaggagccgagagtgaccctccaagaaacaactcgaacgatttatctctgggaaaacaggactcactcggaaagagctcacgggcagtctcgcattggctgcacacctaaagatggccgacatgattattgttgatgatgacgatgaggcaagggatgttcaagttggtgaatggatggtgaaaaacgaaaaagagtgtgaaataaagactacgaaaaaacggagactgattacgaaatttcctaatccttttcgcatccccagatcctctcatctgcctacatccaccttgccatcaaccatgccttcgtttccggcgatacctgctctgcctagctcgctcacgtcgtccaagcaggctctcatcgctaccacggctgctgtctcggtagcaacgaccgcgctctcgatctataccgtccaagcccttcgaagatcaagcagacgggaagcccttaggaaagacgtcaagcgagctgtcggacagcaggacttgaataatctatgggatgaatcagacccagcggtcggcccaggagctggtcagctagatgagatggacaaagaagtcagacgtatcgtaaaggagagagaacgacaaggcgacaagtctggtgggaaaaagactcagttttcggaggaacttattagagagcaggttcggtcaatctcgctcaactatcacgtcctgtttcgacttcatggagactagcttccgtcctctttcaatagacaaggttcattcacttaacaccttctctttctcttcaaaattcagctcgcccggaactatgttttcttgggagacgaggctatggtcaaagtccgaaactcttatgtcgtcattgttggttgtgggggagtcggaagttgggcggcattgatgcttttgagatcgtgagtcctcctgtcgttgtactcaatatctcaagtctatcatatttctgcttcgtgaggaaaatgcggccaaatccttgagtctgacagtgcttcttttctgaattgatgggatctaatctgttgtgtcgaccgcaggggtgtttccaagatcatgctggtcgatgtaagccgcaagtcattgcgctgacagactttacagacaaacgactgatgttctttgacaaccattctgcactctcatagttcgatctgacgaccctgtcctctcttaaccgacatggtacgtgtttttttactgatctagaccaagataattcagtacaccatcgactcgagaggcaaacatgaatctgatattttctctttcagcctgcgctaccttggcggatgtcggaacaccgaaagttcagacaaccaagaagttcctggagaaggttgctccctgggccacgtaagttaatttctgatcgagagtccatcgtgaatgcttattctcaaacaagatttctaatccttttttatacctctttaatcgttgttctacctggctgattaatgatgtttaggatagaggctaaagtcgcgctttggcgtgatgggcctgaaggggctgctctcttagagggtgctgactgggttatagacgctatagacaacatcaccactaaggtttgacctttgcacatcccagtatccgtactcctaaagacccggtccactgaaattcctctctctcttttgaaaccaacgctcctctctcgatcttgttcatctccttagtctcaactgttggttcactgcaaaaccaatggtatcaaggtcttttcatctatgggcgccggtgccaaatccgacccgactcgggtccagatcgcggatatcagcaacaccactgaggaccctttagctagaagcatcaggcgaaacttgaggctcggtggtgtagctagtggaattccgttcgtcctcacaaatgcgttcttaactctttcatcttccggtaatagtatcaagactgcttattgaaaacgttttgcgcccggtggaatatcctctgtctacatggatcatctgtagtgtggtattcagcacagaggtcccggccgaggtgaagctgttaccgttgccagaagatgagttcaagaaaggcaacgtcaaagaacttggagcatttgatgatttccgagtaagtccgccatgcatgcttccatgacgtctggttgttcatcctgatcaaagtgtgtttgatccgcaggttcgaattttgcccgtgttgggccctctacctgctatctttggactgaccatagcgacatacgtccttcaagatcttgccggcaaacccattcttcaatctatggaaaataaaaatcggaaaaagatctactccaaactttacaacgacctgacgatccgagaatccaagttcttgggtatccccgaaggacaccggatcccacttgatttcacctcgatctcgttgatctacgaagaactccatcaatgcggtcgttctgtccttccaagccctatctcttctccgttcttaccgttgatcgctcatccggtctgtcagcggcctgctttggtcagatgggatctcggtcgacctctctcggtggataactgtgtgttgatggaggtcaaagaggccgatagacatcagcatgagtttacggctggcagaacgttggaggaggtctacggagaagacgtcgtcaaaggtgtggaagctctgaggaaggaatcaagaagaatcttgagttggatggagtctagggcagattgaatatcaaatgcatgttctgtcttcaaggttcctatctcgtcttcactctcaaatattttggtgcttctcccgacactcacgatcaacatgatgaatcaggtgtcttgattacaaatttatgcatgaaatacagagtccaagtgattccaaacgaagataaaaaa

SEQ ID NO: 2047 - DNA, 39701 bp, Xanthophyllomyces dendrorhous
  misc_feature (11162)..(11171): n is a, c, g, or t
ctatatatatatgtgtgtcttcgaatttggcatcgcttggttcttcggtcgctgtttggtaggatctcttcgaatactcgcggagagaggcaaatgttaaaagctttgcgctgtattgaaatgaccgggctaagagaatctgtggatgacaactctccgagaggattaagaacgatccagatcaagcttcgttttaatggatcatagataacactgtattcccggatcttgctctcttttcttacagcagacttgactgtccaggacgatgataagccgcaaggatatacttgctgaatacgtgaaattagcaaatatccggttgtttattcggtcaggccgaaacgggctcccaaagaaaagaacaaaaataaacaaaaattatgcccgagatgtgtcctgcattcactctcgtctcgttccatggtacttcgcgtaaatccggcagtctgtatggacacggaagagccagataaggtcctaataattatatgtcttttcggggttcacagtcgccttcgttatccaagtcggatgtgcttcaaactattttttctcttccttctgagtcttctcttgttgaaaaacttcttctcttcatattctcgttcccttgtgcaagagagcatcaatcagctagattagcccaaccgactcagaaatggtcttcctcatcctccctcctctcgtaggacctactatccttttcctggtcgtttacatagcgttcaaacatgtaactcgtcccaaaccaattcctgacgttccctcccttccagccatctctttcttcggaaacggactcgatatagctaaacattacaagaaaaccgaaactattcatgatgcattcatagatgtgctgagaaagacaggagggatggtgttgggtcaggttttgataagcgcttttacccctatgtgcgtacaatccttcctctatttgatccaatcagaagatgaataaacacatatgctgaacccgagtttcgttgctattcgttcgggcaacgccgacctccgaactgcaaaagacttttgacggcagatccagatcagattgacagaattctaatttcccaagattgggatcgtgggatacggtccactggggtcttcaaaccgctgatcccccatgcattgcttgctttgtctatcggtaagatcgccttaattgttgagatattgcagtcgaaatggatctaacatagctctcttcgaatggccgtgatagatgaggagtacaaagcccataaacgagcttttgcttttgttagttgctctattccacagcctttaagcacaatcgagcgcgcagttgacctctcgcattcacgcatccgtgcacatcctgaaaagggagtatcctcgtctttcttgaaagagacaagtaaacgattcatagaggaggaccatgcgttgatcgatacttggtcgagtcagacgggcgaatggtttgatccagagcctgagctgacttatcggcaagctgttagtcctttcgtcttcgtttttttcatctttcttagaatgatgtaacagaatttcctgataggacacacgagatcatctcgttgcgcgcgatagagagctatttctgcagtcgtcttcggagaaccctcgaatctgattgataaagacctcaagacgcttttcaaagtatgcaatctttgtttccatctctacctcaagcgtttgaaaatcctctcaagattctcaacggaacgcccttgaatgttcaaagacgttatccgccggcccgttggctcctatcaagcgaatgatagagaaagtacgaccgaccaatcgagaggcttacaagaggattatacagtatgtccagagccgaactacgatttcaagaaagaagttctcggaaggtggcgatgtggctttgatcgagaatatggtctgtccctccttctgttatgcgctgttcttccttaaaagcagagttaacgtttccttccgggcatctttttttttgtttctcctcggctaaaatcggaactagattgatgggattgttcagaaggaagctgaaagtggagtggctgttctctcccctgatggtctaagggatgagctggtctccagtaggctcttcatgtctctcaccatatgttttcagatgtctgtttgatctgattgttttcctctttctcgtgattcagtgatacttgcgggtgacgagacttctgtgtacgttcttgcgcttgtcgcctctccgatactccatgttgtccggttctgattgtaccctagctttgtattctatgtctggaaataaatccagcaccacacaactctgggtaagtatctgtcgcagcttgatacttttctttagcttttctttctctgagctcatgaacgcctaatattgatgcactcaatcactaggtgctcaaattcttaagcaaccatcctgcaatccagtacaaattacgacaacatttgctcgaacgtatcgaacctttggatgtaaggtcgccaacggtggatgacttgacgcctgaacatactccctttttggaagctgtcattcaggaagttttgagggttggtaatccagtggcaatcatcggtcgggaaggtttgtgttctttcttccctcgtcttaaactctttgtctttatttgggtctcgttctttcctacaaacaaccactagcaaagacaaagatgtggaagggactgctcattgaaattcggtttctcttcagctatgcgagacacgacattggtcggaccgtcaggtggaaagtctttccctgctccaaaaggcacaaagattcttcttcttctaggtccggagggtacggaaggaagagtaggaaaagacacgatggagttcaaaccggagagatggttgaacgagaagggggagtatgatagttcggcggtctggcaggcttcttttgccaaaggatctcggtgagaacagcatctctcttatataattatcttgttagacgtcactgtgactgacattgacatcaacctaactctcctgcccaccttatcatctcatggggaaatcaagagcatgctatggaagcaaacaagcgttaatctccatccgcatgttcatagtctacatctctctaacgttcttcctggagaagcctcctccaaagttacagtctacacgaagagtggaacgcatcacgttgagaccttccgatctggttatcaagctgaagccctgggagaagctcgagcagggagagaattgagtagagtgggaaaacattctgcgcgttttacaggattctcatttcttcgtccttcctttttcccttccttcttcttttcttgtttttgggagtttctttgttctggtcgaggaatttcttcgccatccactatcttcttctcttctcttgaagaatcaggttggaagcatggttgtttgatcactaggtttgatctcgatgttcttctaatctacgtctggaagagacgaagatttgatcgacaagcgcgtgcacagtgtttctttctttctttgtccttcttcttgtttagtcatacaatcactctcagcgtgttcttgagtatggaggaaaaaatcgaaagatgaaacgcgcacaaggaacagtgacagagcgggtgtcaagcggagggagaatggcttgaacgtaggggtgaagcacagaggcaaggtagaatacatgaacgggagaacagcgcaaagagtccctacagtagcagctatcatgatcaaaacaaagtggatccgctagatcctcgatgggacgattccgacagtggtatttttcgtgtttcttgatgatgtctgtaagcttggcttgtccttttcttgatcttgatgttgactctgattttgatgccgagcggcaagcgtcgatggtgcaacaccaaaagaagatgggacatcgagattctataagagagagaagagacaaggcaattggtcaaatcggggtactcttcgacgaacgtactaaacagcaagccttactagctctgcaagcccacgcacacacgttcgaataaacaagattgaaaatcagtctgcacaaaatccgtacatagagtatatagcaaaagaaaaacagaccaagaggccctagactcaccgacggtggcgatgactctaaccatcgctagatgatggatggcatgatgaaacgtaaagtacagctacgactcccttcccattcagtcggtcaggctctcagtcaaggttggatgtatgaaaggacaagtaaagcgagattgaatacggacgaacctcccgaccgatcgtactatctaacaagacatcccctgcgcgaccctccacatctgattttacacaaatctggactttctcgtctacccagctaccttgagtttctttctctgttgtgccagagcacaggctttgaatttgcgcttggagttgagagaccgtcaaacggatgagtgggatggatgactcgatagacgtctctcgagttcggtcgtcgtagttgataggtcggatcgggatcgagatcgggcgggagagcgggattgcctgggaaggattgtgtagttaggaggacgatatctcttggtcaaagggaagaagagagaagacgataatgggggtgcgcacttggaagagagcattgtagtgatctagaatgtgcctcagatgttttccaacagttccacctctatatgtccccagtggagtccagtatacgtgcagtcaaacggaaccgaaagaaggtggatcgagaaacgttccttttcatttagtaactctgatcgacaagagagcaacgggaagtgcagagaacgaacgggataacgcgacttggaaatatgagctgcttgtctgtgtgaagagtgtgcttgaaaaaatcgaggatctgatcgagtagcgcgatgttaacatcgataagagaatctattagatccaaacaggagcatggcagatgcacggaatcaggtatggtacaccagcaacaaagtggatcagtcgttgtgtttgacagacttatacctgttgtgataacgatgatgatgatgaagcagatcagccaacaagaggatatttctctgtacgaacgttctgtagatagtgtgctctctttcctaggcgggtttctaccaggtgtcatggtcgtcatagcctcgggtggggaacgtaggagtatcctctgtgtggggtatgcttgtctgattgtggacctgtacattcatgtagaagactggaaggaccggcgggagtgactaattaaggttagggttattcacggctgtgtccatcctcacgtgattgcgtcatcacaacgtcagggacgatcctgaaacccttgattcctcccacagatgattgatgggttgtttggattgatccaatctgaccttgttatattttgtgttcacacggtctcacgtcgagagatcatataagggaagaatgtcaaaagtttaaaggctgtttccttctgatttgctttactttcgatacataattcgaccatcttggtcaacgggtttgatctgttgagtgagcgagagacggtgaaccttattggatgttcttggatcaagaaaacgatcagaacgagcgtgccgactttggagatgaccaaatggacagcagtcaggaatattccggcgattgagatccaaaaagactagagaaagagaagagaagacatgaggtttcgatgggttataatcatattgaaaccgcagcactcagtgtttaatcactcatacggaccaaaccacgatgccacatacgtacattcccgatctgatttatctctccgacggctcggagttgacatgaccgcgagaagaaagaggggtgtatacgaagaacacgacaagaaaattctcattttttttttgtttggaaaagaacaggcaatttgaagtaagagtaacataaaaagatgagtgggcagaagaaaatgcaaaagaaaaagcgaaacgcaaaagtagagacacgcctcatctgtcgatccttcaggttcttgttctctcctagtggttgattaagatctgacgcggccgaacatgagtgtgtgcgagtttgcgagcgtgagctccgacgcgatcattgctttctcgacgcgacttgtctcgacgcgcttgtccgaaacaagtggggcggtaggcttagacctctgcggctctctgtttcctgcctatcgcttgttttcgatgtttctctttcttgtcgctcctctggctagatgaatctcaatctgttttctcaccatccgttgttgtggtcaacaatcgagctgctctatagaatttatcgatcgtttgtgtgggcgatcctttcgctcacatacagagaacagataggggtacagcgcacacacgcacacgaaccatgcgttcctctttttctctctcccctcagagaacaacctcatagcggttacctctccagcccaaccgcttcgctcataatagacaaactctggagtgagacgtctaaacttacctcgttcagtctcgtcgagtatagctataattattgtgtcggcttcttctcacttggtcaaacgtttgtacccagtctgccgccttgttcatcctgtgccttccttgtcggtcaatcctttcttcttactcatctctctttcttcctactctccattccgcagattcagagtttatcagagacaaaaagtgatccgtatataaagatagagcctgggtttcagaggcaaccagtctggatagatctaactcctccttttcttcaacccccttctgtcgccacatcacttgctccgttcgggtctgctttccacttctgagagataggttggatagacagaacctcggcaagaaactcctttccatcatcacgcttgcttcttcttcttcttcttcttcttctttttgaaaatatgctccagctcgccttgctcggactgttcatccagaccgttcctctcgcgaatgcttattggattttgtacgtcgttcaccttagcgtttcctttttctctccatatctgcgccgattctgcttttgttgatattaacaattacaacaaaaacgatacatgtacccacacgcacagctcccaccctgctccgttcatcgtcactcgattgggttcgcactgtttcgtttgactttctctcttctcttgaccgtgctaaacccggttttcacccgcacttcacagatcctgtcgtcaatccaggggcagtttcgtcccatgttcacaccattgtcggcgcggactccttcagctctgtatatgattacaacactcagatctctgaggcgacgtgtacgacagcaaccgtccaggttgatctttccaactactggacccctcaggtttgctctcatctctcttatccgaaccatgtccttcaaatcaatcacgctaatcgacttctctgcatcagctttactttcaaagagcctccgatggcatgttcacagccatcgagatggacaccgtcaatacatattatctcccacggtaagtattgttcattcggcttcctcatcctgcttttgatcttttcataagaaagcttaccaaatgaacatctttctctatttgtctctagacctgggccaaaaaatgaatctatcaaggcgttccgtaagcgtttcctctcttgtctaaacgcgtatatcttccgacacacctttgcgctcatactcattcatgttccctatcttacttctctcacctttctgtctctcaatttctcgtgcgatcatagctcctggacttcgaatgctcgccggaaaccccaacaagagaacgtacgactcctccagtttcgaggatcaggctattagttacgtctgtcttggaatgagcacgcccgatgagagcagtatgtctccctccactttcctcttgccaggtcttttctcttaaaggtcgcgtttactgatgtcaactcttctttaatcgactgatatcagagttcttccccttcaactgccctggtggaatgagagccgaagtcttcttccctagttgctgtgagtattctctctgtgtgtaaaagactccttgtactgttcgctgaagaatatttcgctctttttcatgtactttctgatatttataggggatggtgtcaatctagactccgataacgtgcgctccattctgtcctcatcaatgaccaacaatcgcgcaagagctcatacatggcacaattttcgttttcggtatcttctttttgggatcccttgacgaacagcacaaggaccatatggcgtatcctatccagaactacaattctggtgtatgttccatctcaatctgttttcagtactcacccgagaacaaggatactgacattcatcacttgatacttgaacattaggattgccccgacactcaccccgtccacctgatctctttgttctacgagttcatttacgttagtatcgtgattttttttacaaacttctcatatcatcttagcgtctgactcgttcatgggcgcgctccttacggattgaatgtttcttctagaacacccaaaactatgattatccgaatggtggaaacctcgtatgggctagtgagtgatctgttctcggtttcttctgtatcgggttcccccttctcacacattcttggctttgactaacgtgcttaatagtgggagacgctgtcggttatggactgcgtgagtcattccttcctcttcctcttcctgtttggcagcttcatgagagcaacttggatcgcttaccgtgtacctttctttgatattctagacgctgatttcatcaccggttgggatgaagagtaccttcagacggccattgataccgtaggtttcacctttgcatacatatatatcaccagaagttctttcaggctaacacgctgtacaaccgatccctatcgatagtgccccgccaacatgggaggagtgatcgaggactgccgtgaattagctcgttttataattccatcagatatctcgatcttcatctctttcgtactcagatcctgatgtctgtcctggtttcacaacagcccactttgtgcccgacatcgacagggctgctcaggcggcatgcaagggactgaacgatatcgtagacgaagacgtcggtatgaatcactacatcgcctctctacctggagataacgttccctggtacggcgagaatgccacaaaacctaccaaggatggatacgttgagcagggtgtaatggtttcccctatcccacctgtgccgacaaactggacggcagggaactgcatcagtgattcatcatccgccagatcgttgctcttgtattcgttcaccgattcagatatggttcgtccttctctttcttttcttgacctgagttgacgtgccgtcggagaaggttctggccaacaaacattctcccttctttcttcgtcactgtctgtcttgcgtagacttgggagatgtgccttgactactgctattccaagaaggttggaatcgccggaatagtgagtttctctatatcctcctttctctgtttcagaacgatggttaacctgtgtcatctcctctactatcgccttagtcgaatggcaacgcatgcttctgtgatagtgtttaccgaaacagtccgtctgtgctcaactcgacggcttgtaacgttgactgtggaggaaacgactacgagatttgtggttcttcgacttcgatgtctatcttgtaaatctctcttcttgcctttttcttttctttttccataaacgccccttcaaacagagccactttctaacgcggggtttctctggttttaatcacaacaaagcaccaatgctgatttccctgttgtcgagactgccgttcccgatggatggtcctcatatggctgcgtcgccgacaacgttcctagcgtttctggcaggacgatcgtaggatactactacggagactccacatctatgacggcaaccgcatgcttggcgatttgccagtcgaaagactatttgtatgccggactcgagtacggtcaagagtgtaagccttcatccggtccctctctttccaagtatctttcaagcacgaacgctgaacgtatctttggactatctttcgaaactaaaatcttgcaggctactgtggaaacaagcttctcaacggaggaggactagacgccagcaacccttgctactacccctgcaaaggtgattccactcagacttgtggaggatcaaacgctctgagtgtctacaaaaacaacaattacataaacactactactagctcagcagtttctctgacgcctgcacctgatggatgggcggcctatggctgcgtggttgatgggccgacgaggaacattgtcggctactacatcggctcgtccacggcgatgtcggtgacgacctgcctggctgcgtgcaagacgagaggttatctgtacggaggactcgagtatggccaagagtgcttctgtggtaactcgtttgtcaacggaaacacagcttcgaccgcttgtacgatcaagtgctcgggcaactcgacccagatctgtggaggatcgaacgcgctgagcgtgtacgtgaatagtaacacttccatcaccaccacgggcaccgccaccactactgccgagtccaccccagtctcatcatcctcggcagcagcctctgcatctgcatcggcagtcgctctgacgcctgcgacacctgcgcctgctggatggacgtcttatggttgtgtgggcgacagtaccgcgagtagaactattcagggttactacttcggatcgtcgaccactatgtcgatgaccagttgtctggcagaatgtaagaccttggggtacaagtacgccggagtggaatacggccaagaatgtggggtttgatcatcttttcttcaaactatcaactagagcttagtcttgagacataaatctgtactgactttacacacccaaaatctctatctctacaggtttctgcggaaactcgctcttgaatggaggatcgctcttgaccactgatgcatgcactgatgcctgttcaggaaactcctctgagatctgtggaggttgggccgcgatgagcgtgtacacgaatgatgttgcagcggtttcttcgtcgtctgcttcgtcgtctgcttcgtcgtctgcttcgtcgtctgcttcgtcgtctgcttcgtcgtctgcttcgtcgtctgcttcgtcgtctgcttcgtcnnnnnnnnnnatccattgtatcttctaccgtttcgtcaggcgtgcctaccacttccacctcctccgagacttcctccgtggcttcttccaccttttcgtccgaggtcacttcgtcaacgtcgtcctcggcatcttcggcaacctcatccacggcttcagtatccatgccagccggctgggcttcattcggatgtgtggctgatacagcgtccaatcgaacattgactgggtacacttacacttccactacctcgatgaccaacgaggagtgtgcgaccacatgtcaggcgaaaggatacacatatgccggaacggagtacggccaggaatgtaagtctctgaccttctcctatatacgtgatgagttgtgtttgtttctgacaggaggtctccatcttccttgtgcacaggctactgctcaaatagtttaactaatggtggagcactcgacgccaacaatggatgcacctatccctgcgttggaaactccaacgaggtgtgtggtggatggtatgtggctaccgtattcacaagcaactcagttcccggtacttctgcctccaacacggtttctcgacgtcgtgatgggaagcccagatccggaaggagatagtggtgaatgaccttatagacctcctttcccgtatgggcagagtaaggtgttcgatctatcgtatatctatatctaataattacttaatcatatctattccatctcctttcttaccttgtgctctttagcccctctttctcttgtcttgccactttgtttcctcttgccaatttctctctacataaatatctgcctatctatcttacgatctcaatgctgatcacgtcacgtccgatctctttcactttttactatagatttgtgatcaatgtcttgaagcgcgcttgaaccctcaaagatcacatgaactgtaatcagcggaacaataacaccgttagataagaacctaccttaaggggttgacttgtggccgatgtaaacgatgagacgaatgaattctgagagtaagcaagtgatggcaagttgatcgcttacataagcaagactgatatctctttccatacatcgtcgtcttctttttcctgtccaccaaccatccacttttctctctcgcttgatcttttcttctgccttttcattatccgcatccattcaggctgttcatttagctaaacatgtcatccagagtagaaacgccttcgcccgatagatacaacccggttcgaatcgatagagatgtgactcctgaattgaagccgtacgcgtcgtttttccttcaacctttctttctcttctagttatttccatacaccttctcataacactctcttgcctagcttcctgtcgctataggcaggaagtgacaagatgggatagaatctatggaaataactagaagatgcgagagatcaaattctgacatatgcttcttgaatgaaattaccagttctcgcgtcgaaaggaatgagtcggaacgatctggctcgtctcgaagtcaccgacacgtctcccgacatgatgatgacgacgaagaagatgaggaggctcgtcgaagacgacgtcgacgagaacgacagcgtgctgaggaagaagaagaggatgatccagaggagagacgaagaaggagatccgaacgacgggaaggaggagagaggagggagaaaagagatcgaagtaggaactcttcgcacaggtcgagtcactcttccaagagggaagatactagggaacggcctgacagagaagctagagaccgggatcgagaggacagagatcgagccgatcgagaccgagagatgaaagcggagagaagagaccgagagagggagcgtgaagagtgtgagtttggtttgattggctctgaaggaaaggttgtaaacgctaactgtcagtgtgattaaataacctttacaaactcagacttcgaaaagctcgacagggatcgagctgctgaaagacatcgatcctcgcctcgccggcgacgacgacactcgccctcttacgatggtcccagaggaggaagagatagagatagagacggagatagggatgcagatggaggagcggacgctttgttagatgaaatcgattctgaagctcgctcagttttcgtttctcagctagccgctcgactgacctctagagatctgggtatgttcttcgaggatatgctaggagatggaagcgtgaaggacgccagaatcgtaacggataggatatcccggaggtccaaagggtaagtggtctttcaaattctgaccagcctatcatgatggaagagtcgaatggctaatttaccttgtggccatggaaaaccctagaatcggatacgtcgagcttacagatatcgaattggtcgaaaaggcgttggctctgacaggtagggttgtcatgggcttgcagatcaaagtcgaactgaccgaggccgagagaaacaaacagcaggcggcaacgtcaactggaccgggtggtcctatgacgggtcccacttcagggtttgttatctttctttctcatgtactcagaataagatgtgcgtgtgatgttgatgcgtcgtttatttatctatcatccaggcccggctcgcttcctcctctacagaacctacctcctggtcaggttcttcctcccggacagtaccctcctggtcaatatcctcgacccaacatcaacaaccctatgttccctgttgcacaattccagcctggaggttctcacactggcggtgtgcctggtatgaacccacgaccccctatgccggcacagcttcatcgggatcgatttgctggagcagagattccttaccaccggctttatgtcgggtctcttaatttcgacttgactgcagaggatatcaagcaggtcttcactccctttggagagctcgagtttgtcgatcttcatcgtgatcctgccacaggaaagagcaaaggattctgcttcgttcagtgagttatcatattgtccttctcgtgctggcgttgagacaatgttctggttcaaaattagattctgtgctgatcatgtttttttcttctttttttttctttcaatatagattcctagagttggagtctgctaagaccgctctccagacgatgaacgggtttgagcttgcaggtcgtcagggtatgtgacaatcacccttcttgtcctcgacctagtctttctccgcatcgtatgcgcagctcctgatctttttctgtctgttcgatcaattggacatctaaagtcagagtttctactgttaatgagaaggcgacgaagcctccgatgggcggcgctaacggaggcttcaatgccggacaaaactcaggcgctagatatgctacgggtgctaacggagctggaccaggtgacatgccagaaagtttggaagaaaatcgtggtttgtcttcccccgctttccggttcaatacattcccgttcttgttaggcacgaagactgatatgcgattcttcgtcccctgtgtaggtcaacggttggaccatgctactagacagtctttgatgaggaagttagacagacaggatccctccgatgtgagctctccggctccagtaattacgtacgttccatatcttgtagagctaccagtgctgttatctggattcgcctaacaaaaacaacattgttattttagaaatcgaccgcctatgtctacccagccttccgtctttgttctcgtcagcaatgtgttcaatcctgctgagtacgcatattcctttcatccttaacttcttaaacgccgatccagcgcattatctgtaacattatatcttgatttaatccagggagactgaacaggattgggatgtcgagcttgctgaagatatcaaaggagaagttgagagcaaatacgggcctgtcctccacatcaaggttgagaaggaatctcaggtgtgttttctctgtctctgttcgatcagtgccttctcaatcatactcatcacgtatcacattcatctgttgtttcttccagggcgaggtctatatacatttcagttccttggctgcttctacagctggagtcaacggtctgaacgggagattctttggaggtcgatccctggtcgcccaggtcagtctttcgtttctgcaaaaaaaaaactcacctaaactaaaatatcccgtcattgacatgttatggcgatgatctcttctttcctgcagtatatatcggagcctacgtacaaagctcacgcttaagctcctttaggagacctttacatccaaagatcaattccattcaccttggcttgcttttccccctgtttgagttcttttgtttcttgcagatttgcttcaagaggcatgttgttcaatctcttctctcgactatcctttcttcaaaaccttttaactcgaaaaaacatattcttatcgatcactcacaaaaaaaacacctcataaaccgaaaatgataagagataatcacgttctctcatcttgactccttcttattcgttatttttatggtttcccctttatatcttcttgttcttggatctcttaactccagatatcgaatgtcgagaaaaactcaaagagaagcaaaccttttcggtggacagcgtatgatcccctgttcttttatcgtctcttctttctttcttcttgatgatggaacaagaaggcgttggtgatattctaatcaaatcgcctgttgctccctttgaatggttgcgtttatcattttctgcttttatcctcgtactgcatctatgaaagaagcccttttcgattccttcactttcaatcccagagaaagacacgtttgtagcaacacgacccgtccattcaaacaccttctcctagtgtcttcctctcctccttccctaagattcgcatgcaagagactaacgggctgtttcggcatgacgtttacagatccgtcgtcaacatcaccatcgttcgctttcatcactttttttcttgttggtttcttaaaagataaataatccacgattagagttaagtttatgcgtttctcggcctatacggaagaaaagcatcggattttaaccaacgcggatctatgtatggtatgacatgacaagcatgtttaacaaagagaagcagagagctatagagaggtgacgataacagagatgatcagacagacagggtacaggataaagaaaagacacaagatagcctggcaggctctaatccgatgaagatgattttgataagactttagcatcagatgtttcatcggtactagcttgttcctcaattactttctctgcggcctgagagaggtatgccaaattagctaaccctggcgagatcgcacctgaatccactggggtcggaacaattaggtttcctgtagagagctcgaggtggttgggtccagaaggagggttcgggtgcaaagagacattatgaggccctcgatcaatcattggttggtttataattaaaggagggagtgaatcggttattcggggtatagttgcatcagattctgccgctaccgctggcggtgatgtggggatagcgatagaggtgagcgaattactggtcgaagactttcgaggcggaagacgaggaggcgtgggcgtgggcgtgggtgtgagtgtggatgcggttgtgtattcatcaatgtcaggagtttcccgaggtcgatccggagtacttgttccgctttggaatgaaggctgaaccataattcgcgcagatgcagagtgatcagtaaataccggtgtgaagcatataacaagtgaaagaaagttcatcagcttgtacatacctgtcttctaaatttgaatcccgagccgaaatcatttcgtccggatggtgagaaccttagatttgcaggtggcaagttgaccgaacccgatcgagttcgggcgggcagtccaaagcgatttggcggagtgatcgcagaagcattgatcgtattcgacctgcctaatccagactgttgagggggtccaaattgagaaccttgagtcaatggtggagaatagatatggctttgatggggactggagcgaggagtcagtcgagagctcggtcgaatgtcaccattatcttcaaatatgattggtgcgtagattaacaaatcctcaaagaagacgtcctaaaaatcctcccgtaaagaaacaaagaaacaacaatcaacttgcgaatttaatatgaaatgcaccagttcacttataacgtaccttggaagcttgcatcaatgtctgaatgtcgacatctttgacgccgtctcttcctaatccctgaccttcttctccgaaaagaatagaggaaactaaaaagaaaaagaaacccccaagatacagtgagttagagatttgacaaaagagaagagcaacgcctatgacgtacatataatcgacagattcttcgcatccatctagtaagccaaaacgcgaagtgtcagcagtcggtcacaacgccagaaatcggaagcccggtgggaaatgctgacgcaccttgttgtcggcaacaacaaccttgcacagatgaagaataaccgctcgtaaagtagctacatgactgaattctcacaacaagatacatcatcaggataggggttgacaactactgagataatctctatacgcgattgggaacatacatggcgggcatcctcttgagcttcgttcggatcacaataaaatcattgccgatatgatcttctctctctttactatatgctagtcgttccgagagcgaccaacggaatggcggttcaggcagtcgtcgaaggtatagctacgcacgatcaggcaagcaaagattaggattggctcaactacatgggattgagaaaagccttaacgaacctttagaatagcagcgatggtatagatctcttcggtccgtgggaattggaaggactcctcatcaatctcaattttatgcacgagctgaagattattcacattcgagaggccttctttgtcagagtcaataacggcaaaaaaaattacgcattcactcactgtttgaactgtcgacaatctcggactgattcgatagagtccctcggcttccaatcctgagagaacacgttgcggctgatcatcagcgaacgagatctaaaaatgaagagttcagtgattgacgtacctcgatcttcaattcctctaatgcatttatcgacaatgataggaatgatgtttggatccccaccaattcctctagcaaaagcgtaatcttgtaatgatctgtcagaagtagcgtcaatatgtcagcgtgctgagttatgagaattcatgattgacttggcgaagacagactcacacgtcgaaaactaaatttgacgaaaatgatacaccgggatcagaagatttgtcaatctccaaacatcgatctctatacagagagaagtattaattagaccaatgctttgatcaacacgtcacacgcactcaagtctttggaaggtccgtgatagtagttttggctacagtatggatcaaaccaagcaatcagaatacagagcatcgctctcgcgattcagtaacaagaatttatttactagagaacaggcgatggtgaatctctaattccacctagcgctgccagaccactctggaggtctctcgccaattgaattcttatgaagagttctgtggtcagtccgactgcttctgatcgtttggactctcttcatagatgagaacaaactactcactgctctgtagcctcttctgatcttctccccatctggacagaaaacatcgaggtagcttgtatactgatcgagtatttcaagaagatatcatgaagtttcagaatcagatcttgaacgaattcggcagttgactggatttattagaggcaagtgccaggaattagattaagccaaagtatacaggctttatgaatcagcatatacgataagaaagaggacaagataagagtatactcacgtttgaacccccttgggccagacgctccatattgattcttaaagattccaggttgaagatctctttcctgtacttctggtctatagtttttttgcaacatcagagttgatttactatcgaaaggtcgaccatcaagaaacagcgggaacgaaggaggatgacgaaccagcctcttcagcctctctcttcaacttgacaatcttgattgtgtctgcctcgttctttcctctttccttctctttctctctttcgtacctgtccctctctctttccttctcatgcgccaatttttctctttcccggttctcgtctaagctgcctctcccgccccattcgtcactcatcccagctccgattgaagttgagcctcccgttccacctgccgcgcctctcagaccagagatcagttggctaaatcctttcttggcttcctgtgccagagcttgaggagtgatcgagcctcgatccccagtcagaattgaaggtgtatggtaatgggacagcgcttgttgtcgaggagggggagaaggaatggttgatggggaatgacccgatgagaccaaatccttggagaactcgtggtagtctgcggatttcttgaaataagccttgtgaagcttctgtaattcggagtatttgctgtggttttatcaggaggtgaacagagataaacgtcaaaaacccggaaaatgcagtacagccttcagaagaatgatcaaatagcggaagcttgataaaacccactcgttgtatttctacagaagcatgacaacggccgaagtagatgtcaacactggttttgttctaggaacgattgacgaaggcctttacacatgaagttggatagaataagacatacgtctttggagttcttaacgtcttcggctatccgactcgagattctggactgagtagcctgcgtacattgtggaggtcaagtccggccgcgtcaatacacctagttgttgtactgcagaaaggttgattatagagtaacggaccttcatcgtcatcagtggcttgatgacctcctccttcaagctgttggcaaatgcgcgtctcgcttcgacctctgatattgcgatttttcggaataggacagagcacatcaacatctgtgcatgcttgtactgttcacagtttctaaaggttgtttgttttgcctaccttgttcagagttctctctgatttgtctccaagccgatcgcacagttggaagggcgtatttcgcgttatcaaatctacaaccgcggaatccatcccgaggtcagcgttgcaaacggaagcttacctttttggtaaaaccatgcaatccgctacttagccaggacaacacagagcacgtaccctaactgatcggtaccagaatccaacgctttagtccgcatcgttaactttgccaaactatctgcgctgtaaaaccgtaagagcatcttccgccatcaatcaaccgaaatggacattgagggtgaagactccagccgatacagaagacgtactattgttcttcaagtttgactctattttgatcagatagtagtatacttagcaatcgcgtcggtctgtggtttctctggcttcaagagatgatctaagcaattagactgagaacttgcctttccttgaacatccaaagataatcatcctcgagcgagtttatatgggcgtccattacagagatgaacgggggtttctcattcgagttagcaaatgtcaaggagaagggtgtcctgttacctcctggctgtcgaccctcatgaggatagtaagccgacatgattgtggttgtgcggagaacagagttgagtggctgggctgatgaataaatctgcttggttgatgcttagttgtaataaacaacgggacggttggatgaacgaggccggtttcgcgctcggaacaagacggtcctttgcacggatgagggcagggaacggctaaagaaagaaacacatctgatcaacagacacgaagcagactgttgaatctgtaacgagcataccaacctatcgagttgagcagagggtttctatgtgggtaacagtgatggtgatggcgatgttgataggggacaatgttatggtagtcacggctgccgcaggtgacaaccctacaagaaattgaaaactctaatgaaaagatctcggatgaaacatatgttatgatgtcaaccatcatggtttcgatgattcagtcgtagtctccacaaacattctcatattaggaggcagtatatcaacaggtataataaaagggtcgtataaagaggaggaagatagatggaagagggctggagaacgtcgcggtgttacatacataattaatcatgtattcgtgagaagatgtcttgacgggaaagagataagttaataaacatgggaggaatggcattaaaagatgaatttaaagaaggaggggaaccagaataaaatccctacgcaagcaagacataacagagaaaaggaaaagaagagaagagaagaaaagaaagacaaataacagagatgcagaagaaaatgagacccaactctagactacgcgcatcacttcttcttccttctcgcctcggatcgtccccaaccaagtaggacttttttagccagctccgagtcccgctcccacgtccagttggggtccagttgaagaaactcatgtttgagagcttccgcagccgatggtcgttcttcctgcttgatcgcgaacgtacagttatttaagaagtctgcggccgaagcagaaagcatgacggccgccgggatcggtggacgatttccagttcccagctagaatagcggtaaattccatgatggtgaggagctgcagaaagaaacagggaaggaaagccaggtaaagggaaagaacagtgaagctcactttgaacatgattgccatctgctccaagccctgccatgggcgctctccacagagcatctccagaatcacgcagcctaaagaccagatgtctactttggcattatatcctcgaccttggttgttcacaacctcaggtgccatccctgattaaaacacaatacgaaacgtccacagcttacatgataagaaactaaaattctgacataacgatcaaatatatcgagatgttgtacgtacaatagacggaaccggtcatcattgttgcgtcatcagtatggtaagcgtcggctgtacgacacggaaaaaaaacttgtgagctacgtcttcggaggactatctgtgtgaaaccaaatcgagatataaacatactactctgtttggatatgccaaggtcagagatcttgcagattccgtttgtataaggatctaccaggatattgtctcctttgagatcctaaggaagtaattcaaaccaaagtcggaaataagccatcttgctcctcatgtcgacaaacgaaccatcaaaccactcactcgatgcaaaatgtttctactatgcaagtatgctaacccttccacaatctgccgtgagaaccaacggacttcaccctcttccaatttaccatattttcggaagacacttcccaatgatcctaagtatggacaaaacaagggaaacgattaataacatcaatcatgatactgtagaactgaaattgacttacctccaggaacgtattcaaggaagatcgaaataaaatcctctgattcttcgcaacctgaggagtagacaacaaacatttagttcggcattaggacgttcgaaataatgatgatggtgattatgacagtgaaacagtagagaacgaacctagatattgaacaacgtttggatgatctaaatctttaagaagttggatctcagacttgagcgcggcgatgatttgagcttgacgaacgtcattcaaatcagaggccgttgtaggcagctctacttgtttgacggctatcatctcgcccgtcgtggcgttgagacccaggtacacacgtccatacttgaggggagtgttgaaaataggtcagtgcagatatcaaacttaaatacgacagaaagctgatacttactgctcctttaccgatcagttcgccctttacccatttgaacgtagccactaatgacgacatatgacagatcagtcttccacatcttcactatattctgttcatataaaaaaagagaaaacgaaattagacgtaccaggttgagagtttgattcagtaggttcttcctggaaggtcgaggaaaccactgccttaagcttttctggcgtgacctcttccaccttacttccccacattctcgtgcttcttcgcctgatgaccgacaccccagaatcggctaggtttgacgcggtcggtttctggagaccgtttgttcgattctcaacgacccgacgaatcgactgtctgtgtttgagtttggttccagacggagcagcagacactttagaggatggcagagcggtctgtcctgcggtgtcgatcacctcagcctcgagattcactcttgggaagaacttgtcaagctgttgaaccatttgctcgggcgttggtcggaaggcccattgttgatcagcgttctgagcgaacactgtctttcgacggacgagattgacgcctggagatttatacgggctttccagctcattcgtttcctcctcggatcgctcgagcgaactagcagcctctttgtctgaccgagacgacagaggaagagacgtagcagtcggaaggttttgagaggccccatcatccatgctgttgcctccaccatttttgctactgctatcagtaacaatcggagggagggatcgattgtccattctagttcgttgaagggtatgatttccatcgtcagaatccgggtaccatcctgtatggccatgtaacgtccgggaagtgtgagtgagtgtagaaccaccttcgtcctccgcagaatcaaagtcagacctataagacgggtggctagtgatccctggatgagttgtattaggttttggatgtgaggaaacgttcggaggtttcttgggcaggaatagcaaattcgtcgctccgtcttcgtcatcgtcgtcgtcctcctcctgctcgtcttcgtcactgcctgaagattcttcagcggccaggtgtccagccgacagatcagcaaacacactatgaccggtgtctgcctcatcggtatccatagacgatgaagctgtggactcggatcgtttgagatgttgcctctcatctcgagattttggaggtgtatggatgatagctctattttccattattccatcgtaggccgactctgccggaggagaataagatgcaggtaaaggtgcggaggtgattcgagtgtgcgacggccgtgccgggtcgtaagtcgccggtcgattcaattcagacattgagccagtctgatagtagatcgacggttccgaaggtcttctcaattgggagacgctggaaatattgaactctgtttgatcggccctaggagaatccgtcggagtttcgtgatggctagacggacgacgtggaagagaagtagatgaagccacttgtgagaggtcaaacatcgtgtttggacgaggagacggttgccgttctccaccaaatggacgaacaggcgcattcggtccggggataatatgtcgatcagcaggaaaagaacttcgaatcggggatgggttgcgttgagatgattcaaacaccgcttgaggttcatacgccggagatggaccggagggtcggcttccagttggctgaagtccttgatgggcaactggggaaacatggtgaggatgcagagatagataaggaggtgtcggaggggaatgtatagagtgggtcgtatgagcgatctggttcaagtcctgataagaaggatgagatcctcgatgaagtccgccaggaaggaaaggaggaagttgctggtcggcaggacccgcacgagtgcccgtgttggagacagaattatatcctgacgtggtttctgcccgaagaaattgactgctgttattagacggatgatggaatccaggccgttgagatgtcaaaggaggctgaacatatcgccctctcaagtttggattacttctagctgatgggaccgatctgtctattggcaagaacgaccctgtctggctttgcaccggctggttgggcccggtggttccacgacgcatgtcggatgatgggttgggtggttgttgtggttgatgaaggtaagatggccggacggctagagacccgccaggaggtgagaccacaggataaaccgaagacactacgtttgggttgtaagatcttggttgtatccttctcgctgccgtttcttgagaaacagttcgaggtacataacctgaggaaggcgattgatatgagatatgttgcggatgacgttcttgttcgtgcaagaaggcatcaggtcgacggtggccgaccgtagtagccgatcgaggatctattgcgttgactctcgatgcagagctattaactgatgttcctgcccgtccaactggaagactacgatttgaaatgatattcccaccagaaggacgtctcccccactctccaaaatcatctacaacaggaagaccgcgcgtggtctggccatctcgagtaggatatcggtcctgctggcgctgttgtcggacactttgctgttgttgctggagttgtagttgctgtagttgcgcttgaaatgcttgctcttgctcctctctttgacgatcggcctatgagaaccattccagatggagaacaaagaacgaggtcagcattcatcaagctatatttgcacaccaacgctcgaagtagcagagagacttacatgatacctctgctgttctttcctctgttctctcatagccacctcgtaatcgaattcgttctggatctttctcctctcttcttcctctcgttcccattgtaaagccagcatctctgctgccaaccgttcctcctctgcctctctttcttcaatctcccatagacgtgcgaatctctcggcagcttcctgctgctcatcttctgttgctaattcttcgactgtcttgttctgtgcaggatttggagatgaaagagttgccactacaccgacagagacaggttgctcgggctctggctgatcatacggcaagaaaccttcttcttcgaccgaagcgatcgagagcggtctggatcgactccaagagttatatgaagatgtgggagacgtcgctaagtccggtgataagacaaccgagtgggcgcctgagcccggatcaatgtgagaagaactggaaggataggttgacgttcgactgagagacggagagaattcttgaggtctggacatgggcatggatgactttcgaggagttcccaccaagttttcggttgcgagtgaaagggttgtggtaggaggagacgaggacagtgagcctgctgtctctgtgagatatgaggacgacgatgattgttgaatggaaccgattgagggtgttcggccaccaccactgccgctgttggcatgggaaggtcgcctagcatgaggttttcgggaaagcttggtcgcccctcccaaagctgctctatcgctcaacacggaatccctctctgaattagaggtctcagacggagcacggggcatccgacgtcttcttggttcaccaacggttccaccctcccgctgactaggactcacgccaatatcatacgcctcagatgtgctgctggtcgtctctgatcgagcccttggctcgagggcacattggaatctgctgtcgatagaagctcgacttttttgactgctatcgggagaggaagaaatgggcgcaggcggagggatcaaaggtatagatggctgagaggtttcgaacgacgtttggacggccaagagtccaaggattccgtagggctctgaggagcaatagccgaaaagggatcggtcgtccagaggtggcgagtccaaggatgagggtgcgccagctcccatctgatggcgatagagggtgaaagaagcctgctcgtcatctcgtacctcgagctttggaggcgaggatcagaagagaacgtgtcagccatgtcaacacggtgatcgatttattatcattgtttttacaaatacgttgttgttggacaaacaaagacttggcgaaatggagaaagtccctacttactgcagtgaatactctgtcgcgcactgctgcagccgacctacttcctgacacgtcggccatcgcaaacttggaaccgtccatggttacgtacagatgcactttgcccaggggcgcacgctaagagaaaaggacatgctcggaagagcaacgcgtcaatgaacagaagaaagccaacccgtatttatattgttcgatattctaagactgacctcgatctcagccaggttgccggtcagctccagaccaagcgacttgacgttctcctgaacactctcgggttctgttgagtcatctaatctattctttgtgctccccgatatcacggcgtcgaccggagaggtgacgctcatatcagacacaggcggaatatgattttgaggaaagataagcgacaggggagatgaaggagagattacaggaagatttttcaagctggaagtaggaggtgttcggtctggtacggtaagcaaggatggcgatgtaggttgctgtggatgctgaggttgatgagtttgagatcgatactctttaggcagcggcggaaccggcggcggaggtggtggaggcggcggcggaggcggagaaagacctgtggcaggagtcgtaggtttggatgagttggatgagtaatcgctactccctccgccacggtagccgtcggagagatgggatgttgttattggtgagagcatggaatgctgactgctaaacggagcggtcgctcctcgatggggaaacgatgtttgctcggttgtactgacgggcgagatatagccgtcaggcgaggtgtgagctctggagagaaccggatggtacaacggtgagactggatagtagttatgagggtatggatagttgaatgccggctgatactgatgatgggagagcaacaccggaggcggcggcggaggcggcggtggaagaccggacgacagaccatcttgaggagtgttgacaggagtaggattatgcacaggcagttcttcgcgtttgggacctatcgtgtgatcttggtcttcgtccgatccgtctgggtttgctatccgtagcttcagtcccttctgtggtcgacggggcattgcctgtcgcgaccgagctaggagagcggagccagatgatgctgggggttgttgagaagaactctgctgagagaacgccatgactacagcagacgggagagattaagactaaagagaggagaaggatgtgtcagaaagatatgtcagaaggatatgtccgaaggacaagccgtctacgaacgacacctagacgagacacaggaggccagcgacccgagagcagatcgatcgagtggtactctctgtcgggaagaacgctcaaccgtagcgagggaacgggcgagagaggggatagggaagaaaggaagggatctcgataagaccggctgtagggtcagagagatgaccggatcctggacatcgacaaatgattcaagacgtcatattcagtactccattactgtttctgaggctgcgttcaaacaagatacaattggggttgtttcctcattctgatcggacgatccatacgagatgacgagactccgattgaagaaaaggaaggtaacacacccttgaaacgaagcgatatagagcgacactgacggctttaccgagctgggtatatgattcctgttgcacagatctcccacagacggtctcctgtcgaccgagagggtgggccttctctgttcgttcttctctttttccttctcgagttctcaccagactgtgacctgtgtgaacgatggaaggcaggcaagagaaaatgatagaaggttaccgggattgtgatgaccgaaagagaaaactattagagaattctctaatcatcgtttgtaatgactactagaaatatctgttctcacggtcgtccgcgcagtcggcctcctcttaattttccgagtcttattctattctgtaccctcagagttatcctttcttctttctactttgccttcattctatcccttcagtcgatagtcttgctctgtctcagttatggtaaagcctgctttcgctcaggctgtacatccggcatgttcatcagcgctcactcttgtttgctcaatgttttgtctcgtaccgtccctcagtccaacagtagtgagtctttgacgaaagcaattctcccaacttttcctcaagagctcatccgttccttcgccttcttcttgacttttctttttctttttctcttatcagaccttgattctcagtctcccgagcgaaaggcaaagttccttgctctcgcctcgttgtgctcggctagctcgtccggagtggtcacctacgccgagatcgccaaggtcttgagtgtggaagaatccgaggtcgagagttggatcattgatggttcgttttctccttttttttgttcctcgtctctctctctctcagaagggccttctcttctgtatttgctggcgttctctccttcttcctttttattctggttatcaagatgatgggtcgtgcatgtctgattagtgaaggagaggaaggtagaaggacagtttgagatcctaacatgttgcctcttttcctcttcttgaaaaaatgaatataactctaaaatcaccgaaacccccttcaaatccatgtcgatcaaaagctattcgattgaacattctctccgcgaaactatcccagccatccaagaccgttcgggttcagcgggcgtaccttgaggaattcggatcgaacgattggaagtcgctgcagcaaaagttggccgcttgggatgagaagtatgtagtctcgttctttcttcctttctgtcgcttcttttgctctcgtcttcgtccaaacctctactccctgaatgttccatcgaaagctcaacgtacgatctgccttctcgtcttcgaaccgaaacgaaacgatcacgatgaaaccagcttggcatccgtctcggaggtcgtgagcgaagcccgtcggattggagacacgctggaggctcctaaatcccaggtatccgcctaagcgaaccctctttgtccctttctccttctcaacttctctccttatcggaaacggagggacatagaccattgttcgttcttggatagaaaaccaaattgtcggaataggatgtggagagcgggtgatggagtaaggggaaggagaaagtatatgtgattcgaacggggaagaaccaaaaaccaaaaaattctgatgaagcctgaaacttgcagcctgcaaccactcattcacttgaccatccatatcgttcagtcagtgagcggaaaagtcaggatcagtcggtgcttgcaaatccgtgattcggaaccatcgaaccctaaaccagtcgagtcgagcggatagcctttctcaacctcagcgacgactgcaaagatatcaccatggcacaacgtaaacgcaacactgttcttcacaccctgcgtcccaagacaaaagaaaagagtggataaatttgagatcgaacggaagagaggtatataatccttttgaaaaggagaagaaacaaatcaatctatcaagacatcgccatcaatatcgttcccgccagagccagtggacgacaaagacagaaaggtagagaagaaaagggaagaagaagaaaggaaagaaaagagaaaaacgataatctttgagagacggagagcaagagcaagtgtgggttactagataggcgaggtgaacatgtggagatttggagagaagcaaggagaagggaggagggcaagatcaaatgagagaagggaaacaacacaggcggcggatgaacggctctaataagtaagaaataagagagaaatgcagataactctaaacaccaaaaaaaaacaaaatagaggcatgaaagaaggcagaggctagacaagtaaaagattggagaagtaaaaagcctataggggccgtttatcatcgagttcaatctgctgacccaaaagactctcttcatccgacactccatcgacttgtgagtcgttccggtccaactgggcctgggcggaaggcgaggtcgccatcggttcgctcgttgcgtacatcaccgtgctgctcaccacaagaaccgagccaaagaggaagccaggcgtgacgaccgacccgaacaaaaagaccgaggcagcaaaggcaataaggatactgagcgaggtggcgaatcctttgaggatattgtctgcgtatttgatcaccattgcctgaagaagaagaagaagaggacgatggatgagtaccgttgtgaacggcgaagggcgaaaaaaagaaaaaagagaggaaaaagaagaagagggaacacacagtcaagagaccaccgagaacctgaatgaggatggtggcccaggcccagccggtgaagccagcaaacattttgttgaaccaactctgggcgagtcccaactgaacaggtgaggtcgtggtaagaagatcgattatgatagggaacacggcaggtataagagagaaggagctaagctggacgttccgaacccagaggtctgcctgtgtacctttgaggacaaactcaaagtacacgccggcgagaccggaggtgaagcaggcagcgagaacggcaaggaatccggtgaggggatccatgtgtttgctgtcagaagaggtcgaggttgaggttgaggttgagggagatgccctgatgctctgaagctggacggctcccacgccaacggcgagcaggacgagcgcgagccattgtttctgtgcaagtcgcttcttcagtatggtcactgagaatccagcggtggtgagaatcttcatctggtagaggaccgagaacgtagcgacgttcaaatgggatgccgccacgtattgcaggttgttctggacaacatatacttgaataagcaagatccaagaaaaggataggcgtaagtatgcgagaacataagcacacgcagacaaaggcaacaaaagaagaacaaacttacagatggcgggaacggccagcttccagctgtctgaggaaaacacctcggacagcaagtttctcacccggatctgaatttctctttgactccagccagccgatgcatctgaccggacctggttgcccttctctggcaaaagaccagtagctccggaagatggctcggccgacgttcggtagaaggcgatcccagtcgagatggatagtttaaggagttcgttgacgaggacggcggtggcggccgagtacgcaactgatgatgaggagaactgtctagagtatgccatgcacacactaagcgacgcattctggagtgcgagcgagacgaggcttaagaggagcgtttatcaggccgcagggtcagacaggaattcggatctaaaaattcacacagcaagagtgagcgttcgacaaggatgctcacgagatatatttcaacgggtaaccaaacaattcaggagaatcgaccatattggctgagtgagtggatatacgatatacttgtccaactagatgagcgacagaggcagtgggatgtgggtggttgtcttgatggtgtggttggtggtgtatatattgtcctgaggggtgttttgggacaagggggaaatcaggtacaggccctgaaagaagttcgggacgatctattcagtacggtccaggccgaaacatacgaatttcattttatatagaaattgagattgtaaaaaaattgaatatttaatgtgctttttgtatacaatcggggaaggaggaacatgttagggttatgagcggtgaaggtgaccaacgtggttgtaaattgtataaccgatggagtgatgagcggagaagcggaggttcggacctctatactgggactcggaggaacagaggcgggggttagtaagatcgacagattacatggatgagataccaagatgaatgataggggctggcaaccaaattgacagggactcaggatagagacaaacagggagcaaaagcaaagataacaaagaggataacagagtatccaggcttcggaggctacgctatggacggcaaaggaagcctgtttcatatctggttcccagactacggaggtactgcatcgaaggcagcaggataggcagatacacagacaaatcgtgttgcttgaaaggatcaaacgatagggttacacgcaagcagagatcatagggtgtgctcctagcacatccgttgtacagttacatacttggcagttgttgcgacactcaaggaacaggtgttctggcaagggatctatggtactcaggctacagacgggtaacactcagctcgcatccttggcaagacacgagaaaggagaaacctgaatgagtggagcgagatgagtgggaataggatgaaaacagaatgggaatgggaacgagtgggaatttcgtccctctcatcattttggttagggcccctgatgatattggcagtgtgtggtgcgcattccgtgtatggacatcacgaatttgatactaaaaggtgacagctctatcgtcatttgataacatcggagaacgagcagatagttcattcacgtatctgcgctgttgttgctctatcagtatatcgacctgagagtgcgagaagataaagagagtaacagataaagggagggatacacgatatatacagatacacagactcaggtgcaggacaaagccaagacaattgacaatcaggacacactagacaaaagagaaagaggagacacacacacccacacacccacacacagagctgataaacagtctcggaagcagacaaccagatattcgaatttagagttccgccaaattgaatccgcgatgtctttgatacacctcgccgatcgatcgtgcctttgaccgaattgagtaatcgtccgacaagcaagccattaagtcaaaatcagcctcaatctgtacctgcggagtagtcctcatggccgaaggagagccatggaaagcaaaaagcaaacaaaagagaattttgtcggccgccggtttctgcgttcccaaactgaattggggccgaggacttgatgttgtccgcgattgtgtgcttgcttgcgtactcgcgtgcatgcgtcgctgtgcctctgatctttccttgtctgtccgtctctccccactactttctcggtcgtcccacttcgctcctcttgctcgggctttatccgtctgcttcgtgtacgttctctcgtcgattctattgtggcatattaattctattgttctcctccccatcagtttttgtaagtttccttcttaacagtcaatatcttttatattttcttcttcgccgttctttccattctttccctccatccatacactttacctctcatcactcatcgacgaacggacgctcgcccgctcggttgaaccaagcatcgttgtgttctctctctccctttctctcttttcttctctcattctcattcctccatctctccccggactttcgcatctacactctctatcctcacccatgttcaccacggactgtcagaatcttgtcgggttgaccatcgaccatggcaccctccagttcgtgtctatccttggcgtcggcgcatacggtgtggtttaccttgcccgaaacttagtctcagcccagccaccctactatggttagttcaggcctttccccacgccctggtctaattcctgccttcgattcctttgtcaactttatattctcatccggatctaacctatcaacacgtttttcttgggtctatcttccttccttccttgcccctcaatccacctattccatctcgtactctacttaccgtctcgacctctgacaaaatagccgttaaatgtctcaacaaccgtaatctggacgaacgccaaaagagtttccaacgtcgggagctcaccctccacacgcttgcgtcggcccatccgagcgtcgtcaccctacaccgggtgatcgagacagaagatgtcgtctacgtcgtgatggaccatatcgaacatggcgatcttttcaatatgatcaccggtagatgcagatatcaaggcaggacagatctcatcaccgacgtcttcctccagattctcgatgctgtgtcgtaagtttccttctgtcttgtcactcttgaggtccaactggccagctcattctttctccctctgcttcctcttcctacagtcactgtcattcactcggtatctatcacagagaccttaaaccggacaacattctttgcggatcctatggcgaaacagtccggctcgcagactttggtctcgccaccaccgacgtacgctcggccgattttggctgcggttccactttttacatgtctcccggtatgtctttatgagatattcttatctgggctctttgagaaaaatatatatcctgcattcaactctgtatctcgtcttggtttgcaccatcctacctcttgcatccacttcttgtagaatgccaagcacaaccagcaaactcacacccattctactttccgaaagagaacgacatctggtcccttggtatcatccttgtaaacttgacatgcgcccggaacccttggcgtcaggcctgcccacttacagatgagacctaccgcgcgtttgtgaccgatccaaatactcttcagacaatccttccaatcagctcggaagcaaatgagattctcaaacggattttcgtccaggatcccactcgacggatcggtctctccgagctcagagagttggttcttgatgtcagagaatggacagtgccgtttgactcaatggagtttatcgactcttcggacgaaaaggatgtcatcgtggacgatgtcttattcgatgcatcaccgtcatcctctcttgatgcctccccgatgcctattccgatcccgatcccgactgtcgatcctctcgaggttacgaactcttccaaaacgcatcgacggccgagttatcccagctcggatggcggctcatctatttggaccactaccaccgaggaggcagaagaagaagaggaggaagaagacaacacacctttcagacttctttccttttctccagaacttgacgatagatcggaacagcagtcgaaggagtgctcggacacagccttcatgtcgaagtctctcttgccgcctcttcctaccctggtttcggccccagcttcacagcacgatcaacggctcttccgatcacactttgtctcgggctctgatcagacaaacctagagatggacgaatcagacgattcagatgcggagtcgagcttcccagccacacctgattctcaaatcctaggcctttcccacggctggaatggatccggctttttttctcagcgcaagcagcaatcccgagtttgggagaatcagctcgggttaggattgactaatctttagattcccttctttctttcttgcttcttctgtcatccctctagctatccgtcctcgttgttgtacatttcatgatctcctctcatcactttcttatccacgacgtctcgttgtttctatcttgttcttatcgttgtctgttcttctcgctgttcagttttctttgaacctcaaccattgtatacgagtctttgtcctcaatttttgcatagtatttcattctctcctttctgggccattttgtttccgtttctcattttcggtagaaaaaaaatcagtcaagatttgcgctcttgtatgtattctctgtcggtcctcgatcgctcgctcgcacgtaatcctccactcacttgttttcttattattcatattctatccttcatacagctcagtcaaaccatcactcgcttaatcttgactcccgttttgatcaaaccctccttactaccctatgtcatttccaatatttattgatcaaagattcgctttcctgcaaatccaatgagaagatgataatcttaaggatgtgctttcgagaaaaatgactcgagtcagggctgaaggaccggatcctttcgttcaggccggtcactgttctcgggtacattttcgtgtagaattcttgtgcgatttttagatgttgatcttcatgccgatcttcatgtcagattcgttttcggctttgattgaaaacaagacgtatcgagcagattctatctcaaggtatgcgtaaggaaatcaatcaactttcagaacggctgtccttcaaaagcaaagggttttggcaatctttctgttcatttagttgttttcttgactggaatatggatttattgttgatcgttgtatgtatttgtttggacaaaatcagaaatctgtaaggggggtttcgtgatattttgcagtcgctcatgtgtctgtctcttcctcatacttgtacgtcttgtgggctttttttttcttctttttttctttttctctccaatattttgtgtgtatctgtatatatattcaatcgatcaagagtaaagttgtaatacattgagcagcctcctgcctacccgcatatccacggctatccatactcgggtcagccaaaacccatgtcaagtcagttaatcaggtcacgcctttaccttgcaggaagcaaggccaagcagtcggaaacgaatggcttgatcgtcggccagccggcgagtcaactattgggctatagcccgagcggatctttcgttcggggtctatagattaataatgaagacccaggggtcatatgcatgcctcgtcagtcttggcttacctagcctgtaaagaataatcctattaaaggtaatttaaaaaaaaaactatattatctatgtctcctgtcatgtatacacatatatatatatatattctttgcttttttgtttctctttcttaaccccttaatcctttattcctaattcttatttcctgccattcaggtatagacgacttcttgttgtgaaaaacaaatcaggagctgaatggtgattgtgagtccgggaagaaacacataaggctttgctgtctaccttgggttcatggtgttcaatatataggaaagcaatatcatgcatcattagtgagaaaaaaagaaaagaaaagaagagacttggaaaataaacgaaccaggaagaaagacagaaaacaggcctgttatgcgattcaatttattctgcagtctcgcatctctcttctcttgctttgctttctcggcaacgtctctcgattcatgtattccgcctccttccgactctatgtataagaacaagttggaatcaaagacaaccgaagatgaacggttcgccaatatatgacttgcagctcatcggttacatattacatcctacatgtcagggatacgaaccctacccatcatcggctttgaccgacagagtgactgtttgcaaagccgctcggctcccggcgttgaccgggagaggacctttagcctgactcgatctcaaccaaacccttttgatgtaattgcaggggaaccgtagtaagagtcatcaatttctattgtatgtacccagctcttccggctctgccctcttgactgctcggctagagactcttctgcccggtcagggacttcactgctcgtatttgatccctccgggtccgaccgactgcgggtgatgccccgtcatcgtttgtaaacaaaacacgaagttgacaacgtttcatcctgggacagaaatcaatgagaaatcagaataaaaaaaactctataaagagcatcatggattcttgcttttgcctttcctacctatcgttcaatccttgtctcatcccctactcactcttgaaagccggacactactcactattgccaccaacaccaacttcggctcacatatcatgcctcccctcagttctttcctcaagggctcgtacttcaccaagacttcatcccccgacaccgccgacaccgccgacaaagcgaccggctcttctgtggtcaacctctctggccatgcgaaccgcgccgagcagcctccccctgcgttctcgtacgtacactatttgttccttacttctcgaccgcagagcgctgacgaatcgagtggtcttgtgcatgtcgaaaattttaggaacgaaatctgccctccttcctatacccctgtcggagtcagacgaaagattattgttagacgaaagcccggacaggacgagaccgattatgcgctgatccacgctcaactcttggaaaaggccgtcaggaaggcgcagacttgaattgacttcttcgttgcctcgcttggcatcagtacctctacaacttgatctcatccgtcgaaaagcaaacccctctggagatttacttgcttaccccattttcgcttgaccttggctatcttggtggtatcttaatttctgttagtttgttctgtcttatttttcctatctttcctgtgcgcagagatgctaaacctggctctatgttcttctcttcttagtggaaaccaatgacgtatccgctgatctctcgccgattatgttctgcgagaggattggacctgtttcatggtatagccagacttatttctggctcgcggctgtagtttccttcaagaatttcctttctcatctcgtctcgagaatcttttttcccttgaatcttttgtcttccgtcgcgtgcctttcctacatattgtccaaacttgcttctgattccaagcccctggtcagtttgtgtgtgtgtgtgtgtgt

SEQ ID NO: 2048 - DNA, 30726 bp, Xanthophyllomyces dendrorhous
ttcttttaaacaaatatgagcgagatggagaggtgaacggataggacaagaaatgacaagattcgaacaaggattgagaggcatgactagcaaacatcgttaggatgacacaacgctatatatgaatattgagtgggagcggaggagtggtgtctacaattacgtacaactgatagtcaaggtaagatttttaaaggacaggaaacaacaggattgactttttttttagcggtttcgcatatcaagaaggagcagggaagaactatcggcaagaatagcgatgggaacgatcaataattcaatgcgcttaaaccatagtcgatccattgaatgattcctcggactgttcatacccaggaggcagcctttcttccccctcatgatatcttctatcctcttccctctcttgagaaaaatttctcgagaatcctgctcttccgtggtcccaaacaggttctgcttcttgatctagatgagtggtggccacgctcgaccttgtcgacttgatcaaggactcccctaagagactgttcccagatagatgctcgatgggcctttcgtaaagatcgctaaagtagccatcggtgaagactctagagctggctgattcaaattccattgctttggtctgtcgcatgagtgctggaattgtgtttgagtttgcgcaatgaagggagggaggtagagggaagatcggtgatgacgaactccatgcaaagtgagacgctgtggtcataggaggagatgaagaaggggtaaagggaagagcatcgggcatggatattgaccgtcgatgtttcgatatcgtcggcctgtgataagagatggaaggagacgcaggtagaaaatcggatggagagtcttcggacgataccggcgatgtttggggaggagcggaagtaaaccgatagaaagaaggagtaccataagattgatgggaataagagtaggaatgattgggtgttggtcggggtcgggccgtgggttctccgtaggctccgaacgagacggatcgactaaacccaggttgaactgtatgacgatgaacttgatgtgctgagtcttccagttgtcgcgatgggtagtgcgcatagaacgaatcagacgacagcgacatcgttcgagatagattaggtctggtttccagtccgagcgcggaaggtacgtccattcctttctgggaattgaattcaaacgagctgaacctatgattgtcgggcgacaaagtcggcgacaagatttcgtagctttgaacctggctccaatcaccgacgccctcttcaagactaacatcgtcgctcaggatcgatcgagtccgatggtcctcggccgaaactccacagcatgcccctccacctcccccacccgcttcgaccaatccgattctgctgtggctcgagtgggctgcttgacaatcagtttcatgagaatgcccggtcgaggcgggaacgagttccattcggatgggtgaagacgtcgaggacggtggagagagaaaagtgatcttcatcgttggcatcgatgagtcgatcgagactggaacttgcgctcggtcctttcggcgacaccgatagtataatagtgagacgccgatgacggcggatacaccgataagtacgagacatacgaccaggcctatggtcgcagaggaagtagagctagatggatgaaccgtcatgcaaacggataggtgagtcagcgggttcgtactagtggacatgtgcatgagtaattatgaaaaaagaaaatcgatgtctggaagagatgcacaagtgcaagtagccgggagtctattctatatgatagaaccagatggaagacgtaaactcaccttgagaacaagccgtctgactgtcgtgggtggatgtacattgcaagggactcttgttgttgccaagagtgagaagaaaaggtttccaagaagatgtcgaaaagtagatgaatttaaaaaagcgaaagtcaaggcgtaaggaaagtttgaaaagaaggcgatcgggtttgatcgatgaatagtttaatgaaggatagagggtgagcagttgagttgatcaactgggtgcaagaatcgaacagcgacagcaaagggaatgacaaaactcgatggagaacttggcgaagggaaaggaaagcaaagcaagaacgagcgtcgccaagtgaaagaaaccactctcttgggaagaaagataggaaaggagaaagatgaaagaaggagacgattgaagagatcgaaaaccgacgagcggcaggacgcttttggggaaacccgacgaacgacaactcgaaggacagaggagagcaagaggatttgataagacgacgaaggaccccgacagctctaatctccgctcgtgcactagtcagccctactagtctcagttagcgagtacaaggtagagttcaaaagacggagacaagaggagacacttggcatgcacttctcgtcctttgctctcttctcgggcagtcgtcttcaatgcccatgtacacccaaagacttactcggaagtaagcacatataatcttactcgcacgtttacatatagttcattggacacggctcatgcaggtggcttgtcaaatcgtctactactgaccaacgattgaagactttacttgtctcatcgacaagccggatgagaaagtgagatcagaagcagatgaaccatgaatatggagctgaccgtcttgcaaatatacaattggtactcatagagaaggatgaacggaaactcaacatccccaatgcatgtcggcagccgggtacgtcacgtcactagcggatagtggccttacacatgagtgcatctctaaggacgatgtcctgttatgaaaagacttaacgccggaccggcattgtatccggaagaggcgcatgaatatgaccgactgaattgaagcgcgcactcagtaagttcggtcagtatctcttggcagtagcctcttggcagtagcctcttggcagtagccagtacgcgttgagttggtaagcagtcagcaagcggacaacgattgaggtcagcaccatgggtgttgactgtcgatggttatgtggaaggaatgaaactgttgcacagattgagagtaagcatcgggccggggaacgtgacgccagcgtcttagcctctcgtcgctctttttgctttccattcaatcgatggtccgctcgatcgaccgaagaagtcaacaacacggataaacaggattgtagatcctgacatcgggcaatgatcgttcatctgcatcaatacccgtactcatgcctgtgctcggaaatatcttcctacatcttatcgacatcggtccggcgcagtccagttttgtatgtatcctcgatcagattggaagaacacatcctgcaaggagaaaagatttaaagctacaagtccaagattgagtgagatgttcgcaagtcttgctttatatgttttcgtctcaataatattacaaaataggtaggactaaaaacagaatagatgtatcaaggattttgcataaaggcaggaggaaaaggaagacgcatatttattttagagttcatacaaatcgttctgcttagccttgatgctgttgcctctgcttctcaatctgattaacgataaagagtgaagaactaagaatagagaatgtatgcgaagagagtaaagacgaatgaaggtttgtttaggtcagtcctataggcaacgctacaggttggtagaattgcaaacgaaaaggaggcatactctagaaatctatcggtgcaattgagctagaggatgatgtcgaaagtcagtaaaatgaccaagattttaaacgatcaactttgttttagccccggaccagatttgctcgtcatggtcaagagccaacaggactcacaagacaactctcctcgcctctggagaattttgatgatactgatccggttacacacctggcggagccgagacaaattatgatttatatcaaagcagtccgatataagtcaaagtttagggggttcaaacaccttggatcgtactcgatgagagcaaacttacttgtcccaacacataccagtgaaggtatggatactagcttgtaactttgccttggcttgctcgttttccaggaactcgccgagctctttctgttttcgatatcgacgtgatcgttggaaggatgatcgtgcattggagagaaatgtagaatgaagattgaaagagagttgagatatagcccttaggatcaaacaaataaagtatttgaaagataattcttgacaaggctatcacagacctgggttgcttcgtcgaaaccggccatggtagacatgatggagatgtgatcttgaagaagaaagaggggaagggagctggattctggtataattcaatagaaagagcggtaggcttagaaaacagaggggttggtccaatgatcacgtgatatgcatagccttgattggcacacgtgatttgcaggtatattccacttggctacacaagaacttttgagaagaaccggaaagtgtgcgaacatcatcgactgatcagaccacttgcgattcctatctctgttttccctgttcttcttgatcggataaaaactagacactgatcccgttaaaagaaagagagtggtcgtgctgatgcggatgtcgtttttcataaaattcccctccctccgagtttagatacttccaactggcgcgcgttagcttggtcaacttcgtgtcttactcttcagagcgcaattatctctccctctctaccataatgtcttccaaggtcatcgagttcttccagtatctgccgaattcattgtttcctcaccttcagatgtcggctctcaatgctaccggccatgtcacagagactctggcttcctccccactctatcaatctactaatctaagccaaatgagcctgatagaatcttggtgggcaagatattacgcctacatcggggatcccctgatcgctaccgcgctgttaatcttcttgaatcatgaggtaggctcatgagtaatcttagaagctcatttaatcagcgcagacgctcactcatcatcactttcttctctcttcgaccactctgacagatcgtctactttggaaggtctctcccgttctgcatcatggatacgatgccttacttccgtaaatggaagatccagcctgtaagtcctgaatatcagtctgaaatgaagcggactagatggcatatattaatgggttgatcttatcgcgtcctgttgtttcctgtgcttgaaaccaactagactaagatcccgacagtgaaagcccagtgggacgtagctatgcatatgctcttctgtcactttactatggagctacctttggtatctactcttgctcaaaaccttgactcgattctacttgacccttcccgcttacggtagatctacttccaatctttctttgtagatcggaggatttcacccgctttgtgtctacctcggtttggcgactcatgagcttccgttcccgacatggacgaagattgcttggcaaatcgcgcttttctttgtgatcgaggacacggtccactactggatgcaccgatggctgcatactcccaagctctacaagatgattcacaaggtgagtttaacagatctcgaggaaaaggtcactttcccgcgcttacttgattgaaacccaatggtgaacgtaggtccatcatgagttccccgctccattcggtttggttgccgagtacgcccacccgcttgaagtcttgatccttggtggtaggtttccgtcctgtctgattcacctctggaaccttatcttggatgtgaacaaaagctgatacacctatatcgagaacttcagctggaacgatcggaggacctattgtgttttgcgcgatcacccatgatcttcatctctttaccgtgcttgtctggatgacgcttagattgttccaagctgtttctgctcactctggttatggttcgtttttcttgccgctcctcttttaaaccgtctttggatctgcacagtactgatacacgatttaaatctagacttcccatggagcatgcataactggttcccactctgggcgggagctgaacatcacgactatcatcacatggctttcgtcaacaacttttcgtcttctttcaggcattgggattacttcttcggtcagtttacttcgcacttcttcttctatcatcatctccgtataccggcgctttatttacgaaacttgcgttgtaaacgatttgtaggcaccgataccaaatatcacgcatacaaggctcgattgagagctgccaagaatcaggccgaacgacagagacttcaaaaagtagaggacgagaaggcagaggctgagggaattgtcgcagcaaatgagacttgcgcaaaggcttaaaagattttttgtctcttcattcgtttgagttgtacatatggggttttcacagattcttcttgacagacgtgcgcttaagaatgcgaaaaacgaaaagaaagcagagagagagtaaactaaaagatgaagagagttacatagtacaaagagataacaagcagaattctaataatccaccctatccccacccaagccaacttcaccattctcgatctctgtcagactgaagaaggtcttcaggcaatggtcctcctttcttctcgtacctttcaagaaacccaggaagtctaactcgtggaagcttctcaagaacctgacctgacaatcctttctctttctatcttcctcttctctgtctgaaccgtatgactgtagaggagtgctcacatctactccgagcacttgagcaaacgtgacgaaccagtcgtacaggttgatgatcttgccagactcgagatattttgtaaagaggattgaggtatcaggtgcgtcggccggatttgatgaaggttttaggaatggattggatagttgaaagtatacataaggagataggagagcggtctggatggcttcaagtggtgatggccggaaaacctatcaagtgcatatgatgagagctatccagtcagtccgaggaagaaagtcaaccagtatgagtgttaacgttatgactgaccttgaccatatcatcgagagctgttgaatagaatatctcgtggaaaaggattttctggttcctggagaacacaccactgtgatggaggagcaagcaagaccgtcctctatcagattgtcttaccttttcgtctgaacgaggatgaaaacttacctaaagaagctacgcaaggcagtcggtatgacttgggctgcgctcgtttcggttccatccgggacacctataccacctaggcttgttgctagttttgatcggtactcggatttataagggccaaacagatcgagcgccgttttgaacgactggttcagtgggcctaacaagttggttggaaattgtctgttttaacgcatcgtaaccccacagacgtcagtgaagaaacagaaggcgtcgaaacgagcgttacgaaccctattctttgcagatccacatctagtcgactacaccgccctgtcagacaatctttcatcaactgtctccgatctttcacaccaagttttacaatcggaacatccaaattgaagtcatcgacctttgctttgcctaacaagaatccttggatcacggaaatcaaatggtacgctaatctaacgtcttctgcatgggacatgacctgtctcctctgaatttcaacccaggagatcagttcctttaaggtgggatgagaagggcctatagccagaacctgagggagcttaatctgtgggtcatacacgcgatcaggtaagagacacagaagtcggtcccgaatctcgtcagcttccatcgtagtcctgggcagaggaggcaggcaggttttgtcaaatggggggattagcattcctagtggtgcggtatagctccgaaggttgatgtactgtcagcagaaatcgacacaagatagtatcactatcagtatatcgttgtagttgcgcgatgtttcgactctatgtggcatactgtttggaaagatgaaagttgcaaacagacctgtagtgaggagaggaagcattccaaacttccatcatcttgaagatatgccgtacgaagctcatcaaacaaatccccgccgatcaaaacatgaaggtctgattttggagagaagagcagctactcaggattccgcgcaatcgattttggataaataaggaaaagcaatcagttcgggtttagtcaaaagacaaagaaacgcatgaaaggcacttacatcggacataatattttcccaaatttcctctccatccattagatccaatgtcctaagatccaaatgagatctcaccgaggctggcaagacttctctgagaacacccgttgctgtggaagccgtcatgagtagcacaaacccaagttgaggcgcatatctggccagacagtgaagaaaggaggagagaactgatgttggtaggagatgtatttgatgcagggtgatgaccggtttgcattctgtgggcagattattagccagcataaatagatttggcacgccgtctggttgttgacctttcaggagaccgatcacgatcgtctcaaccagaacctccaggctagatgttggcctacattcgaccaaaaccgtcctgaagactctggtaaaagaagacgatgatgatgggaggttgagcatctcgacatcttggtctggtcggatgtttgatcgctctaggcgtaagtaaagcagagagatgatggaccgaagtgtgggattggaagttgctgatatatccaggaacaagagcccaacacagtcagcgctgaggacttctcctggggagtaggtgaatacgaaaggataaatgcaaaagactatatcaaacgagcagcctccacgaaacttacagctaataagggtggtaggtatttgagggtacgacggaggaagttcgtctggatctcgagcaagggagcagtcctgaacgaattggtaaagtgtttgaaacgtgcctttcgtgattctggccatggtggactaacatggagttagaagagtcatctttcagcctcaagaagaactgttcgtgtgcaccccgcaaaagtctatcgtttcctaggactgacctctatgctagactcaatccgtatccagttctccttcagggctctacgactgaacgctttgatggcctctgcagacctactttcagtccgaggacgacggtgatctatcttccgccttttgcaaggcactaggaatgtaccctgtgtttttgaatcgaggtcatccatggctgttgaagtaatgattgttgaggtttacctctaacgaacgagcgagatgatggctgatgaggtaaacaacgccaaccccagatctccccaaatcaatgatgaaaatctgggcaaatttggggtcaacctgggcaaaacctgaatcactttctacttcctactttctactttctactttctactttcaacctatagaccacaaacagccaccttctctttcttgatcttcttgacttgttatctttacctctctcgctctggtctggcagatttaatagaacggaataatgtctcgtatcggtgagatcattcatcctaaagtcgctgggttgccaaaccatccaccttttgaacatggctagcttactctctctttgctcattgattcagacaagggagctcctagattcaagattgctcctcgaggagcatcaagaacaccccgtccatctgcctcgccggctccagcgctcacgcattcatcagcctcgggtcctctgaactctcagatctccttggcctcccctgtccagaattcacagggagcatcgtccacccagcctcctcttccgactccgccttcgaccattctcccttcacccagtcagcagacgccaattacttcctcattaccttctcctcctcttaatacggaacctcagccgttacctcctcacaaacctcacaacccgtatctagatgtgctagctccacctcctatccctacttcactttcactctcaaaaaacgcgccgagttttgggtctcctctgatcccctcccggacggcccccgttcgacagttccgacctcagaagtcatccataagtgctagatcgacatccgctcttacctcagctccctcttcgcccgcttttttggcaacgccggcaaagacgcagttatcgccccatactccttcccgtgtcactgctcctctttcagccttgactccttctaagacgtgtacaagtcaaaccaacgaagctccaactccttcatcgacagcacaatcaacagatttcgtctcccaatcactagacgctttagggaacgcgcctgaagcgactgcctcccaggactcagcctctgttgattcgacacctgtcttgacgtcgtcacagccgagtacaaacaaacgacccaaccgaggggtgttgaaacgagtcaggtctttgttatcggatgaggaagtagaggcagtcactttggccgctccttcaactcctgtaccttctgctgagcctgaggaatctgatttgactgtaaacaaaacggctgcttcgggactaccgccgacgacggctcggaatgtgcgaaggacccgaccaaagaagacaaatcccattgttagtagcgatgccgaagaggaggctgaatcggagctcaacggggaccaatctatcagtgaggcaggaaggatggacgtggtggaggagggtgatgagttggaaattgaaggggctcaaaacagggactcgagtgtaggagaagcgcaagagactgaaagaaagaagactatcaggaaggtggttccgaaacctagaaccaagccggcttcgaaaagtaagggagtagtcaaggaaaaggagaaacccaagttgttccttgaagatgaggcagaggatggagatgaggaagaggttgatcacgaatcggaagaacaagcctcatccgaggttgaacaagccgcagcatccaaaacacctaagccagtcgtccaacgaaagaaaagccagaaacctaaggacgatccgctcgacccagtacggaaaggaaagcgtgtcagtcgcaaatcccgggctgcgactactcagcaagaatctcgactgggcgcgccaccgcctctgacggcaacaacagctgaggaacataacgcctcgcttcctcccccacccgatgcgagtgtgatgctgatgagtgacattatcagcgataacggatttggtcgagtttcctcccggttcctagacatacgacgtaaagcgctggagatcaaaactaatcgggtgaaggcgagagaacggatgaaatctcaggctaggaaagcccagagattaagagacgggatcttaggagaagacacagatgacgaggatggtgttccgcttcaggttgatgagcctggcctttcgacttcaattccttcaacgcaacgaaacctttcctcatcttcagccaaatcgcatataccctccatcttttctggtcgagtggatgtcgtttcagatcgtacgaatgaacctgtggcaggaccttcgaactctaattcaaatccctcgacagacactataatttctgctgttgcggccgacaaagacgatatctctgatatctctgatgtcgaagacaaggattccaattatgccgcccagatccgaattgtaaatggccaaatggtgattgaccagaattcgctcgtggtagatcagcatgcacgagaggagaagaaagcaggtattatggaaaccgtggaagagagagatacagaccgattcgtcaacagtgcgacctggggaagaaaaccgagaggagagagatggagcaaggaggaaactgatttgttttatgatgtgagttatttctctcttctcatcctgcttcgtcccgggcaattatttctgattctttcaaatgcaatcttgtgcgctttgcctttaaacaacttcactcaggccattcgacagtttggtaccgacttcgagatgattgctcgtcttttccctggtcgtactaggaaaatgatcaaaaacaaatggaacagagaggaaagattcaacgatgcggctgtttctcacgcattgatggccaggctacctgtcggttagttcattttttcgactctctccatccgttctctcctttcttattgatagagtcctgaacttaatttgtttttatgtctgtttcttccttttcttcgacgcgtttctcagatatgcgaacatacgcccgaatgacaaacaccgatctgtccggacctcctcctgagatccgaatgcctacgcctccgccatttgatcacgccacgagtctcctccaatctaaaccgatgtctaatgttctctcgaaaaagaaaaaacgaacaaacaccagggatggcgaggaggttgtgggtacggttggggaggatggagaggaattgaggttatcggacgacggtctcaacatggatgagtttgaatagacgctctcctgtttctcgttctcttcttgctcctttttcttcctctctgggttttttttcttgactttcatctgttagtttcttaatataacatatgtacatatctgttttctcttcctctgtaacaaaggtggttcaagtaagacgactaggctctgcccgcagtcaagatgttatcttatcttatctatgtgttgaaagaaattgctcgaagctactagagccatctggtctctcgaagcatctaaacctttctagtcatcctctaaatgtttctttcattccatgggacgcacttgctgactggactggttgagccgttggcatttagtccagatctataagaagcgccgacctgaagatgctctatattactgacccattcctcttaatcttgcgcattcacacttctatctctaaccgaacgtcccaacaacttgcaacgacatctcggaacacatccacagatcaacatgcctcttatgtacatcccgccatcatattctgactctcctttcggctcagcctgctactcccatcaatacccatatttccaatcatatgcccaaccccaagacggagggtgcgatttctcttaccctgcgttggtgaatcgacagcgagagcataaacttcagcgacagagaagggaggaagcgagattacagagggtgagacagagagagttcaggttgaaacaagaaagagagagactgatcagggagatgatccaggttcgttctcttccctcctcttctcgctatcgaagtgatcatcatcaacatcaaagttgggcatgccaattgaaactaacttatcttcttacttgtggacaatcagcaacgagagatgcaaagatgtcgacaacatcataaccaacatcaacaacaatcccgtcacagaattcacccagcctttcacaccacttatagtgacgagccaaagttgtcgccaaggccgacaccgatgtcgataccgatccacacacaatcaccgatagagaaatttctctcgaatatgtctggtatcagccaccgagaagagttagataacgactctgcttctacggacgaagatgcaagcgaggaagagttcgaggactctgaagaagagcaggatgaacaggtgagattatatcttccactatctcctttttcatcaaatccttgttatcttgtgtagaaatgatatctgactgagtggcccttctgttcgtaaacttttccttaactcaatctttcattagttcgatacatccctcgcgccccagctacggtccgagttacaacctcaacctcaacctcaatcgtctcaatctctgaaccaaataatggaactcgaacaaacccttcaatcattgcttaccgagaaattgcctaccctcaatagactccaactcgaaggacatctcacgaacctccttctagaagctgatcgagttgacccgcatggggaatttgatgaggatgctgtcagagagaaaaggagagagcttgttcgagccgtagagcgagtgttgggtggagatgaggatacaaaggggaatgcagatttggatgcagaagaaagaagagcagaagaggaagagaacgaagtggagagcgaactgcagcctctgacaatataactataataatggttttctgcttttgcaatattttggcgaggttgaagaggggtttggatgtaaaaatgcacatgagataaaccgacagataaaagagattgagatcgagaggaggggagcgatacagtatgaaaagatgaatggtgaaaaagtacaagactacaattttctggtacacttaccattgattaaacaaaaactacaaaccccaagagagaagaagaggcagaacattgaaaggatgaaagaagttgctggcccacgaattggttacttgtcggtcggatcgacaataccttcgcccttgccatttaccaaccccttgccttgctcatctgcttcctctactcctcgttctccattcactacatctccttcggcatctgtttcgtaagaaaactccaggaggtggacccttttgtacttctttggctcctcggtattttcttgctcatctccttcggcctcttctccttcctcgccttcgtcctccgagctgtactcttcctcgatttcattaagctcaccccagacccaagcccactcctctttgcagacacttcccggtttgccccatttgattccgaatccgatagcctcctgaccgtctggttcggtcttctttccataactagcatcggtaataagaataggcgcgacttcagtcgacgggtcggtcggggcggattggtgctcggtaggatcttgggtgtatcgataatgggcgtaatcttcgaacagcgtgtcccatctggacgaagtgttcaaggtataagggtcgtgtgcctccgggtcctcggcatcttcctcatcggtagagtggtggaatcctgtgtatcaaatgagaggatagaggatggacgaagtatagaagaataaaagataacagaaagaaaaaaaaaagagaacgggacagggagaagtaagcgagtgaaagagcgaaggtcatgcgatgagaggatgtttgatcttttttgaagtctctttggttcgaaaatttctttactccttcgtttccttcttttttcggtgtagtcacgggatcacaccgaaaaagttcagaaatgaagcaaagcgacaaagaacaaaaagacccagcaaagcaacctcacatccgcgatcgttcgcccaaccgcccgtccatcagactcatcttttatgtcccgtctttctttggagtattttcttaagcatacgaatgactatcaagatggcagagaaatttatgggagagacgaatgagactgtcgattgactgaccttccaactgaacttgccagctcacacgtccaccctcgttctctacccagaagactctggaatgagcgcgaacaatcttgccctcgtcccgaggaaacactaagtttttcccaacgaggacttttggatcgatctttccgtacgacttgtcgtacacgatcgtcttccactgggaagactcgaacgcctcgatagaaaggacccggttgagtcgaagagagttaagacgttcgcggaaaacttcaggagaagcaggctcctcttctgacacagatggagaagatttctctggagagttagagatattcaggtctgacagtctggtttcaatggaggaggacatggtggtagcaatatagaatgtgggatggatggtgagatggatgtcgttggtcttaagaagatcaagaaagacctgggtaaagatagaacgaaggccatgtgagcaggtgagtgggatgcgcgtcatcgaaagctgtgtagcacgtgatatatgcacagcttgattgtggcgttgttaggcttattatctatactgatagaaaacgttgaacgtacatcagagagaaacacgggagaagcatacatcaagagtagaagagtgtgagagtagccaagatagatcaagagcacagggaacacaagccaccatggtaatcctactctctcgtttgtgggatcctcttgaaatctatcagctgattacgcgttgtcttgtcttcttcgcgctccttctcgtcagtcacaatctttctacctaggcgacatcgttcgcgtaaaggaaacaaatgaacgagccatgatcctcagaacctacgccgaacaacaagatgaggacgatgatacacatcaccatcaatcctcgatccctgcattatatcccaacgaacttgctctttccgttctgtatgccaaggacgatatgatcaagtacgcgaccagacgagtcgtgtcgcaggatacagtcgttctcgaagatcgttcgttatcgtgtggagacgccgtcaagagaagctggagcgagactgagagcggtcagatcatggaggttgaggtcatgagccggttgaggcatgtcttaacgggcgagcctgtggaaggctgggtgtctagcacagaattagtcggagcgttggcggtgcgtaccctgtcgtccctctccttgttcaaatggcccaacctggtcattgttgcttccgactgataaatcaagtatgcatgcaccataggtcgaagttggtgaccgagtgatctacaacgattggctgggagtcatcgagaaggtcaacgaggaggccactgtagagtgtcagctcactaaccattattataagcttctcgatatgttcgttctgttcttcgtcgagtctatggtcttacgtcgaatcaagtttgttattgatatctgaatgtaccacccaataatatttctcttctcaccaatagggctggccgattggatccaggctgtacggccgaaaatatattctgcaaaaaatcagcactgcccgctatcccttcacttgcatcgaatccgacattcattcaagaagagagagatttatccaaagaaaccatctgccaagttcgatgtctagccgtccttgtcaactgggttgcgttttcacaaaaggttcttcttctttcttgggtattcagctactcgtgtgtgcgtgctgaaccatcatcttttctctttttcctcatcatcttcgtggttgttgttaactgcgcatgcaacaaactcgacatacgtaggtaccgatagaggagcaagacgacagacacatccctagtagattctggtacggcgaaaacttggcaaagctgactcatgtaacgtccgatgtggatcatctagctagagtaggaagcaaagtacgtttctgaccagagtgagaggcgggatattaattgttatttacagcacttctatgctaatattttcttcttcgtaccaaaaaggtgcgtttcaagtctccgcaatttgctgaaggtacgcttgcttttgcttctcttgaacgatctcagttcttccgatgacttcaaaggaccgagtacactgtgtacggatatcaagttgatacctttgaaatacacaatatgatttttcgttcattaaacagctcacagtttcaagccgacgttgcacaaagagggtacaatcgaatttgatatcatgcaggttgtagaaacaaagtttgtcccgtcgtgtatccaaaaatcataacatccttcacagctcagcatctctactcaaactgactcttgatgatgggtctttcttcatctcgttagaactaaggtgactgttctctggcagaacggaaccgaaaccacagagtcttcgatcaatttgattccccacatttaccttaatgatcacgaatgctggtttgtctgttccttccgtccgcttctccatgttggttctttctcccgtcttgtcatgatcttgactgacactacctctgtgtttctcaataggcctggagaccatgtcatgttcaaaggagatgacgataagagacaacatgctgtcgttcagagttacagctcgagtgatcggacggcagagatccgaatcgtctctggagaggtgcgcttctgtcttgttcaatgaggctttccagatcacatactgactcgattgtctcatgttgttgctgttgaacaaaacccctgttctctctcctcgattgaaggacccggcaaaggatgagatcaaactggtgtccgctatagaggtcgaccccagggggtcgagaacaagtacgatcaccgtatccactcttgtatcatcttcgtttgtcgagcattgcccatgactgactatcgataatttgacatgaccagaacaacacagtgttcatcctggagagattgttctgacgagcatatcgtccaacggatatgaccttccccatattcccaagatcggccattgggaagatccgctcgaaccagattacattgaatccgtcctctatgctcaagcactcgtcgcttcccgattctcaccttcagatacaccttttgggttctcaaatgacgttagcaagatcgactggtatggtgaagtcaagagactaaggccggaggacggaatggtggaggttgtgttgccttcagggaaggttgtcgtcgaacatccaggaactttgttctgtctgattgaagaaggagaggacattgaaggagatgggatggaatatgaagatgaagagggtgaaggtgaaggtgaaggcaatcaatttcagttggtcgatggccaggccgagggggatgatcaagaatgggaagataaccaagacggagccagaagagagaaaggttggataggccaaagaagggacggggaggaagattatggaatggaagtggacgattgggcttccgttacacttgaccatcaagatagaggctatttccccaagatggatcctttcgtttctctgtctgatcgaacatcaacatcggccgagcctcaacaacccactgtattgattcctccagctgaacgatcaatagctgccgctcccgaaaatgtgaccactaccgacccttcaagctctgtcgagcttgatgttgagcccacacagacaactgctccgacatccaataccgtcgagatgctctctcttcctgatcttctcaatcaagcctcatcatcaccctcgacaggatcattcggcgccgatcactctccaggctcgatgaaaaaggacgacccgagttggttgagatttgatgtgttggaacacgcacctttggatcatcatttcttgaacaaagtggtagaaaagacgaacagttcgttcatgacgagactcaagaaggaattcaaagtgctggcttcctctttgcctggttggtcaatcttctgtgaacgtacaatgtttgttgatgagctgtatgggagtaggatctgaccgctggaaaagtattttgcttcactctatgatacctcatgatcagatactatcttggtcagaagctatggcgatcgactagatctcttccgttgtcttatctttggaccaccaggcacaccgtaagtaactcaatatctactgagatgaacggattatacaattgacctgacgagttttcatattgactttattgattgaaaacaacagatatgtcgatgcgccgctcgttattgacttttacttaaacccgtctcgattccctttcgatccgccgttggctcacttccactcctggacagcaggaaaaggaagaattaaccctaatctgtgagcttacgtttcaggctagaaatttcatttctctctgctctcgtctgggtggatttggattgatatcatctatatgggccgtgttcaacctcaacaggtatgaagaaggaaaagtgtgtttatcaattctagggacatggtccggctcgtccaccgaaatctggaggtatgttctccccccccccttcttccactctactcatattcatccatctcaatctagatacaccgtggtgtatattcctttttctttcaaaatgaactcgacagcccgaaccggtcatccttgttgcaaacattggtgtcaatccaaggtctggttctagttagggagccttatttctgcgaaccgtcttatgagaatctgagaggaacaccagaagtaaagattcactctgtatgttcttctttttcctcactcttctgtgctcagtctcttgtgttccgttttgtttgttcttggaaggaagacatgatggcatttggctcattactggcttacatgtctgttcttttgaaatcggcgttgatcttgtagcaagaatacaggcaagtcttcactcttctgtctcttgtttgctctcatcattttaatgatcctcttccttttgcttcctaaaaacaacagcgaaaaggcttttgttctaacgagagcattcatcctccatgctctcaaataccctatccaaggatttgaatcagagatttctacattctatttcgctcgcgggaaactagaaaatgtcattgataactcaagaaggttgatcgagcttggagaacaggcccgtggaagagggtctgggtctgggtctgtgatggaggtagggaaggaggaagaggaaggagatggtgtaggcgtgttgacgatgggcgggataatccctcttaaagttcgtctttcttcttctccttcgaactcttctcttctctccttctttctatctcatcgtggacctaatcaggacaagcctggcctctaaccatgatgatgggtttctttggtaaaacgaacagagaacaatagaagccttggaaagagttttactccaaagacaaaattgataggctggccttttcgtttctccttaatcgtgtcaattgcatcctcgttcgatcggcatgctaatttataataaatgcattgaaaataaactgagaggaagagaactgagatgtagaaagaaaacgagggttgaatacacatttaatagtggcgtctttggattaagatgtgataaattatctacttgtcgagtatatgatgataagacgaaagcatcaagagaaaagcggaaaattggagaaaagctaagaaaaacaactctcagaattagactcgtgggatcccttctaccacccgagggtagttaactctgatctcttcgaacagcgctgggtttctctgtgccatcctgttgtatcacccagttgagacccaaaaagaaagtgacaagagatagggacggtaagtcactgattcgcataacggtcaggtcgaacacagacaagtagaatcgatccaatacgcacaaggctgggtcttctcctaggcagacgaagatcgtgctgactcctccctccaatgcttgcgccaaggtcaaacctaaactcgagaaaaccaggtcaagccaagaaatggacgtcagattggtccagcctgtcttaagtgttgataagtggcgaagaaatggagattggacgaaccggattggaaaccaatcaagaaagagtaaagaatgatgactggggagtaatcaccgttgctgttgtacgaagggttggtgtctatacgaagttaagactgtcagtaacaacatcgaatattgctttgtccgacggtcatcaagaaaaacctgctcacatcgaaggtaaaggtatccgaaagcagcgcaaaggatggcgatcacataggcacctgcagtagatgagaccaatggatagatcaacattggagcgagcatttttataataagaagagaatgaaacgtaccccatcggaagaccatgccgaccagagagtcattgaccaaagcgtcgattccgcctgtagtcccgtgaataaacatgagttatacgctctgaaaacacttcttcattccgtatcctcatgatatgatgatgtaagacttacgatctttcatgagcctccaagcatctttagcagctgggatctaatattgggcaggaaaaaggagtcagacagaagaaaaaacgaacagaagcttcgatttcaataccaggagcgacgcaaattcggggagtccacaagaaaagaaaaaggcacatgtacgcacgtaggactttccgtagagcgcaatctcgatataggcgtatcggttaaaccattcaaccatagtcgtgatgcacgagacgcagcaactggaagagaacagcacaaatcagtcctgaacgatagagaagatcgacaaggaatggaacagcaaactacgtaccctgccacacaactgagaatctgaccgatagctaaatcaattcgattggaaggatgaagatgttcagattcaacttaagggaaaccgcatagtcaagagctcagggcacgtaccatctccttcagcccgagcgttctgttcaagaatactaaacaacattctgagcaactccaagagtgtgacaattaacgatccaaacgcgatcgatccaagagacattgtgctcgctctgacgaacgccttgaagcacgggtttgtcggcatgtttcctccgtaggcttcgctaggtccgtagtaataccatcctccgtatggtccacccgccaaggtacacagagaaacgttggcgatgacctgtccatgagttgataagaggatcaatgatgagcatcagaaagcgggtaggatgccgaggcgcagaatataaaaggaggagtgaggggtcggttgacaggagtgagatacttacctgagacatccaaagatatgcaaacgtgcagaagacaaccagcccagtcactttggcgctcgagcatgatccgccagccgcgctacaagcagacgagtcgggcgtccatttgacctgcagagacgcgtgcgattagaaaaggcccagttagtattgaggtggagacaaactatggtgatccgcatatgtatataaatgaatatgtgtgtgcccatcctgagctgggatagacttacgtagacagcagcgatggtgctgatagagaaagtggagactatcaacaacttgatcactctaagccaagggatgaaagcaaactcgtagaaatcagagttactcacaatgcataccacacagataacgctgtttggacgagcaacgcgattatacaaacaccatagacgctcttgtgatgtttcgagatatcgatactgaaaccaagtccaaaggcaaaccccaaaagggtgatgtgagcgattgcaagatgtacttgtggcctttggactgctctactacaagcgacccagacattcggaacttacaccatctgcagaagcaaccgagccagaggaattcgttttctcatgctccagtacgaaaggacagagatgacggcgataatcgtaaaaatgattgctccggaccagtatttgatgatccaatagtagatgcacaacgcaacgttgaacacgactgtcaagaccagggtctatggatgagttggttggaaaagagtaaacaagctgtgagaattgatcttctttgttcattgtctttcctttctctttttttttggacgtaaatcctccgtacaagacgtaaaatcacgtacgatctcaaggataatctttgtgaaggcgcggaccatcatcaggtaaaggatggacagaagcctatatgttcccgcgcggagacaaagaaatcggaaaaggatcaggtgtgagcgagatgacacatttatgcgtagaggaaacatctggacggttgactgacaaggcggcagctccgaccagagccaataggtaagcggtgtgagcgttgagtgtgactccacttccggtgtctccggaacctagtcctcctccgagaccaccgttttggacgtacgcgtggatggcgattcctgagacggcagtgaacccaaaaacggtagcgatgtaaagcagaaggggaattaaatcgttgattctctattagtccccgccgatcaggagaagatttggtgtttgaacaggtcagcttgtctgaacgggtagagctcttgatgtatgtatgtcgagcgaagcagagtgcataccttcctgggattgaaacgttctccactctctggctttgatccgtagtcaacgttctgaggaggaggagcgtattgctgttgagcatagggtgcgggagcgttcatctggtattccggaccagagttgttttgctccgggtatttcccctgttgaccttggttgtatccctgattataattctgttgctggtactgctgcccgtacgcttgctgtggttgctgtgggtacgacatgggataacttgcttcttgctctccagaaacacactaggatgggatctagcagaagaggcaggcgagtgagtgagtgagtgtatggacgtgaagaaggttgaacgagaaaaatagctggaaagccgtgagtgatcgggaagcgggcaaaggtaaaaaagatcgtgacgtcatttgaaattaccgccaagaggacttgttgaaatcttctatcctctgtctttggtcgcattggaaggattctttcacgttatacagacatttcattacatcaaacagccatcgactccctttgaaacaagacgttcctaatctcatttgcatttctgagcgatgatctttgggccagactcgagccattcctctttgctgatccagagctgatggaacgttcccagactggccaagacggatcctcctagccaggaggagaaccgtcgttcggtagcatgtccagacgcatggattcggattttttgctaaagagatcgcaaaggaagggagggggaagagcagagggagatgagtgaacgttggaaaaagaaaatcccttgcaaaacatgaacaaaagcctacttacaccaggtagcaagacaccgagttcgtagttaaatcggtcggtaaacccggctagtaaacttccacctcccgccacgaccacgtttgagagcagggccgctcggacgtccacatcgcacgccatcaccgcctcatgagcgagttgagcgatcgagatcacctggtctatcgaacgagagtgggccgtgtttgtggtgtgacgcaagcaagaaggcggtaccacagactattaagtgaaaggaaggggaggcaacgatgtttagatacaaagcagcgagagagattcagcgaaatagaaggaactaaacaatgacttactcgatcgataaactggggattgaatagagcctctccaaacttgtatcgttcagagccataagacgcgttgaagccatccgggaattcatacggcctgggtgctcgttgggccacatacctatcaaggcaattagatttcagttctcaattgtccaaatacatatctaaagcacacagcaagaaaaaaaggctataaacactaaccgctcctcgtaaggcgtctcgtatacgttgacgcaactctccctccagttctctaccactttgttctcggcgtattcctgccagctggccgttgtcttaccgtcggccagtctgtcctgcttagttgtaaaacggggagcctgtcctgccggcaccggagttcgagtcttcattagttggaatggtctgttcctcgccatgtccagtttacaatgttagttctgtcgtagagagaaacggtcaactcagagatcatttcctggatacacttacgtcaaggatagagggaaagaccgagcagggttcggtttttgcaagtaggatttgatctgcgaatggagaagagccattgccaatggctgacgtcgagttcctattccgtcaagatggatcagcaaagaaaggaaggtgtcagatttttcctaatggatcttctcctagtgaatccaaccttttctctgcttttgtcttttttcccgaagagaaagattctagaaagcgaatcctagagacttaccacctttgaggacatagccttcgaggacgggagtgatgctaaccaggtcgtttccaacatctaccaccaagctcgtcggcttgccagcagcgaaactactgagcacacccgaacaagcagtaaaccaggctgggacattctcctgctcaaacacaagctccgccatgatctctcgattcgatgtcgggttccaagcggcctccgtagagagcagcgggtgatcttccggattcactcggagtcgagagtgaagcgcgtgggacaacaacggtgggagagaactaggatcttgaactggtgtacgtacggttttcgcacaagaagaaagcgttcatatgagcccaccctgttagaaagaatatgcactttggaaggaccaagagcagaagaaacagaagaatcccacgaactaattccatcacccatcaacgttccgacctccatccctgcccgccagacgttagccccgtcctctcctacgaagtattttcggacacgaccgtccttggactcggtctgtacggatgtcggcagggtatcgtcatccatggtggtgtctccatctttgattgtgctagcagaggaagtgccgtcgacgtcaaggtatccatgtgctgtcggtatcacgcatttgggagtatcctctccggcgtagcccgctcgggtcgtatgagatccaatgtcaaagacaagagcagaaacttcagatgagcagaaagaggtgcacaacgacagccttagtatatatcgacgatagattcatcctacaatataacaatatagctcagagtctgcttactttcatcttttcatatcatgaagcgagaagcagagaaagaaagtaagagagattcgaacatgttagcttcttgtacgcgtccactatacaaaggaagaaaagttctttctgcggatataccatccgtcatgaataatctgacaggctggaaagatcagttgaacatacctccaccatagacaaccatgacgaatttatttatatgtctctcttcttacgggattgtcggtgcaaggaagggcagggatgagatttataggtcgaggctgggttgtggttagggatgagattcggcgtgacgagcaggacgcgtcgatttctacagaaccaaagtgcaatactatcccggccgagcagcagcagcagcaacaaacttggtagcatcgatcttccatacagcaacagtatcacaggatcaaagactcccagtcaaacatcctttcattagctcgttataaaggttcatacaaacgatttacgttctccctccgtcttcgagcaaatgacttcctcctcttcaacggctccttcagcggatcctctggccaaagacctccacgtaaaatatattcagtctctatcaaacgtccgttctcattgcttctttccgtccggtaaaagcctcgcttcgattcaaagcttatgactatagagttgaaaagaagaaacttccctttatctctcaccgtgcaggagcaagatctggcgtaccatcactctgaacatctccggctgaatggcgtgtactggggcctaactgcgttatgcatcatgaataggaaggatgcactcaatagacaagaaatgatcgactgggtcatgagctgttggaaccagaagcagggttcgtcttgaggaggtctttgagctgtggcaagaacaaaagcgctgaactttgtgttttctcgcaccatacgcacgcatattaggaggattcgggagttctccgaaacatgacgctcatgcacactcgaccttgtcggcaattcagatcttgatcactcaggatgcgtttgaccgactcgatatcgaggccatcacttcgtgtttgttcactcttttcttcttgggcctcgactcgacggctgattgtccacctttgactcattcggactctgtcttggcagtctacttgtctctccaaaatccgaccactggctccttcgcgggagactcgtggggagagacagataccagattcacgtacatagctgtttctgcgctttcattgctcggcacgctcgataggctcaatcgggaaaagacgattagttggttaagaaggtgtcgaaactttgacggtgggtttggtagtggcgaaggaggcgaaagtcatggttcccaaggtttgtcctctgtttgttatacagtcgtcagaaaaagaaacaatatagagtgattgatcatcaagttggtttgggctctgtcacgtatattcttaaatagtgtttgtttgcgtgggcgcattggcgatactcgacgcattggagaccgaggtcgacgtcgacatccttgccggttggttggcggagagacagctacctaatggagggatgaatggtcgacctgaaaagctagaggatgtatgttttgactcttttcttcttatccttctctttcttttctcttcctttcgtagggagatatcaagagctgatgatcgtacacgttctatcggtctcacctctggatgacaggtttgctactcgttctggaacctgtcggctctatcgattcttgggaaactccactggatcgatcaagaaaagctcatcaagtttattctcgactgtcaggtccgtcgttccctcttctcttttcccttttttctgtgtctacttctgaaccatactgagtatgtgtcttttctaaattgcttcgtttccgtcttaaggatctggaaggtggtgggataggagatcggccggaaaacatggtggacgtgttccatacgatctttggcctcgcaggcaagtcgtctacttttctcgctgccttgccagtcctctttcttatttgatccattcattgacggatttcctttccgggattctttgggggaaatgatcggatttgaactcgaaatcggacgcgcccggtaaacaaaacaggactatcaatcttgggatacaaaggactggacgaaatcgaccccgtttattgcatgcctgccagtgtaattgaccgtgtaggacttcgaaagccgtatcagattgggtctagacctgattctgatcatcaagtctcgtccgtgtcgggagaggggaaggggtcggaggtaaagtgatgtgaggtttagacgtgttacatcaggacattcacctattcatcgaatgagcaaacgtttaaccaagcttctgttgatcctcttcctctttcttccttcatctctataatagaagttctttatatatgttgttttcttaaggaaaaaaaattatacaaatgtacaatagtgatcccaatcattaacagagttgggaagaaggcaatcgtaggtgtcgatagtgagaggggcgatagaaattggattttgcgaagggagtcttcttttgtcttcttccttagtcgtcttctttcggggggggaggtccacatggttggagcattctctagtgatggcgagagagagagagagaaagaagaggtgaatagtcgtagcgtcagtacaagtagaagatagaaaagagacagttcgcgtcttacctcgagcaactcgaattttgttcgaccgatgctctctccatctgccagagcaacgtacgacattaatggaggatgaccgatgatagccgcgttggtatctctgtgttgatgagtgagccactcgctacccaggacgtggagggaaaagagaagagagagagagacaattcagccagttagaagaggaaaacaaggaaaacaacgtagaggatatcttactatttggtcatatcagcatgtcctgagtgaggaggaacaggagtaagaagaataggtcccgaatggagagagaacgttttagccttcaaccaccgaaagcgacgcgattgatagagatgacaaccgaaatatgagcgaaccggttccggtatatctggcgtgaactacgtgtggatgaacgcgtcaaggtggaagaggacaagaatccaagcgagacagaaagacaagagaccaagagtgagcgagtgggataggatgagatcttgtacatagacaagcgagaaattgaatacgtacgctgctcgagctgagtgttggccgtatatctgagttcggactaggcatccaaagaagtgtgagtggatataccagtacaaaggagtagacattcaacagagatacataccatagtcttgattgttggttaacgttgaactgtgagaatgaaagtaggtatgttggacttggtggttcggagggattgttagggttattatatccatgaaatccagatgaaattctgaatttgttgaatttcatgttacctcgacgtgaattcaaacctacagtaacagcccgataatgccctgagtaccacgcgtgacatatcactttgaggtaacctgatagtttacatcacaacctccggagaataggatgggatccatgaatatgtaatgatccgagaaagctgatcgactcttggcaattatgatccggttccggatgactggcaagaggtcagtcactcaagaaaatagatcggcaaaatgcgggcggagagtttaactatagaagactttttcacttccgggcttggtagatcatgtaacatatgaaactaaggaacgtgttgatctcgccgcccatatgaggagaccatgcgtggctttgtgtaattatatgcccaaattatcccaaatgaaccccgaagatgatgtctaacacgtcatagtttaccgaaactacacccaataatagcccatggttgtttggagtctccaagatgatccatccatactcttggctgttagccagatcgagggggtttcgagtgaaaccaaaatcatcgcacgagccttgtccctgttttctttactcacttccaccctcatcctctacaccagttccggatttaatttttgaaacctcggttgagcgggtagaatgctggagctccgaagaattggaaacgagtgtatagacagaggtgcaaggaagagacagaggcagaagaggagagaaacatatgacccgctcaccttctgtcgctgaccttgcgtttcttcggtttgctgatcgacccgctcacgtactagttacatcgccatgtgct

SEQ ID NO: 2049 - DNA, 12692 bp, Xanthophyllomyces dendrorhous
gccttccgtattgcttggctttcttccgactttctgcccgtttgatcgtttctgatacccgtcttgttgaaaattgacattacccgtatgaaaattgaaaaagccgggtgtttttctcctactcatttctttcaggtgaatctttgcaaagagaaaaagaagaagaaattcctatatagtatccatccgtttggtcagctttcagccagatttttcttttcttttcttcgtcctctcttttctttttctctttaggtcactctcgctttctccttctccgtcttctttccccccctcttcttagcttgctttccttgctttccttgctttgctcttctcccttggagctttccgtccatccttcgtgcccgcctacacacattctttaagaaaaatagactatgattgcctctctcttctctgtcgcccttcttgctaccggcattgctgcatcccccacccccgctcctgctaccgaggaccccactatcgacaagcgaactttcggtctgttttgcaactctggttggttcacctggcacgacgcttgctacaagtcctcctcgaccacctcccaacccagctcatcctcgatctcttgccctaccggttggacttgggattcttccaactagtatgtctttggttccgttctagttctctctcacttttctccgatagtacgagacgctgatgatttcacccctccttgtcctttctatctttcttgtccattcgctccatttcagtcaatgcaagcctaagacgagcgcggccgcgaacagcagcaccagagagtgctccacctccggtcactcatggctcgagaactacgtgttctgtgctcgaaagaactacgccggctcgctcgcaagctcgtgtgaatccagctaccagtggtactggtcctccggatcgctctgctgcgctaaagaaaactacgacaacgagggagctattccttctggaaagtcctgcccatcaaactactactggtccaccacctggggttgcatccctaaaggccctcagtacgccggttcgacctcctgcccgtctggatcttcttggaacgctgccacttactgctgcatcaacaaggctcctaccacgaccgatacgtcttcaaagtgctcgtcctccgagttctactggaagtctgccaacctctgcattgaaactaaccatgacaccacttccaagtgccccgagaccaccaaatcttgcccgaacaactacacttggtcctccaagtacaaacactgtgttcctgatacccgagacgactgcgacaagccgaagccgtaagtctctaaacgtttcacaaaccttctcgttcaagttgtttacttgctaatcagtctttttctcttgttcatgaaactcaacagatgctacacccgaggccacaactggtcggaccagggcaagtactgcaagcctcctactccctctgggtactccaagaggagacaggtcgagtgggtcgtcgaaaactagacgtcattcccttctcgctcttctttctttttcttctttcttttccgttccacgcctttttctgcttccttgttcatactgcttgctgcctctcgttctatcgctttctgtttcgctccgctttgttctcgctgctaccatatagacttgcttttcctatcttgctttctccgtacactcttttgctttccttgtcctactaccgtttgctttcctaccctctcaaagagagggccgacctccactcgttggctgttattttctcaacatatattatcttagagcctatcttgtcctatcacttagagtttgtttcctagagaatcctagattgctcatataccatgcacaaacactcttgttctctttctagtacaacgtgcatgcagtctttgctccctcttgagataaaaaagatattcacaggtctgaactatccaaggcgcagaaactatggcaacgacagacacaacattggtagaaagtgtagaatatgactaagcctccatctacagtagaaaccttacgacgtccgactctctagatggaggcagaactctatcaaatttctcgatgtttttgacttgtctgtactttctctctcatctctctttctctctcacatcttgctgcttctcgtcctcttctactttcttggtctctttctttgtcccatgattcaatcaagaacagcagcagaaacaagagaagataaagcagtctggccgagatccattagatggctagattaatctttctgtacctataaagaatttcaaacaaacacgtccgtagaatcagtcagagtgccgcttggattgagccaacgaacaggttggaatacaaagaagaagaaaaaaaaaacaaaaaaacgtgtctcgatgaatatatttattcgtgcgagacattctacaatcacgttttcttggctcctctcgccccctttgggtttaggttaccaatcaattactccatcagccaccctttcgatttaccaaacgatgctgaccaccccatgtgttaactgacctctctatactgatcgggaggttgaccacagacccgcgtgactgatgtcatgccaatgtttaatcgcgttctagcatcgttaagaaggctttctcatatcctcgatgacgttttccaggaaggaagcccccgatgaaccggtatcagtatctctcaatctgcgcgcggataacatttctggagatcctccttaagtactcctctctctcttaccttttccctttagtactttgccgcctaaggaaaggatttttaacctcttctctctttctttctgatccattatgattcttcttctgcgcgaactttccgactggttagctgtgtgatgcaaggtcgtcccctctaccagatcctttactcatatagtcttgttaatatgcgcttgttagtgactgacggacgtcgtatcctcgacaaccagactcctatctagcgttcatccattcactttaattgggcgcacatctgacgggctgataagctgaattgtgtaggtatggcagcttctgccgacactgcctcgcagaacttggtcctctggttcttctgggcagacgccagacttcacgtcgacatagttcatagcatggcattcgtagcttcctctttctatccgggatcatttctggatggagaggttgaatgtgtagtggaaagactgacgttggccagcttacatgcgtctcttctcttaacagcgcaacgaccccggatagcagcaacctctgtcctttgaagtttagctaatttaatcatatccatcaatgcgttcccaacaccttgtgtgattgtacgcatgtcacacggtatgttcgtcctcctttttcaagtatggctcactcttatattctccccgcatttccttcttctcgtctttggttcctctcttatttttcaatccatcctgcttctaccctgggcttgatctcgagcagatgcgccaagagcactcatgtatggaacgctttactgatgaactgtagaccttcgaatgcttggactccaacgacttcaattaataagagagatctaagtcattgagaaacagacttgattcagctcccttcttctcaatttgattgattgctcgcctttttttctctggtcatcggtgcttcttggttctctctttgatttccttctcttcggtcgtcattcttcttttgcacccgtgctcctcttcaatctttctccttttatacttctatcctgctattctagtgccttctctatgctaattgtgccatgttcaatgtccactaaatgttctattccgttgcacactctgaaacaccgatcttgtgcttatcccttcttcttcttctttctttgaaatcacctactttttccattagatcggggtctctttaggtctcttacagtttgtttctgttctctttgtttccccttgtgcccaagtacttgtactttctgatctatcctctctttcatcctattgacgctctttcttttgtctttctccttgtcttttcatccttttatactactgatgttttatctcactacacgatacaaaaatgatatatgtgccatttgttgatctcacttgccttgagaggaaagtacgtggatgaaggagaaatccgtttcataggaatatgctgagatgcgtgtggtcagaccatcctgctttcgagtcgagggctactcatctccactcaggcgatcagaagacagaacaaacacaaacacacatgatgaacatggaccagatgggatagcgtccggatgaaggcatcttgcgattctcagacatgcctctcgcgattggtgtccagttccgaagaggtcaaaccagacgttagcgctcctactgccatcaggaaacgggcattaaacgagtcgttgaagattgggtattgacaactcttctgtcttgtttctctctcctttcatatctactgcgtcttccgctcatttatgtcgggtgcagtgtcgttcgctccatcttcgctcttgcgcataggacaaatctaccgttactttctcatcaactacttgcttcatcatgctttctttgctaatcaactgctctccgtccttctatcttcttattattcattttctgtggtatgatagagaatgaataagccttgtctaatctaactcttacgagaaagaattgatgagtagagaaaggagtatacacgagagagggatgggcatgagtgatggaaagaattcaaatgataaacacagtcgcgtccgtccgacgcgcctgactttctctgattatactatctcgtaccgacactcgtacacccataaacgcacacacgaacaaacgcaagcaaacatatattcacacaagtcggaaaccactcaacctcatatccgctcaattgcacttccacacgctcgttaccagctacggtcggctctcgatcaagagtttgatagtacaaaactagaagaagatgtcacccgctacgccttcttctcggaagtttcagcagtatacgttcaatgttgtcaactcaccttttggcaaacaagctttgaccggaggacatcatgcatcgtacgtctctcgagatacgaccgagcagaaggggctgttactactgatcagagttccagtgacactaatcatcctaatccgttccgtttggggattgtacatcggatgctaccttcaacttagattcgatgaaagcatggagacaccgacttcgtccatggtgtacataaactctcaacttcaagcccacgggttctccaggcggcctattaacctatccggtatggagatcagagatcaggaaattctggtcaggtgcttgttctcgatgcttcatcaacgatctgtatgttctgagacctcctactcttctctcctgtattctccgaaacccattgcggacacctagtcctgttgctaatctgcgattcatgtttatgcacaaacaaaacaaggatgacctcactcattttgagacactctcgacagcacaccgaacgttatcgtacgaccatgaacggttggtcaagatgcacaaacagctggtggaagaaacggctcgagcagagagtaaggagcaacatgcgaagtccctcatgaggttcgttatatctcgacattgtcttgcctccgagatccttctctgatttgagacatcccaaaattatttagaagttcatgactgacaaaatatacaccgggcggatgaatgtcaaaaatgcgtgatacagcggcgctcaacaagctctcaaggacgaacaaacatcacataagcaaaccaaggaagaggcccagaaggctaggaccgcgttggcttttgtcagaagtcaagctcaggttcgttgttctctctagaagtcgtgttgaactcattccctcattagtggtctatatcttctcgcgctgttggccatgttttcgtttgcagcatgacatcaagaaaagagacgcagaaatcgctcggacattggagcgatggcaaaagctatcaaacgatcaggccaaaataatgtctacccgatccggcttgacctgcctgaacgctcctcaacggcctggatccgtcaaaccatccgaggtacatctgcttctcttatctgactcgaccggttttgatcattcagtgttttctcaacctaacggtgttatttgcttgttctgactgtattaccatagccttcggactacttccaacaaaccattgaggagatggatgatgctcgttcgagactaattgcagaaaacgacgcgttccggcgggtgctcatcaagatcgccgtcaacgtcgagtctgccatcacggacctttctccgtcccagggacgtactgtacgtatcttgtcttttgcgcttcaaggttcttataaactagtaattgatcgtttctaactatctttgtgagttgcctttcgtcttgttaaggatttaactcggatcaatccaacaacatttttcgaaccggctcaaccgacagcttacacccaagtgacatctcacgcgtcaacagcacaatcgaaagtctctcatctgttactcgagctaagggatctagtcgatcaggtcaagcaggatggtctgaaggtctcgaaggctggcgaaagatcggcacaacagccggccaatggagagaaagtgaaggcgatggaagaagaactcggttcgtctaacaaagtttccttttccgttcttctccttctttctggaccaatgcaatttacttcatggtgttcaatccaatgctcgttctctttcttaacgaaacagaaacaattagagcgcaacttgaagaacgacaagagttcctcagaaactttatagaacaatcaaacgccgcgctcgaagcagcgtctgccactaccaaaaccagttcactctctggaccatcatcgtcatcaggggaagagagaggagaaggggatggaggcgacgacctagggctgattcaagaagaattaataagacagaagaaggagctcgaggaagagaggaagaagtttaccgaagctgctgtcaaattaggtcaggagagaaccgagattgaggtttgttcaattctctcatcaaccgttttcccctgttctggacgttctttcctcaattttgtttgaaactcatttatcttgactccagcttgaacggattgccttcctggaggagaagcgagctctgaagcttgagcaaatgctctccgacctaccgcctaccccaccacagccgaatttccatcctccaaaaacaaccacgtatgcaacatcttctccctcccgatcgaaaacatactcttcctcttcttcttcgtcatcccctcgcaagcctaaatcctctagtagatcaccttcgaagcaaagtagtcatcaccaccatcacacatctctcgccagacgggctgtgctttcatcggtttattcgtccttaccggctgtttcctcccctctgcgaacaggggtcatcatggaaggtagcaagtcaaatgggaagggaaagaaggaaaaggctgttgggtccgaaggaatctcgtctgacgctgtagaaggtcgggtcaagtccaacggggatcgtcaaagggaaggctcgaatagaggtgagagtggagggggtgaaaggaggaggcattcggtcaagggtttagggactccgacaaagaaaaggggggagcaacatcgaatccggacaacatcatcgaaatcacaagagaatgagaaggagagggagcagctctgagatgatcgttcctgttctcgataattcgtgtatattcccaatctttacacgttcgtctctttgtctaactggtcaaacattgcgtttggatggtaacttcgagttggagcataccagaggcagcgatagacaagacgaacggtaatgataaatgaagctttcttggcagaaaacatcacaaatagtatgaaacgatgcatcaatcaggcaaactgggttcttacttgaagttacgacatccgtctatttcttcaaactctgatctaaacaacccttcttccagaaatcttccgctccttcccatcgacctctaagcgccaaagtccttcccaatccctgatgacattcgatagtgaaagggccgtcggctgggttaagagattcaccgtcgatggagatatattgtgaggggagagggtctttaggcaatcggttgctagccccatatggatcaacatgtaaagcccgagctaatataagtattcaagacagaaatagtcgaagaaagagggcatgcggttcagcttaacttcaatcaggattgagtcacctaaagaagacttagcggtaaggacgagttgaacaaacctttgagataatgttgtgacggttgccagacctgatttccatcttcagcaccagctactgattttatcatgacggctcttgacgcctaagcccagaaggaaggaaagtttggtttcagtacgcaaccatatcacatctggaacaggggtttgacattagctcagctggagtttacgcactgattcttgaatgacaaggtctatgagaccttgaccctgattgatgaacggccattgcatcagatctctgtatgaatccatagccagccggtcagctcgatcttggcgaaatgtcgaaagaaaggatgagtcgcaaatcaagaagaaaactgaaaggccaacctagaagcaaccgactgcaatcctgcgtaagcatacatgatcccatccttcccaactcctccagttccctgacctatcgtgatccaatcttcttccggtcccttaaacttgaccgctggcaaaggtccatcctcatctttatcttcttcatccaagttcgcaacatcgcgctctttgtcagcttcgacttgctcgggtgacatttctagtcgatcacgaagatctctcgcatgggcttgtttatcagcgtatgcaggtgaggcgggtaggagggagattgttcctggccaggaaggaggggataaggctatatagagatgaaaagataagatcagagtgtgaaaaacggaacacatcggctatttgtcttgactcctagtatattcatgacttctaaagagaggggtatgatgagcaatagaattcacgtactggctctgaggaacccatagacgaatcgggtgtcgcccatccatctcaggttttccgttcctagatcagacagaaacagccaagctcgatagcctcgttagatctaggatgaaataataataaaaagtttcacaggaaaggaacagataagcggaaaggatggacaaacctagatcgagatcagccatgagtccgagcgcggtactgaggaagcttatgattcgaggtttgtccccttggctgagagagcatagatccatcaccatttgttttcctttgatcggatggatgtttgtatcaatgaaaaggtatacgatcaacgtcgaaactagacttgaggagtatggaaataaagaaaagagttatctcttgatgcatacctttgatcagattcaaagtagctatgtggggactgaacccatcgattttcccatggattgacaagctaagtgaatttccactacctatcgaataatagtcgagaaagaatatccatcatgagggcaaattccagaaaacacaaggcgacacggaataagcaagcctgagaaacacatacctgctggtacagggacgacaggaattctgaagcaacgcttcgcgtccgacctcccagcgaacccagcaagaacctcatggattcctccatctcctgaaacacaaccgattacactgtttattcccccatgagaaacggagaacacgttattcacctgtcgagcgcgcgccattgaggggaaaatgcgaaaaagaaataatgacttactcatatctctccggatcaagctctgtggcaacatccttggcgtgtccatttcgtgtggtgtatgttgtctctacatgacaacctgctgctttcagagcaggcaggaccgtgccctctgtcattttcctggcctttcctcttccacccaccgggttaacaagaagaaggattcgacgacgggcggttggtgtcggtgtcgatgtcggataggccgatttgttgagcagagagacaaactcgggtaccgagagcgacgaagtcagggatggagacggatgaaggacgaggtgaaggagggtataagctggtgcaggcgacaggtaactcagccggatagtctccggtgccttctcggccagtctgagtgagacggaaaggatatgaagggtcggtatgacgaacaacggtttagatcctatatttggaacgatacgacaaccatcagcaatggatgaggaaacatagtaggtgtgagcgcagggacgtaccttttacgaccccatcattgcgtctcaacacgaggaccttctcatcgtgaaccacaaggcagactttcacacccgttgtcgggagcactccgtccattctaggagacgactcgatggagttagcagacagatctgatgtcttctgtagcgaaggcgagccaaactgtttcaagatagccatctcgggcaaaggggatggtggtggatgattgagctgttgggtgttggtggtgagcgtgttttgaattgtttctatcgcctccactttcatcatcaacaccgaccatctctttcttacactcaccatctgttcacttttgaattcttctcctatacgtcgcgcaatgtcatcatcatcatcatcatcaaccctaccagtcacgctgatcgtggcggctaccacatcaaacggaatcggtctggctgggtctttaccctggcgattaccaaaagagatgaagtactttgctcaaagtttgttttccttttcttctcgttctgttgtttgtctcatcccgattagaactatagtgtttctgacattccatcttggtttgctcctctcgtttcgaatagtgacttcgggaggtcctcaaccagccgagaacgaagccgagtcaggttcgaccaagccgaacgcggtgataatgggcagaaagacgtgggatgggatccctctcaaatttcgaccactcaaggaccgacagaacttgatcatctcgcgatcaaactctgtcgacatctcgaactcgatctctgcgtcctcgccgaccagtctgcacccttcgcttccttccgccttgagtagtttatcaccgtcgacgaccaacagagtgttcctgatcgggggcgcacagatttatcgacaagctctcttgaccaccccgccgctcatttcgaggatccttctgacccgcataaaatcgcctgcgttcgaatgcgatgcttttctggaagagttcagagagttggaaacggatgatggtaggaaactatggaggaaagctagcggcgaagaattaaagcagtgggctgggtggaatgtcgaggttggggagatagtagaaaaggaagtgacctatgagtttgagatgtgggtgttgaatgcttgatggacctgtttctctttggcactgaacgtgacggcaaagcacggcaagaagaaatcgaatagagcttgatatgtttgtgattgactctcatctcaaccgactaccaggtcgggccggcgaaaagagagaatatagtttataagcttgtagaactacaaaagagattcaaacacgatgtacaaagacaacgaaggcggaaaggaaaggaaaggaaaggaacacaaaaaagcaagatagagaatgacttagttgccaatgacgttataaacacaatcaaattcgacccgaaaaaaaaatggattaggagaaactatatggacgagaacgaacaggaggaaagacatgtaggtgtatagtggtgccatgatatgcaaaaagacgtgataaactgagaagagacccgatcagtcctgggaagcatcgatctccggcaaaggaattggcggtgggaatagtggggtggttgacgacgacgccgctccatcccttgaccaagcgtcagcttcggcctctgatgtttcgttcagcgtcgcgccccgagtggtcgactgggacttgtcacctttctgtgcagacagaccaagacccatgccttcggcgccgacgtcctcactgatcacgtaccccatgatatcactcagcgagatgatccctaccaagcttcccttccgtctgccctcgtatccttcatcaccggcgacgacgacgagccggtggagccttcgttttcggatcagctggaacaagttcgcgagcgagtcattcggagtacaggtgacgacgccgggaaaatcggcagaacgtcgcatgagtgcttcggcgatcgtcaggtctaacgaagtgtacgtccctagtcggacgagagtctagaaaaagttgcaagagggaaaggccaacgaatatcagatagagcaagagagcataacgattacgcgcgagaggaagaacgaacgatgacatccacggtctcgtataaattaacaaccatgcctgcctcgtccacgatcgggaccgcgctgatacctctttcggaaaacatatggactacgtcaaacacggtagtgtcgagcgtggcggtagctatcggccagtagggagagattggaccaggtggtcgggcgtcctcggaagagacgtacgtgccaatattgcacgccctcagggacctggtgagcgagtacgtgatcgggcactggggtgtgtgtgtgtgtgtgtgtgtgtgtgtgtgtg

SEQ ID NO: 2050 - DNA, 27705 bp, Xanthophyllomyces dendrorhous
gtgtgtgtgtgtgtgtgtagggaggggaagtcgggagggaagagggaggttgagcatgatgaaagaacagtcatcagcaaaagctgagtaagtatttggagacaccgaaggaaaacttacattaacggcgatgaatttgagaactctatactgtgtgagcacacttagtacgacgtcacctcctgtctgatcgtcgacgtcgatgagtggcagccgtctggcgtgggtctgttgaagctgtctggatgcttcgaacagaggttttagcggatgaaccgactgtaaaggtggaggaggtacatgaagttccctctctatgtctgtgagacggaaggaaagagtgaccgaatgaattcagagatagtcccaagagagaaagggagagcacacggaagagaagactgacctctgacatgttcgagtctgaaatgctcgacgtcggtggccgccccttcgtatgtctgggtgtagtagtagtattggatcagatggatgatgtctgagaccgtgagcattcctgaaaaggcgaaaggattgatcaaagtgtaagaggttccatcagcattcgagtgaaatgatcgcgcctagaggccgatgcaagagcaaagagacgttcgtaacatgtagcacgatacaagagatagagaggaacacgaggacctaccatcgaaacgagaggtttccgagttccaaagaggagcagagatcactccattctgccacataacgccaagtgctttcttgaccataagcttgttatcaagcacgataagtctaaagctgacgggaaagacgtcgtacgagcttctgcctttgagaaactgcctgatggatgtcatgcctgcttcatgagtgggaatctgcgaaggatctaccgaagaatgtcctctagctcgcagcctgggctgtgagtttgacggccgacgcggctttccggaagtcagaccggacgatggggacgaagccgagggtgtgatataagccggtgaggccggccgatggatcactggcggtggcggtaggggagaagtggctgttggccgactagtcgacagaggagacaggataggtgcgaacggagaggacatctgtgggagtgtgtggttctacaaggatgcggcttgatgatggatgatgagcgatgagtgatgatggaggttggatgaacgagataataggaaggtcaaggtttgatggcgaacggctgggaagaaaagcattaggaaacgttgtagtcgtttcgtagtcagttgtagtgtttttttgtagtcttctctttgcagctgcttgttagagtcacctcaaccttaccatctttctctaagggtacgcttctgaaggattttccagagccactcatatgttggtccctgtggtacggattgttctctcatgggtctcacctagtctctgctgtaaaatctctttgggcgctccctgcgagccatcgtctgtgatggctgtagtcaagtgccgtggagagaacaatagagaactttgtagtcggcctattagaacgtttcctaatgcttttcttcgcctccctagcccgcccccgagatgtttttttcggttttctgctctggctccttccagattcatcaccttcatcatcatcatcactgtcatcagacatgccgtcaagtcttcataataaacgtccttccatgacggccgagcaggtcgcagagactcttgccaagctaggtctgtctttctttcagacagtttctcacttcttcttcgctctcttccttcctaagggcctgctttgttcaagcggttaagactgactcaatctctttttttttggtttgttgacccgtgaatcatttgcctcgggtatatgccaatcattaatcgtctacctgctaccatattgaacctgacaaccataccgaaacagaccttccccctcctgagaggttagaagatgaacccgaggtcgatccggaggaggcagaggccattcaggcagagctctccaatatggatctcgggccaccagagtccgtcaccgaggctgccaggcgagcagacgaaggtcttggagctaaaggtgttgccgagggtatcgccggacagtgggacgctctgggagaagagtacggaggccagcccgagtggcttcagggtggaccccgaagaccgaccgtcatcaggtcgaccacgccctccagagtgccgaccagggtttcgtctcctcagcctcaacagtcgaccctatcatccgccccatccactccgtccaaactgtctgctcaaatcggacaggcggcctcttcaatcgtagagtccgcttcctttggtatcgccagtgccgcatccaccatcggtggacttctcgcacctcctactcccgtcaagtcgaccactgctccgccctcgaccgcaccggccaccgggatcactcaggcccagaaggaagcagccgccgccagcggtgggtccgagcagaaagtcaccccttgggatgtcgagggtgaggtcggagtggacggtgtagccattgggatgtgagttctttctctctctttctttccgacatgttctaacagccacttggcctatgttcgaggctctggaccaaagatgttgatcatacataccttttctcttgtctagcgactaccaaaagctcattcgacagtttggtacggccaacatcactcccgagctcatcgctcgattcgagcgactcaccggtgaacgagcccacccgttgcttcgacgaggcaccttcttctctcacaggtttgtctttgattcgcctcttgtttcaccgggtatgatgtgctcaggagctattattgtatttcatttcgccttcgttggctccacaactacctttacacagagatctcgaccgaatccttgacaagttcgagcaaggcaagccgttctacctctacaccggtcgaggtcccagcagcggcagcatgcaccttgggcacatggtcccattcatgttcacctggtgcgcctcgtcttcccctagagaaccctctcttgctgttcagtatttggtccgctcacctatcgatcgtgtttggttgtatacagctggcttcagagcgtgttcaaggtccctttggtcattcagttaaccggttcgtgccatctattctgccctgttggcatacaatcacccgactgactgttcgttcacatgcgcatatacccagatgacgaaaagttcttgttccagaaggatagcaagccactcacgcttgaacaaacgcatgctttcggattcgagaatgcgaaggatatcatcgcctgtgggtgtgaactcgagcgaacctttatcttctctaacctcgattatgttgggtttgtccttttcttttctctgttctttcctctgttctttcttcgtcttaaattcaatgcgtgtatatctgatcgaactggctttgaatccatggatgcgcattggtatttgttctatctagaggagcgttctaccgaaacatcgttaggatctcgaggcaggtcacctacaaccagtcgaaagccacttttggattcaacgactcgtcagtctctctctctctctttgctctctttatcacaaacactagactgacgtcttgttgatgaacacacgaatctatagagacaatatcggaaagtctcacttccctgccatccaggccgccccgtctttctcaaactcattcccccagatcttcggtgaaaagacagacatcccttgtctgattccttgtgcaatcgatcaggatcccgtatgtgtttctctagttcgctcgttctgtcccgagcttctaataaaacaccatcggctaattcgagatcgatctctacttctgagcagtacttccgaacgactcgggatctcgcgcccaagcttaaataccagaagccagcactccttcacgcaaagttcattcctgccctccaaggagcgcacacaaagatgtctgcttctgatccgaactcgacgatctacatgaccgacacggccgcgcagatcaagaagaagatcaactctcatgccttctccggtggaggaggtgatggttcggccgaagaccagaggaagtttggaggaaacccagatgtggatatcagtttccagtacttgtgctttttcgaggacgacgacgagttgcttgccaagatcgctcttgtacggcttttccttcttcctatctttctcacttgatggattgagcaagactgaaccatcttactttcggtttcatctatcccactggctttaaaaaaaacaggactacaggaaaggagagatgctgtccggcgagatcaagaagttgtgtatcgccaagatccaggagtttgttcaaggcttccaggacgtacgtcttagttttttccttgtctccttgttcttttcttgtatctcatcgttttcccatctgacggttatgctatctctttctttcacctccctcttttattttgacgactgtaaagcgccgagcaaaggtgacggatgagttgacgaaacagttcatggacaaggatagaaagattgacccgttgcctggaaagaaagtcatcggtggccaggccgcttaaatcttttttagaatcttcctcttctatacatctatagaattttctcccctctatttaactattcactatctagcgtactctccacaagctcttctatccttcctgtttgtcttccttttggttcttaatcctttcttgtctgggttgcgggggatcatctaatgacggaaatcgtttttggacgcaaagagcgaattacccggcttgaaccctaacagaaatcgagagaattggaccgatgcgcgctatagatgattgagaaaggccatccaaataatgccaaaagaaggtagagagggagaatacagaacgacgagtcgatcagggtagttcgaaatcataagcaaggacatcctgggtgtttggtctgacatcctcgatgacaatcctgtttcagatgagcaaccgacatcagccaggtgaagctttcgactggcgaatttcttctcttcttgagacaacgaaagcaaagaaacgaacttcatgtgggcatcgctaacggcatatttcttgagagcatccatgctctcgaataccgcgtagaagccttcaggtgtcgttcatcattccccatgagttcgcgaagagagagagagagagtatgagtaatcagaaagttactggccaacaaaaatgcagacagctcagataaaaaagatgagcaagcaaagaaataaacgcaccccaatcaaatcccttggctcggtcagcgatctttggttctcctacataaccttccaagacaccaggtacggtcaacaacttttggaaccgagctttgacctgtgcttggtgagcggctatatcggccactgccgtgatggacgaagggggaggagcaagtttccagagaacgatatgaatgatttctaatatcgttgggtttcaaatcagatgtcagtcagctcccagaaggatgaaaggtctggatgaaagagctgatagaaggatcgaccactgactgcccatggttgaagatgtcgagatggtgtcggagatggatggataaagaagcgaattcgtttttcgtaacaaatacaaattcttctaataactttcaatcgattttctaatatctttttttccctctttcttagccatcgatcctccttctcatccatcatcttcaattggtctccgtccattcaagcatacacaccaacacacactcattctagctagaaccagacacgctgaagccgtcccatgcctccaagaaggttcaaccagccttctccgctaccccatcatcgaaaacgaccgcacacgccgcctcaacctgaagcggcgcctctgccatatgactcgttaacggtttcggtcaccatgctcggagcaggccaggaggttgggagatcatgttgtgtcatccaacatcgaggtcggacgatcgtttgcgatgcaggtgtagacccaggtgctcatggcttgcccagtttaccgttcgtagatgagctggattggagtacggtcgacgtgttgctgatcactcagtcagtctatatcatcctctctctctttgtggtctctttctctatggctttcaggttcatacgattggagttatgagatcagtcgttgatgcagtcttttagcgtttcgtatgcagtgcccatctggaccatgccggaggggttgcctatatcatggaaaaggtaggtttcacctttgtttcttttctagtggtcgggttgtcataaagagggccgaacggtcatcgatattgtctactcttcgcctgaattttcttcgatgtactctcgctgatactgctgaaatttccaaatcgatatcgctcttgttcatttggcctgcagacaaacttccgggacggacctgataaggtatacatgacccacgcgacgaaaggaatctatcggtacattatgcaagatttcatccgtgttcgctcgtcagtcttcacctctttctcttctatagcacccttccgttgaatcgtttgatggtctaacaacatgtactcctgcagacgttcaaatgcgacggatgacgcgctcttctctgagtccgacgtactgtcctccctgtctgctattcaaacggtagactaccatcaatcgatacatcttcccggaggaattcattttaccccttaccatgccggtcatatccttggcgcttcgatgttcatgatcgagattgccggactcaagattctttacactggagatgtcagtagagagatcgataggcatcttgtgccagcagagattccgctagagaggccggatgtgatgattggggagagcacgttcggtacgatggcgctggagaacagacaagataaggaatcaaggttcctcagtaagtgattttgccgtatctgaagttgatttagttgaatcacagagcgagcgcttgttgaactccgctaacttttttcccacctatttcttctcctgcttagacgaagtacagaagatcgtccgcagaggtggtcgatgtcttctccctgtattcgttgctggctcggctgttgagcttctgttaatcctagatgaatactggtctaaaaatccggaccttcactcaattccgatctactacggatctcatcttgcccgtcaatgcatggaggtctacaagcaatacatccactcaatgaatccctccatccgatccaccttcagcaagcatgagaatccatttcagtttaaacacatttcccacctcagagacgttgccagatggaaagatgatgggccgtgtgtgatgttggctagtccgggtttgatgcatgcagggccaagtagacagttgttggaaaaatgggcgccagaaagtaagaacgggttaatcctcactggttactcgaccaccgggtccatggccagagtaagtctctgtcgtttctcttccctttcttcggggtttcctgcttaaacttgttttcaaccctttattactgggcccgccctcttggcggttcacgcattttagcatatcaccgacaagacaggactagaagatatcgaaggtctcaacggccaaaaaattccgctaagaatgtcgattgagacagtctcgttcgctcagcatgttgatggcactcagaacactgagtttatcgaacagatcggagcggcccacgtcgtacgttattgagaactcccttcttgatttcttattctcgtttcaaacccaacccatcacgggacacgaagctgagcttggtcagatcgtactgatcactgttgtcaacaggtcctcgtccacggagaacgtcaccagatggctaaccttcgaaaccaactagaaaagaacgcaaaacacaacgagcgggacgtcaagattcattctcctcggaatactgaaaagttggatatcgttcttcgaacggaacatatggctcaggtaagtttttctttttctaaacactgcttccttcctgcaaccttctttgtctcctcttgccgcggcgcaaatactaaataggatacggcctcttgtgtgtacatgtttgcttgcgcgtgttgtctttatatgtaaatctcaggctatcggccgactagcttctcgaccgccttcaacatcccagctcgtttctggtcttcttctctctaaagatttctcgtataccctactggatccatccgacctcaaggactttacaggattggaaacgagtgagatcaaacaacgtcagaatgtcagactgaatgtcggttgggatttggtcaagtggcatctggagggtatgtttggtggggttgaagaaggtgccgacaagaatggaacgccgatcatcagagttcgttcccttactatctttcgtttacctatatgttttcaaatatcttgaagagacaaagacaatggaaagccgtgattaaactgacatcaggattgttggtctttaggtcatgtcctctgtggatctaaaattggttacagagcgagagcttacgctcgaatggatagcaggaacgagtagcgacatgatcgccgatgcagcgctctcgttgattctcggaattgaagaaagcagaagctcagtcaaacgtaaaacccttactctcttcgcattcccgtttacggacgtacatgtctgatgagattggccatctgttttgcttttcttttcttctctatccttacagatactacgaagaaacatcgacactcgcattcgcattcgcattcacatcagcataacccaacggtacctccaggaggagagaccaaatcctcaaatacggttgacatcgaccgggttcttcctttcctcaccgctcactttggctctgccgagctagtctacatatctcctcccagtacaagtcctatcaagccagaagatgaggatgataacggagacctgaatgaagacaaggccgagatcgaagctgaaagatctgaagaggatccagtggcaaagatagacgagtctggagatgatgtcaaagtagaggtcgatgagagtcgtatggaagccattctcgaaggtgacgacgggcggaactcgacgaacggggaagagcagagtgggaaggtcggaggagaccaggaggagggggtcaagagaccgacaatcttggtcaaagtggatgctcacgaggcttcgattgacatttggacgatggtcagtatctctttctcttttttctttctttctctcttccttctccgctctcgagtaataaactcagacgacttgtatctggactttttgggttatcagaccacaacgtgcgcgagttcaactagctttgcgacccgggtccatggtgtactcgccatggctatcgccacgactacacctcttaacgtagcgtttgagtcggccaccggccttgtgtctggccagtccggaacaccagaagagggcaaggagcgaaatgggttggagtcgttcgtgaggccagaaggttcatcgacgaacgaaggactggcggatgagaagggcgatttagatatgtagaaatgtgtactctgatgaatcaatgtaaatgttatcgtggaaagcacaacatgcgaagacgggactgtctaacgagaaagagaaatcaacagaagataatatgaagaatggaaaacgatgagaaagaaaaaagagccatccaaagaaaaagaaagaaaagagaaacgaccgctgcagggtttgaacctgcgccttcagagaagagtagctgatttgattgaaattcaaggctaccgcgttagaccactccgccaaacggcctgttgatatttatattgaaatttttacatagatatatagagtcatagtgcgttgtgcatctcgtccgcggctttcccaacacacctccttcctgcctccttcatcttgtatttcaacctctctgcctcgttcatcactctggagttcaaacaagtcttacctcgtttctatacacacaatatctcccagatcccaatctatgcttcctcgtttgatttctctgcttgtgttagggctagggtgtttcttgtcgctggcgagagcacactcgatagagatcgccgctggtgcaaaagaatgcttctttgaggatcttcacacagaagacaaggtctgtctgttccctttattgttctctccggttctgctcctcttttccttcaagctattgagattagagtctacttcgactgccgagctcgtattcacagtagagcctccgacagaaacgaaccgtttactgacaatacttgctgtctatcggttgcctatcgtctgtcggctattcagatgacggtcacctatcaagtcggagagggtggtcatttagacatcgacttttgggtttgtcccatttcttcttttctctctttctctctctccttgctccctgcttgtttgataccatgctgatcatcatctacgcgcatgacaatgatcggcaaccgctttaatcgtgatttagctgaagaacccgtcgtcgaccatcatctattctcaacatcgtcaacctaccgggacgtactcttttacagccgatcagaatggaaggtatcaatactgcttctcgaatgagatgagctcaatgtcccccaagattgtttcgttcgtccgctttatctcgtccttctgccctttgtgtcgcttcgctcttgatcttcagggaaagcttgttcgtcctgcacgcgtcttgtccacgactcaacactttgctctgtctctccgcttctttttctcttgttctcaaatgtccctcttgttcgatcagattcaacgtccatggagtgatctacattgccgatgacggtcaaacggcgcctattgagcgacagatcagggagctagctgatagtctacaggacgtgaaggatgagcaggagtacatcgtggtcagggagagagtccaccgaaacagttcgtttcttttctctccctccttacgttcattacggctttctcttcctcttctgcggaatctctgtctcaccgccggtttccatggttctcttgctccttgatagcggccgagtcgacaaactctcggatcaaatactggtctatcttccaggcactagccctcatcggtgtatgcgcctggcaagtctactacctcaaggtatcgtcgtcgtcgtcgtcgtcttttgtttgctctttccatctgttctcagctatccgggcatgtttctaaaattctaaaccatcctggggtctatttctgttgtgtctgttgtgtcttttgggatacaggcgttctttgaagtcaagagagtcatctagtaacgagaaggaaaccctcggaattcgtaccatcaacaacggatgatgaacatgtcaagtttttttttccctttcaaataatcaagagtgatgaacagcaaagaatgagttgttcttgggggtttggcttgtctttgacatcacagaaaaagggagaggaagagggagaaagagaaggtctgattatgaaccgaccgagtcaacgagccatataataatagcagatcgcataaaaacaaaacaaaaggaagaaagaaacagacaaaatttcacatacgtaagagcgcgcatgtgtctggaggttctttcctctgaagaaagaccaggttattgtttgtaagatagccgctgaataggaggaccagacacaagataatagagaagaagagaagtaagggagaaaaaaatgtttgactgggacaagaccagaagaagattacaaaagtgaacaagacaaaaagagatttccaacaaaggcacgagcggtcattcttgggaataaacataacatggtcgatttgatcggtcgagattcgcatgaaacacggaacacgaagcacgttctgctttccccagaagaacattgttgtattttgtacgatcagtgatggagagcaggtagagaggagatacatcaacgatccggaagagaagagacagcaagagggcgagtgaagaagtcgtatgggcttgcgcggtttccagggatggtgatcagattgggagactagatagaaaagagatccgctcaaacgttagtcaacgaggacgaagcgtgtctagtaggagaactgtcatcagcaatattcagaacatgtggattgccgtcagcaacgtttgtttcccgggagaaatcagaaatagaaagggcttcagccgagacacacccttccatatgactggccatgatggactccttgacgggcgagctggagagcgtagggatatgacctcccgaagaatgaggaattctgcagagagacgaggaaagcaaagacaatcgtttgatccaatctgatcagacgacgaagagcggaagggactagcacacacaacagtggaaacggatgaacatacgtctcaggctttggaatagctgtgccaacttggacaatgtggccggttgctttgcctgctttggacatggcgtaatcgccggaatcaaagaacttccgctcctgtgttagccaagatgtgtatacgaagatatccatacggatcataagtagagccaggcgtgttcaaacaggatggccaaggagagaacgtttgaatgtcaaccgggaagccaggcgttgaatgaagttgcaggatcatccgtcagctgaccagagactaaagcacaacctagtacgaggaagaatgtctgacctgcattcggttcagtgggttcttcttggctggaagcttgccgtaaagctgaaagagtttcttttcctcctcgttcaaggactgttccaaagtgagaaggaaggacaaggactggtcaactatggatttcgagatgaggataactggtcaaaacagacgaggcatgttcgtgccagaaagagaggatgagaggaagaagagagaagccaccaggacgtacggagaggtccactttgttctacagaccagccagcagatttgtttcccccccccccatcgaatggacagataaacagatcagcctctagcccaacgagctgtttgtctggtcgaactgtctgcttaccttttgagagggaagcatcgtgtcgatcagaagggtacaggtctatgtgggtgatggttggctgagaagtgagcgggtgagatggaagaatcattaggtaatatttgtagttcgctcattacaaatgcgcagcaggtcattatggatttctctgatgatctcctcaacatcttccttctagctggcactctcgtcactctcatcaacagaaaacccatcgttcgctcttggactggaacatagaccaagtgttgttctcttgttggcaagtgcacgtttgtcttgagtacaccatacgatacccgtacccaccatggatccttgctcgcccatcggtctggcacagatcccagtgctgatcgtgccgctcggcaaagtccgggcagagacttggacaaagtattcagagctccttggttcgttcacccaactcagccaggcagatatcccactggatgcaaaccataagaagtccaggttctatccatctctatcctcgtcgttccctacttcggctgcttcttctgcttctgtgacggctaccggagcaggtctcgtcaagagcaacaacaataatacccttcatctcacctactcccactcgcttccaccgttgggctcaacagagtccctctcgctcatcagacctagcgtaaaaccattaatatttatcgggatagtcgacctccatcatacatgtactccatcactgcctctgggcgcacatctgctttccaacaaactggcagaactctttccatcgaacgacagccatccgctcgtcgtaaagtgctttggggtggggggagaagacgataactccagagatggtggtccggacaaagagacgaccggaacagtcggcatagagatcggtttgaacgaggtcgtcatagacggtggtccaggagaagtcggagggaacggggtgaccgtgctgcctagacttggtcaaccgagagagctgattgaagccatgataggagagttggtaggaactcttctaggagagttcagcgatctggtaagtgaacctttcgagctgcactctttttctgcgtcttattctctcaacaaggttttttcttcttgttcttgttcttgttcttcttcttcttgtttctccttctactcaaccgaccatacaggctgcatcgttagaaaccccgtctggttacgcccaccttcaccaatcgcttctcccttcattctccgtaccctccggtccaaccagagcttcgtctcctttctctcgtccaggaacggcacattcagcatcggtacccgtatctcactcccagcctcaccccttccgatcgtctactctgaatggcgggtcgacaccacccatctttccttcccctagtcccacacctcctgtcttgtccaacactttaagctcgcagacatctcaactgcctcctttcccaccttctttcaaccgttcggtctccgcttccgctcgtactacaacagcctctccaacaccgatgacaccgacgtccgaattcggtgttgggacaggaggagggcctgtcaagacaagcctgggaggagtcggcagaaaaagagtggtgtcctccagcccgagcaccaccagccaggcagcgacatcattgcccacctcgtcggcatcactcgcaccggcatcaggaggagggcctgttgtgggaagcgcgcgattgaatgttgtgttggcaagtttgtatctactaagcggtcggctgggagatgccatcgccagcatcaacgaggctctgcctatcttcaataaatcaatgaccgatccaatctggctagcgaacggattggagatcctgggaagcgcaatattattactggagctcaagtctaaaggaccttcttccgctggtcgggcagggcctagcctgggagcatcgacctcttcctctttctcgacaagttctggaggggtaacgacaacagaatacgcagagatcctaggaaacctaaaccaagcaatcaacacctatcatttttacaggaccccttttccagcatctcccactggagcacggaacccacttccggcaatgtatacctggtgcgctctccgacaggcccgggttttggagcttatccttctgtccgggggtgaactcgggccggacacggttcccttcctcttctcatcttcttccgagggtcgggcctatccaccctcgtatcgcacgacctgtcgaaccaaagctatcgtcgccgctcgcgccgagatctcggccaaagcgtcggtcgctcatggaccttggttgttaggcctcgaacagaaggaacggattcacgttctgagtgtgctcgtcaagctgatgagatctcttggactcagacggaaggaaggtctctatgcgagagagctgttggcgtgtctggcggatggggtcgtcagtgctagaagttctaatggcggaggtccatcatcagtcggcgggagcacacagaaagcaaaggacagagcaggctcaaatctctcgctaggtgagggcataggagtcagagatgtgatggatatggaaggaaacaaaggaatagtcatactgatggagagaactttggaagggtacggagtcggcttgggctcgagtgcattttgggaggggactgaaaagagcgaaaacgacaagttgcagagcgtagagagaaaattcgtcggtgggaaggagtatttagatgaagaggccaccgggaaagataggtttggctggtcagatctcgttttgagagttttgagagatgggattgcgctaggagaagtcttgcctggtaagtcgctgggtcctgtctctgtcctttcccttgaacaaactaattagagatcaaactccttatttctttcttctattagactaccactcagtcattcggatctccacaacgatgctcagggtgttttatccatcgatccctcctccagagcagaattatctgagccaggttctctcccgtagcctggcgaccgctcatcgtaggggcatactaaatcctgaaagtcaacttcggttttggccgggatggatcgtgttgagtctcgaagctgggtcgtgagtctctttttgttggtttaaagcgaggaaagctaaagcgcgagagcctctgatctaattggttataatgaactggatatgtatcttgaacttcatagactaccaacgagccatcaacctatagagcatgccatgcaggatcgagagatcgcctcttcatcttcagccaaagggcttttgagagatccgttcctcttcaacccgcgttcaaaatcatctggtcagggaggaactgtacgtgttgagccgatatggccatgtgttgatcgagaagaaaagtttaccacaaaggatgtgcactgttaactgatctgtcttctctcctttcttttagactcccctcgttcagaatgacaatgctgaattttttgtaacgctaagaaatcctttcgggttcgagctgcaaattcaaaacattcgactaaggtagcttctctctcgcattcttctgtgtctatatacaaaacttgactataccgtttgcttttaaaaccagtacgtttggtgttggatttacgtccaacccatgctccgcgacgatctatccgaattctatccagactttccgagtcactggatttgctcattcgcatggccaactcgtcgtccaaggatgcgttatccgtcttcaggatggctctgaggcagaattcatgcttcctctacacgacgcggcagaaatcaaacgacaacagaagagagaaagtatccggaaggacacggaacgtaccgtcaagctttccgggctgaacgctcgaccgacagaaaggaaaaggagagaaagcacctggttagccaacgcgcccgagaaggtcaaagctcggatgagtttgggggaggatgatgagttggcgaattatctgacgtgcgaggtcgttccagagcagccgttgttgagaatcagaggaaccagtctgacgcatggagctattatgctctacgccggagaagagtaagtggactgaccatcaacctgggtctgtctcggtcatcgtttgtattgtaggctaacgtgtcgagtcatgtttgactgtcagatctttcatacgaattactttggagaatacgtcgaacgttcctgtagattttgtgaagttatctttccaggattctactaccgggccagcgcaagcgaagatagcagagggcgaactctcgcctggagagcttcatgaaatcgaggctgatcttatcaagagacctgttttcaactgggatcgatctccagaaagcgtcaagatccctcccaggggaagatatactgttgatgttggttgtcttggaaaagttggctggtcagtcccttcaagttccatcctcgtgatctgtgaaagtaaaatccagatccttaacttgatgttctcgctcgcgcgctgttttatagcacctggggatcgatccagattgactatgctttgatcaaccgatctccggaaaaccctagtgcaatcttccacacccgacagatcactctttccatccttatgtcggtatacaacaccctggaaagcacctcgctcgatatcctgcgaatcccttcattcacctcttctcgagcccgtctgacatcctcaaatttgtctttgactgagagaacggttgatctacccctagatcgtcaggaggaatcctcgatcaaagacggatttgagatgaaagatccagaagatcaatgcttagtggcgattgatataagaaatgtatatggacagccattcgaagtgacgcttgaggcaacaaaggtctacgaaggtgagactgttcactcatttatggatattgtgatctgcttatgtgtattttactcattttatgtgggaaccaccgataggacgaaaacggaagtcatcgacgaggctagtcacacccgggtgtacggaaaggtaagccatcatcggctcgtctatcaatagggtttatgaaatagtctgcttacaaaactgtcgaaacgttcgtatgcgctgatcttatgcagggtcgtgatctccatccctcgtgtacttctaccatttgaacaaacggctatgcctattccgagcttgatgcagcgtcaatacgtggtttcctcttcaaatgcaacagggtcggaagatgatcttgtcaggaacttgttctggtatagggaggaactgttgagcttgatcaaagcttcttggtgcgaagtaagtcgactcttggtacaattttgtcccctcttgacatggagattctgcttctccgactaacattagatatcaattggatacaacagcctggaacatcaaagagagggacattatctcttcgatctcaacgattaacagagccaatgctacaagtcttaagagtagatgaagtctctgtctcattgagcgttgtgccaaacggtcgttcagagacgggtctggttcaatctacggtccagtccaacgagttctttgatatcgtagtcaatgttcgaaatcgccttggtaagcttctggggccttcccgcactcatttcccctcttcaaatcgtagggttgtagaaaaatcttgacctcgctgactttcatatctctcaatcttcctcccttattgttctttactaaaagcgcgctcaatttcaccattaatccatctttcctctctaaaccctatccttgcttcccaacccacttggtccatcatatctcccaacacacctacagcacacacgtccccgtccaatttaacatcgccttacatgatccattctaactcgttgatgcttgttcctcctggtagagcgatccctccaaattcgtcggtcgacacagtctttacggtgaatgtcttgacgagcggcgtagccgatttcagagcggcagttgaagaaattggaaatgaggcgtcatcttccttgacgaatgttttgaaaaacggaagtgggaaggctaccagaaggatccgtaaagaagagcaaggtctttcggagaaagaaaagaagaagagagcggagagtaggaagagggaagaagaagttgaacgaaaggaggtgtggttttcggatatcttgagagttgatgtctgttaagtagtagaatatttgtgcaaggtgtaatagttagatacccgcttgatgctttagatcctcctgttgtctcttgcttgtttgcccttagcggaaaacccccccgagtcgttaagtcataaatatgcggaaagtagaatataaaacataagacgaaaaagatttgagtgaatgtgattcattcatcccccatttcactggatttcggtagaaacatcgtttttgtatcagccaaataggtaaataaatgaaaggagggaagcaagctcgaagaacagatgaagggaaggacgaactctctacgttgatagatatagccacctgcctccaattcatcaatcacctcgtccggtagttttcccatcaccctagctgcgtataatcctctcacataatcctctgtatttttttaaggtagaaagacggttagaattcgaagtgttcttgaagacgtacagaagctttcaaagatatggacgtagaacatgaaacggcaactgaccggtccgttgccacttggctacccagctaccatccctcatgacagcgatgattccatcatattgagcagaggtgcattgagagactcgatcactcgatcctttcatctgtttgtttgatcatgttttcatgtagagattggtagaacaaaccgttcgttaaacccgatcgggattaatttgtatacgaagaagcgcgtcagttttctgtagtgtacatatgaacaacccctccctattctctcgtctctatctctgaatcaatctgtttcaaggaagaggcttccgtgatctatccccgagaacgtaatggcaactagggcactcctcaggagttcagcaaagggggaaggagggaaggagagtattcgcacctgtagaatctcatcacaattcggacatcccctttttttgaagtctcctggcgaaagcaagattgagcagtacaagcatgctctgcgtttggcttaacattcgttattcaatccatccagaaagaaagtagagaaaggatgggaatgtgtgaagttcagtgttcaggataagtttatcagaggttgatgtttgggagtgccctagatgccagaggatgagctaccctcttacctttttgagatggtaaaacagcgtttcttgtacttttactcatggttgctttcgaggcttgccaatgaatgtgagaattgggatggacaaccagatgatcgaatgaatgagtgaatgaatgaatggagaaagtagaatctatccgagagcgtctcaaaaggagacgcggtgtaacctgacgatcgttacacacgctctatcgtagtgtttgagtaactactttagagtgctgacatacagagacccaatttgggctacatatatatacacacaaacacgaagtttctccgtacgacgcgttctcttttttcaagagatttaaaaagacagacaaaaggagtaataataagagagaaagagagagaaggcgtggatacagggaaaatgtgttcacatcagtcttccttgtctctgaagccctcgtaacattctccaacaaagatagaaggcaatacaagccgaggctcctccgaatctattagttgaacataaaatgaataagagagttagagcgatggagagatatgacgtatctgtgaagattatatgcaaagatacaaagcttaccggaagatgaaaccaacggcatcaggcggagatgaaggattcggaaggtcctgcctagccaaccagtctatctccccatttagagagcgcaggtcggttacggtcgaattgagtttgacatcggggaagagattcgtgaagtttccggctggtatagtggagtttttagaaatcgccggtggaacagggagatgaacgacttgacggtcagggtcaagcagatagaaaatgatggaggacaagaacgtgatgatgaattgagggatctgtagaaaatcattaaagtagtcaatatcgaacgggtaatacaatgcgtttctaaagtgagattatacgaacgacgatcgccacgttatgaataccctaaaagccctcgaatgaaaaagaaaagtcacaaaccacggcaatgagaataattgatgaaggctgccgatcatgacccactcaaggaccctactcaccaaaatgactcccgccttctcggcagtacttccgccttgtggtcttctgttctcttggccttcttctgtatccccgtcgacctcaacattcacttccatgttgtcttctccatcaatgccatctggaaccctttcgttcgattcgaaacttgtcttccccatcaagccttcgcgctcaacctgttcgttcgtaggagaggaaggagagagagagagagagtcggtggaatgactatgatcatgattcaccgtcaaggtcgatcggcttcgcagtgggatggaaggaggcggggcgtcacatgaaagaataagctcccctaactgtcgaccgagacatgaaatgacgaggcgatttggaacattaattcctatccagataagcgcatgaaaatagatggaagggaagatgtctagattgaacgtacgatagagaatggtgcccctacagtatgaacaaagagacgtcagctactggttcttctcttcacgatgatatttcaaagattcgagagacgtatgtggcttacaaccagcaatggcccagcagaacccggtaagcccaatgatcatatttgctcctaaaagcggtatcaaagaattgatatcagtctcaaacctcttcagcacatatctgaatgaaagatcaaacgaagactgttctgacagacttaccggttacgctatcagcgaaccaagttgcgaacatcgtcagcgcaaatacaccgtggctgaacagccaaactctgcctaacgtgagccacttgatttgcaagctcttcaccgaccatccttcttttccttctgaccactcgccgcgtctgatatctcctgattctgtttgctggtctagagagtatgaaggagacgatagagttgatggagcaacaagaaatggaataaaaacggcagttgcaaaggaaacaagggcattgtagaaaagcgccttggagccggcccgggtggcagacgcgagaagcgttggatcagtgtgggatagatttgggtgttggagaagctcttgatgtatgtataaatccgaaacccagacggatgtaaaaaacagaataggaaacctaaagattgagtgatgcatgtttaaacctcaagtaagctctttagtttccatctaagagatcacttgttatacttaccaaccgatcctagttaccgattataacgcgttgatggtcgtttaagccaatctttctcaacggttagcgtatatcttttgcgctaggttaagaatgatatacgtgacgaaccaagcgaaaaactgaacgatgcaaatgttacggatatctttaggtaacgtcaatgcgttcacccagatggatttgagcgtacctccgagagtactttttggtcgcctgcacatacgtcgtatgatcaaaacatgatcttagataacatatgatttaacctcaaaggggaaagaggtgaatggacgaacgagtcttcaataagaactctctctttcactccccaaaccatgaggccatgagtgccgacaagactcaacacagttatcactgtaagggccttcagctgagtgctcgccaagaacgggaagatttttagcagatcgacgtttccactgtataaacagtttttggatatattcagaaatgaacaaaaagaaatctcaagtccagtcaggaagggtacgacaatactgtgatatcctaggagagaaacaaacatccagaaaccggccaccgagccaaacccagacaaacggcctgcccatgcgttccctgcctcttgctgagatggcggaagcgtatccactagtattattataggatgaaaagatcagaggatggtatcgatagataggcgttgtggtaagattgagaatgacatgcctaggagcgcccgatcagcggccatgacttgaagaagttgtgtcgaggtaagttgatggataaataaatcacacatagagttgtcaaatctcgatatgttgagagaaggcacgatagagatagaaaggaaagtgaaagatcgactcactagcattaactgagaaatccacaagaaacacagctaagattgcaagcccgatacttattaccttcatctaggtagcattcaccatcagaatgtagaaatgttagggcattcattccacaagacacgtcatctctgctcacaagaacaccaacctgagttgcgctcccaaaagacaagattgaaccaagatcttttgcccagctcaaaaggtacattgctatgatagtgagacagcaaccgacgatgatgaatggtcttctacggcctagccttgctttcgagcggctgtttttgcaaaagttggtttaaacggagatgctgagtcagagatggcgctgttgttataaaagaataacgtaacacatgcacaccgaacaaagacttactctgctagactccctgttctcaagaacatgattccaaaccaagtcagttttccttgtttctctgaagctaatagatagatatccttaacgacaaaccgatcagaggttgcatgatcaagcctgacaatggccctgccacaaagaccaaactcatcaagctcttcgacagcccaagttcgatcagaaatggcgaagcttgactcatttcaatcgtccagactgattgaacgcctaacatccctagtgtgagcagtgggtactgatggtattagccgaaacagatgagcaagtcgggttagttgatttgaatgatatatcgcgaacggagtcacatgtctgagcattcactttcatccatgaaggccctataattctgttttgtcatacacgacgctcaacactagtatcagtaactctgttgacatgagaacagacctaaagaggtgtacacaactaaatcggagcacaccgatagcaaacgagaacgacacgcacgaaggtttcccaacccatcgaagctgaggatcatcttcttcagagttcggaatcagaaggcctcctcctgctgtcatgtgtgagtctggatgtgtacgtgcgtgtgtatggtgatgcgagtggtgtacaagtcaggatgagacccgagctaatggtgctgatgaagatggggtgttagcggttggaaggctagcggggaatagaagataaccctagcacaatctggggcaagtcacgtgatcggccgctacaaccgagttatcaccatatttttttgtttcaacttcttttgctgctcccactttgaaagcttgctctgtttgcttgaatctctcgctcaaccatctagtttctattcaagatggcaccccatcagccatcagaggcatcttatctgccttctcttcaatccagtctgttcaagactacctcgtatgcacaagaattgcccgccaaagcgtccgaccttgcctttcaccgatcagttgatccaaaactagctgccaagcttgatgccactagcggtcaggtttggaacctgattgatagcttgctcggactcatagccgaggacgagagtgggagcaaagttggaaagagaaagagaagggaggaggatgatctgattgatgatttcgaggatactgttgtaaaagaaggtgtcgatggcttactagagaaggcggttcgtcttcggtctctatttttgtttatcctcaggtttgaactctctccaactaatctagaatttctgtcatatgtctgtctcaggacacttgtatggacaacttcttgggaaggatacccgcgcccgcgattcctatcattcctactgagactgctcgatccaaagtaggttaaactatcatgctctgtgtgtccatggctaccgtcggtcgctgatacccatgctttcctatgcagaactcgacgctcaatccgatcgtctcgtccaaccgtaaaggccgtttgcctagctcgattttgaatgccaacattcccaagcctcaaataggtttcatgtcttctgtcgccaactctaattcgctacctacctataagatctactctgcgctttctacccccgaatttgcctatcactatggccgattccctctcgctcacacctatacccctgcagagctctccacacttcctttcccagacgtcccccctcatccctacaccccttcccttcttcatccttcattccctgcttcgcttctcgctgcagagaagcaagagtccgaacctgaacagccggcttcgttcgaaggtacatcattcgaatatgtcgagaccgccgatagactaaacgggttggtggatctattggagaaggaagcaaaggaggttgctgttgatttggaataccactctttgagaacatggggtggattcctgtgcctgatgcagttgactgcgagggatcgaaagggacagatcatgggagactatgtagtcgaccttttggttccagaggtcagagaggccgttaagaaggagatgggtagagtactcgccaactctgagattgttaaagtaggtcggctttcatgtatcgttgtcttccttcaaacccgtcgtttactcattacttcggttgtatgacgcgacattcaagatcttccatggagccgaatcggatattgtctggctgcaacaaaattttgacttgttcgttgtcaaccttttcgacacgtaccacgctacttgtgttcttggtccgtctttccttccttgtgtggctcggtttctctgtcatggttgtctgatgtaaaatcatctgttttatttaaaagagttcccgcaacattctcttttgtctctcttggagaagtattgtgactacacacctgataaacggtatcagcttgccgactggagaatccggcctcttcctcaagagatgctcgaatatgctcggtcagatacacactatctaatttacatctatgatcgtctccttggggctctcttggataatcctattccccctccaccaaatccatcgacctcatcctctttccacacaatcaccggtccattgtttactctggaacagacttttgaatttccgaaatcaacccctccgtccatcgctcaagttctcactcggtccacccaaacggctctcaagcgatacgcccacgacgtctactcgtccgaaggaaccggctctcaaggttatcggtcgcttgctaagaagtacaacaagcttcatttgttgcctcctctaccggtatacgcttcgaccgagaccgttcttgaaagcgttgtcttccgaaagatccatgcttggcgagacgccgtgtctcgagaggaagacgaatctaccaaatatgtgttaggaaatcatttgatattcttgttggccgagagaagaccagggaactccaaggcgttattcgggctcggtcagaattggagtgaagtggtaaggaggaaggtagaggacatcgtgcgtatcatcaaagaaggagaagaagagggggagaagttggctgaagagttgaagaaacaagccggaacacgggtcggacaggttgtcgaaggagaaacgggggaggatagagaaaggttgctaagagaggagaaggacaaggaaggaaggaagacaggtgttgtgcttggaatctgggaaacacaatcctcaggtgagtgctcttttgctctctcttaagagctgtacataaagtgttttctaaatcggggtttctgctcttcttttagtgcctaaatcatcaccgacaaccacttcccaatcttcctccctcttcggctcctctctcaagtcttcgtcccgaccgacacagtctacctcatctgtcaacgcgatcagctccatgttcggacaaagtctgcaatcgcaaaagtcaagtaaattagtagctggctccgctccgtctaactcgtcaaacgccgggtttttagaggctctccgtaggatccattcgtctatcaacgtaaattctatccatttttcccttttctcaagcgaatccataatctgactagtttttatgaattcgtgacattcttttcttagcctcctccaccgccacctcctcgagctgtcacccctgaagacaactcgctaccaggtgtagaacaggtccccttcgttcctgcttccgaaaggctaaccaccgaagtcaactctaaggatgattctggatcggcctcagctaaggttgtcgacgacgacattgtgactgttggaaagcctaaggcgaagcgacgaaagactgagcaaaagacggcagtcgcgttggccaaagaggacgttaaaggcaaaggaagagaaggcggagatgcgatggatgtcgatgaggacgaagacgaagagttggaagagaagaagaaagtggaggctttcgattactcaagtgtaccgaacggactggacgttgtcaagggcaaagggggggcctttggaggaaagaagatcaagaagccgaagaaggagaagaagcgttcgtcctttacttctttcgtctttctttccattatgttttctttataaaagatcaacatctaacttctgtctatttttccgcgggtatgcgtgtattctaatcataatttagctatcgtcgag

SEQ ID NO: 2051 - DNA, 16129 bp, Xanthophyllomyces dendrorhous
taatttagctatcgtcgagtacggggatttcaagaaaccacctcagagtatggccgagaacaagaaagggaaccgatccaaaacattctcataaaacccctctttcgttctttcgtttcttccgtctcctctgtctcttctgtctcttcttttattctctttcttctcgttttgatatatctttgatcctccagtgtccatttactctaccaaaaacgacacccgcgtatattgtcttagcatcacatggtaaactcattcagacttatagatatcatgagctcatcagatgatccaaccacattcacatacaagcgccaatataagacatcatcgcaaaagagttgagcttgacctatatagtgtttacccattgcttcttatcttgatttgtctcaaaccccgcgatcaaagctctgaaaatataaacgatcgaagcggcacgttccgattattacagttcatgaagccgtcataggagggattgtactgggatagaagatatgtttggtacggaaaaaaggctggctataagcaaatagacgggatttttctttttagggggtgagataggggagacaaatagtcaacgaaacaaggggtcgtgcagtgaaagaagtgtgagcccaaaggtgaacaaggcgaaacgaaatagaagaatggagcagagaaaacagaaagacaatatagtggaggtagaaagttggaaaggccgaggatgtagaataggatgaaagaaacgaagaaaagaagtgagctgataagtcagaagttctaagatttagagatccatgctcattcccattcctccaccctccggagcgacaagcgcactcttcttccccaccctgctcttctttgctgccaactttcgggccgaatcctcctcggttcggatcctgaccttctccctgattcgctctccacgagcagcatcggcggacgaagaaatagcagcagacacaggttggacgagggacaagtttcgagagacctccctggtgtcggaagctcgggcgagggaagggttgatggacattctgtaagatcagtcaaaaaagagaacgcgtgaaccgaatcaagagaacaacgacgaatcagcatcttgacagctacaattacgttcttgatgagaaccgattgatatagaaagaataccacgaaccggttcttccagaaagctcgctctcgtcgagccttgatctcgccgactcgcttcatagccttcaaggtagtggccaccaattctcgatcgtatcggaccggaacgtttcgcctcttctggaactcgaatgtcgaatcctacgaaaccaattcaagagcgttagccgacaggaatgataccgacacatcagagaagatagcgaaacgtacgacgatcatctcctttccggcagcctttcggaaagacttggtccatcggacctttcgcgggtttcgcttcatcctgaagagcgcaaataagagagggacggtggaacaacacacgatcagttggtgaagtgatagattcgaaacaaggattgaaacgcgactaacttgaagtttttgtggcatctgattgagcagagttaaagatgacatggaagattatggtcagcatccatcctacaagtgtttgttattctaatccggcataaacgccaccgtttgtccacactatctcttatgaatccaacgaatgatgactagaatccgatactttactatcctccaccacatcaagaattgtacttacttggacgtgcagaacaagaaggtcttggcatcgtttctgacgaaggcaacaccgtgaccgggataaacaggcacggagcagaaggaacacggagaaactcgcatggctaggacgaaggaggaaggaaggagaagaagaagggaagggcaagcgaacggactggtgggggcaaagagaggggggagctgagtgggaggaggaaaggaggaaaaacaatttgacaactgagcccttcaaggcggtacacaatacagcacgtgatatagcctggtctgatgaacacgtgactctcttacaaatgcttaggtaatgctcatccctcacctccttacttccacctctcatctctttgtatcctccaacactctcgtcatcctctctcttacatctatcacttctcctttctatttgagcatcggaagaacgctaaaagaggaaaatggcaacaacatcagaacaggtcggtagtgtctccttttaccgtctgaatttgaccctgaggcgatatctcgactctgaacacgtcagctcaccctcatgaacacatccatgtcagataaatgctcttgctggaacttcagtgtatgtccatctgctttcgttcagattctgttccatgccctttgtgactcactctttctccctcgaaaccttctttgtcttctgtttgatcacatcaaccgcatacacactttcccctcaaccatgcgccatcccaaactaaaagcgtggttcacccactggtgcttctctctgttgtagaccatgcccatcgatctcctacatcagccaagaagcgtgtgctcggtgtgcttctcggacagaacgatggcaaaaccgtaaacgtagcaaactcgtttgctgtaccatttgaggaggatgagaaagatcccaagacgtggttcctggacctagattatgtagagtcaatgtgggagatgttcagaaaagtcaatggtatgtttttcgctcttaacaatctattaagacactgaatttcttttaaagtcaagaatacgtttgacttgtgattatgttctgttatgcttccatgttccccgcgtgagtagctaaggagaagccgatcggattctaccacactggcccaacattaagatcctctgatctcgagatctcagagcttttcaagcgcttcgttcctaagcctgtaagtgttgctaacttgacgtgatggacgcgctttgaagacggcttcagaacggttaggatggaagagatttcagttgaaatagtcagaaccgtatgcgattcgacgtatgcgtaaccaatgcagttggatctcggaatgatgtttgggaaatagtgacttatcaagttgttctcttaatttaatctctcttcaaaacaggtgatggttatcgttgatgtcagaccgacgggaggacgaggagatactggaatccctacagatgcttacttcgctgtggaagagatcaaggatgtaagtagtgttctgttagattattcgaaattaccttctctgtcagacgaggtacaacgcttgtaggatcgggaccctaattctgacactctccaatctataggatggaacgacaacccagaaaacattcatgcatgttccttcacttatctctgctgaagaagccgaagaaattggagtcgagcaccttcttcgagacatctccgcccccctctccacttctggctcgctctcttctcgagtttccgctcagctttccgcgctcaaaggtctccactcgaggctaatcgacatcagggactacctcgccaaggtactcgctggggagatggccgtcaatcatcaaatcatctacaacttacaggacgtattcaacttactacctccgggtatgatgtctggtttggatggagtgagcagtgaagacgatgttgagggtggaaagggaagacttgaggtcgagaagagcttcagggtggcgacgaacgatcagatgttggtcgtttacctgagcagtttgatcagagcagtcatcgcgcttcacaacctgtgcgtctcatcttctttattgatcatgatttcctcgatttctacgtggcaagtatccttgagattattcgtagtgattttactaatcgaagttcatttgtatctttctctctatcatttctacggtaacaataaacagggtggataacaagcttgtcaattcgtaagtatctgctcctcaccttatgtctctcaggacgatcaatgtctgacctcgttttcgaccatcttctcataaccagtcgagctgagagtgatccgacagaggatacccccgttccggctacaccaagcgcggtgcctgcttcagaggatgccaagaagccggaggaacctaagaaataatgtctattttcaattgtcgaatgaacactttataggctagatggtgatgaggagttgaccaagatgggatgaatgcacagatttttttaaaaggcctgatgttaactcaattattctgtttgtaggagaacgaaaaggagccagagaagagaagtatggcattatgaccacatcatgtacaagatgagagaaaaagccatctatatgtttagcgcacgcggctgagaaggcatcgatcttgatgaccagagatatctttcatattcacatcgagtgaggagacgggtaaatgagcaaaaagtttacttgactttgtccaacggtctggattaatggtgtagagaacaagagggaggggaaggatcagttacaacacgcgaagatcacgaacatgggcacaggtgagactcaccgattgaaacctcctttcctgaagagattccgaagtaattgccatcgaaaattgtaggacagaggattgtgaagaacatagcaagggagagaaaaatggattgtaaggattatcagacaaacttggtcggcacgcacgactaaatttgctcaaagatgccagcttgtgctcttccccctttcgacaggacaaaagctcaaggcgagtaataatactgataaagaagacgaaccggttcatgtattgacgccatgttcgctgtttctttataacgacgtctcctgtatcatttgacgagacgtgcttgccctacaaacaaatagatttcggtcaggtcggttgagctgcgaagggaaagagattaggaaaagacccaccttggacgtgccaaagcctccgaagcccatcatcttggccatttcatcctcctcgccttcttccaagccgttctcgtcctcgccctcctcaacccattccccgtcgacaccttcctccattccatccggtggctgcatctgctgccttttctcctcagcctcccgctttagctcttcagctttcaggactacgtttaggcagaaagaaagggttgtgggttcaataacatcgcaccaaatatgttgaaatcaaagtaaaagaatagtcctaccggatggcggaggcttgctatctcctttgagccgagcagcactcatggttgtaggctcagatctaccaggggacgaacgacgatctcgacgtggagaaggcgaccgtcttctggtcgagtagctggaaggcggcccggatcgatctgatgattagaggacattgtgtccatcgcgggccagtcatgaagagacgtgatgattgttcagtgcaagcttccagatgaaaaatgaaggataggaaagaggaaggaggaatgaaagagagggaagaccaactattcacctgatcggggtcgttcataaggcttccgatctctttctctctctctatctctgtaccctcctgcatctctgtctacatatctacctcccccgctagctactccccttctatcatctctatctcggtcgtggtacgatggcctgctagatcctccttcgtcgcgtcgaggaggacttcggctggcgcgagaataatctctgccagtactgcggtgatcccgagggtctcgctcctccgggtttgatgcataagatggacggtctcggtcttgatacctagacgaagacggagctgagtttctgtaggacatctgggtgggtgcaatgatctaatgatgatatggctgtttgtgcggatggatgttagaggaaactgcgcagagtcggtgaaggtttcgtcaccttccagtttctagaacgattccaacatcctgctctatccgttgttcactcaccgagacgctggacttgaataccatgtatgttgttcttctgtatttcttgaaaaaggacaagtgaggctgacgtagctttccattttcgcatgttttgtgtgattgtccaggtcctaccctctcccggtccaccagtcaggctcactatctccgaaacgtcggcggtccccttcgagtcagcaacctccaaaggtctctccgaccagccggtacaccattcgacttccacaatctctctcctctcaatcaattcgacgcaagactaagcagcagccattgatatacatcattccttttggtgtcgtttttctcattgttagctgctacttcatatttcggccattaggtggggcattcacatcttctcaagggactcgttttccggacagcatcacctctcgcgttgattatcctcaattgttcacttcggatcacgccttgaatacagatccgacgcctcaatctgagactttatccattcatctcagaaggctggatagtctgttgtctgacgtatatcaaactgaggacactctccgggataggaaatatgagcaaccagtgttccctccaactctgagcgctgctcagatggataggtacaaacctctacgaaacgcatcgtccaagtacctatttacgtccattctcttcaacgttggtcacatccttcccgatatgatccaatctctccttgttgctgttgacttcctcggcccagagaatttcggtatatcgatcgtggaagggccttcgtcggatgcgacagacatcatgctagaaagagtgctcgcgccgctcttgatagaaatgggagtcgatccgcttgacattcatttgaacaccagacgtcctagcgccaagttcggagagtccaataggatcgagaaactggccgcgttgagagaagagccgctgcttcctcttcgacaggccagaaaagggacggatgaatacgaggcggtcgtcttcttcaacgacgtttatttctcaggggccatgttgctagaacttatcctccaacacaaaaaccaagagagcgacgtgacatgtgcgtgggacctcttatggaacgatggttacttctatgacgtctgggttgctagagacatatatactggagatgtatgttttctttcacttttttttttttgtaatttacctgaagagacgaatctaacccacatttgttgccatatctaaacggtatttttgccatgctcagctctttcaacccatggggtctacctggtcgacatcatttgacttgtttccaacttctcccaagactctgaagcgttatcaggctcggctccccttccaagcttactcttgctggaacgggattgctgttctttctagctctgctctcttgcctcctcggccaatccacttccgtcggtcttccatcaaggatggtgaatgcgctcaagcagaggtatcgctcatgatgaaagacatatgggctcttcgagcccaggagggacagggtgcaaaagtgttggtcgtcccaggggtgagacttgcatacgagagaccagtagcggagatagtgagaggcttggatgaggctaccgtcggaggagttattgtagggcaagagaaaaaagtcgggctagcagggggtgggttaaaggaaaaggtggattggacaaaacggtctgtacttgaaaaaagaaaaactatcttgttgatcattggtcgtaggacatggacttcacactcattgtacttcgccgttcttggctatttttatcttccagtccaccgaaggcggtaagatgtcatccttggcctgaagtcaatggcacaggaagcgatatcaacgtctggaaggagacgagatggattgacccgctaacgggctaatcatgggttatatatgttttgtatttcggtctgaatctctataagggtacacataacagatggctgacttgatgcaagaccctcagagaaggccctccgtgttatgatgaacgctgctgaatatagtgttttaggcctaccacgagacaccatgcttactcagggcagatacctcaggaacagctcttcttctctgccttcacaacaaacgaacgaacgagaagttgatatcataaacgattacgacctacacgttcttcctcttcaccaatcatcatcctcatttgttttgtgtaatctgtacagcgatacctctccaagacctgctctcccctctaccctcatatcatccctctcgctcatatatcatgaccaaatcacatatccgttcgttctctctcggtgcaacaaagaccgcgcacctaccgataagtccaccatccgaggacgttccacctcgaaacgtactatctacatccctcaaagcttcgtcaaatggctatcctggtcggcctggacaaagcgttttatcagctggaggaaaaccagctgaatctcggttcagaaagtactctgcttcaaaggggccttcctctggaaacaagaaggtaagcgtacgacaaagatactttactaatcttgtttctccgtgctcacgaacaactgtttgctatggtttgtttatccgacgatagtctgcaatgcatggttctatgactgtcgacgacccagattcctctttcgattctggcccatcggcatggtggatcgatgactttacattgtattctgtttacgttcgttcctctccctctatagctgttcgttcgtcaatggttttagttctgattcgcttccttgccgccatattaggagtacactttaccttccagatcaatatccccaaagctgatagaatcgcagcctgctccgactctaatgatttcttcagatctaccctatatcgctccaccaccatgccctgctctcatcgatactcatctgaagatcgttcgtcctcggtcgattttgaaagacaccagctctcgacgaccaccctcgcttgaccgttcggctagaaaaacaggctcctccgccatacacaggagagtcaggaagaatgcgccccattcactccccgccctttcgtcctcttcatcatcctcatcgtctgctggtcagattgctttaggtttgagtctaccgaccggtcggtctcatgtctcgcttccacccatcccgtctagcccatcgattccatcgtttccaaccaatcttaagtctggctccccgcttcggaaagctaggggcatacgacccggggatttcagccagagctcataccaggtcttaaacagcatgtttgttcatcctctggttttatcgtcttcgtcgtcatcatcatcttcgtcgtcgtcgttgtcgtcagcatcgtcttcgcagaaacgaaacgatcttggagaaggttcttcaccagagacaacgcctctggtggacgatcattacttttcagcagaagcggatatcaactgggagagtctgatcaggtcttgagatatgtctgagagtatgtgtcgagggctttgtgtgaatagtttcatacaagcaagttctcaatgattgtcaagatcattaaacccaagcataaatgtcgcgcgcgacgagatgttttgggtgagctcatttggacgcgtccctccacttgcgcgcgtgtgatttaagggtgttccacgcgcgacattgtgatattgatgttcgtttaacactgtatgctctttggaagaaagctatctggaaacgtcgtgcgagccatggagagtcagtctaagtgaacacttgctcactctcaccttgaatcagtctggctgcttgcccttagatataaagtaggctcttcaaatgaagcattatcatcccgcgctgactatcacgacttgttgatcgacgcatctcttgaggaccctaacagttaaagcatctgtgaccatgaacccggccccggcatactttttgatgaaagctgagccagacagccggatagtgaagggaaaagatgtcaaggtgagctgaacatcgattgaaaccgatgtaggaaacatacatgagattaaagatgacttgttcttgtctcttccttatgggatgacattgtagttctcaatcgatgacttcgaagctgctgggtaagggaatcgaaagccaccatgttcaatcttacagtacaagtagattatgtctgacacaagagagtattctgggttgtttctctttgtttcctacgaagaacaaccgaatgggatggagtacgaagtatgctctatcctatctcttccttccaacccattgttcttcaaataagcaaagatctcatcaggtttattcttctgattctctatcacgttcacgatacccggctatgacttcaagaccacgaagcgaagaatttgatgaagaacctgatgaaagtagggcatcaagtcttgttttatcactcaaacaccaaacaaccaggagtctttggaattgcgaaagttcgttcgcctgattttcttccagtttgcggtggatcgttccaacgaagtgttacgaactcacctctaagcgtattttctgctttctccttctttcgaaagattattgaggaaggtcatccagatgaatccgctttcgacgtcaaccatccatattatgatcccgtcagctgtttctctcttttaaagaaggcctccttgtccaggtaggatccacgactgaacctatctacttggtgtgcgcttggacgcgcggcctatgttctctttctcttccttcgacagaaatcaaagagagaagtcccaacgtggtataccccgacgctagaattcgtgtccagactgtcccatcctatccttctctcagatttcaagcggctcgctactctcgatcctggtgatcaggccaaactcaaggaggagggatttggggtgctgacgtccgaagaaattagatgtgagatagtgtccaaactcccttggtttcttctcctacacagctcactggctttgtgcattttttcgattttattttctgtcattatctttggttgatgttatcccaaaagcgattcaagagatgccacttttgaatagaggtagactctccgtccagacagtgtccgacctcgcgtttcattcgattatcaaactcggagagaaaggcgtcgtcaatcatcctatcccatcagttggcgacgttgccggcgggaatgcatcgtccagattaaaagtaaaatctgggatcgattcagtaccaggatctagatctgaaactagtctgagtaggaagagacgtaaaatcgaaccgacgcgcaagaacgataagaatgcaatcgaagagggacttgtcaagcctgtaaaggtcttgaaagaagatgtcatttccacgaccgcggatgagggattgaggagatcaaaaaggaataaagtctgactctgattgtgatgtcatgctacaagatggctcgtcaccgaagactcaatccagacatgttgacatcccatcctcgagggcaagaacacagacatacataatcataaatatatattctagagcgatttgaacatcgttagattttgttccgttcatttttggtagtcaaggctgtttttacatagcacagaaaaatacatgagtgaaagagaatgtgtagatagaagcaaagcgtcgatgctgtgaagagtccatgctcctagattgagtcgcgagagataaaaaaaagctgaagcaaacgagggcagatcctgagagatcaatgtgtgaaaaggcaagcaagcaaggagaaaaaatacaagagactagatgagaatgatcgttccggccgtgaggacaatgatgaggagcccagcgatacaggtctttgatcggatcaaagaagaggcacccgatgtagaggaagagctgctaccggaactgctagaactggtagagctgttggtggtggatgcagatcctgtggaaacagtcgatccactagaagtaaataaggaagacgagttaatattagcttagaattgaggaagcaaggacattgagcatacaggaagcactcactctgcaagggatgcaaatccaacttgacttccggtagttgttccagagtacgaataaacagaatagacgttctatcaaaagagcaagaagatgaggcttatcagtgagctgctggtgagtcggagtgaagtatgatggtgagaaacgtaacacaccttcaagaaggtgtcaccaatgatccaatctacagtactgtccaaatcgctctaaagaaggaggaagaacataagagtggagaagatatgaaattgtagaatatgaagtcggatgatagacgagacgtactccataaataccacccagacatgaggttccttgagagtccaatgctccgatgttaaagtcgtccgggtcgatagtgtacgtgacgtctccgaaagtgagagagatctaatttgatcgggataaattggtatcaggtagaagtcagcaaatcataagatttccatcaacgcatactcatagaaggaaaccagaagaaagacagaatatagtgggcctcacattaacagagctactgcaggggtactcatagtatccctcataaccagattccgtcatggccgaggagccgctaatagccgcgtacacagcggcggctacagtcgtcgtaacagatatcatcgtagttccactacgttgtagagaccgtttcaatgtttggtaagttcgactgacattaaacgaaacaggatgtcgaggacgtacgtatcgatagcagcctggggagtactacttgagcttgatgatttagacgagctggaagaagtcgatgaaatggagatatcgatagatgttccttcgacactcaacccggaaaccgggatttcccaatctaatattcaggggagaaatcttgtcagccgcattgtttatttatttattcaagatgtacccatagaacgcttcagaaggagtagagttgtaaattgatgacgaacaggtctgagcgctgcaggtaatgtaattgacatcaccagagtagtgggatgcgtttaatgcgccgctgaatggttgtaacgtgcctatgttagtcaactctttccaaaggcagaagaagatgtccatacgaacaggtcaatgtatcctccttgggtctcaaaatctgtagcggtggcaatgttcctgtacctagcaagctcgaacgcaaagaccttgctagtccatgtcgatgattccgcttgccaccatggaacggagtttgagctcgaaagcgcctcaaagcccattcccatgattcccgacagaggagaggagagcaatccggacgagatctcggtgacgaccgctgcgagaaataggaccccagatcacagaccgagaagaatattagacaaaaaagaaggttcatctagagatcacgacaagtttcacgaagggtacatacctaacgtctgagaggtctcggatatgcctgccagactgacggtgtctgagacaaggtatccagatgcatcgccagaaccatacgtaatctcgaatgctgtgctctcgctttgagagacagaagggaatattcagacagtcgaagacattagccacagctgattgtttgactgctaccggaaaggatacttacttcgtgtaggtggaggacgacgtaggatcccaggtggtcaagcctgagcaactactgtcgcaggagctgcccacgatgaacaaatctgccgaaccggtgtccaacaggagatagaactcctgggcgggtgttccgattgatacagaggcagaataggcagcatcgatatagtagtcttggagtcttttgtatgaatgtatcacggaagcaagggtggacaccggcacatcagctctagctataaaaaaaacttggaggaaaagagagagggagaacttacgtggccatgccatcccgtttagtagcactgttgggagccaaccgagtggcgtactttgattctgtctttgccttttctctaagggcccagcctctgactgtgccgtcaggacctactcgctttgcgtggggtgtgtgagtgaggggaatccgacgagcatcgaggatagaattcgaactcggaggaacagcggcggacagagcgagaagcggtacggctaacgagccgatcatcagggtggacaacatgttcatgattttgtcgagaacggtgattgtggagaagggatttgatgaaggaaagaagagaaaatccgacacgaaggcatcactttgggtctcgattatttataagaacgacgtttactaaacaagagttgatgatgccgctgccgctgccgttgctgagccgtagcgagccgatgacgccgcaggggtgggtaccaattcccgccagtgttaatccccggggaacccagagctggccaggtttcatcgagggcaatcgagatcacaggtcgtcttgatccagaggactgctgctgtgtgttctgtttgtaatgacatcgacggtggcagtggctttagtcgctggtgtcggtgtgagttcgggcgtttatcgggaaaccgtctgtcgcccttctccgacaaaattaactcttcaccttctttccccttataccctctttttataaagtaagaatgtctgaggagcagctaccagagtccaagttgggcacaaaacagcagtcagtcttccgtttgtgtttatgttcctcaacactgtgtgtttcatcttgcttacatctatcgtttacggctcaaagttgggatgatgtctaccagtcagtcgtcgataccttacgtcccgcctgctttcagccgacccgttctcaccagcttactcttgccattccagacgggagatttctacgttcgatgacatcggagaagaaggcgaggtctggtttggaacccaatcggccaagaagatgctaacctggacgattcagaatctacctccttcgcttgaccctcctcctcgaatccttgacctcggtacaggcaacggttacaacctatttctgctctcttccaagagaggcaaatacccaggagctgttctcaaaggagtagactacagtcaaggaagcgtcgacctcgccaggctcatcagagacaaacgggcgagtggagaggtcgagagcagtgacgaggatgatagcgatgatgacgaacaggacaatgaatcaggttggaccgactctacagcagacatctctttcgacgcggctgacatccttagaggagatcccatcgacggtggaccttgggatctagtgtgagtctttctcttcgagtctgaagccgatggcccaacatggtaacacttcttccttacaaccttaatcttatagtacagacaagggttcgcatactccatccgttaactttctcatcctttacagaagctgatcgagctcttccgttcgtgagcaggcacatacgatgccatcgcgctctcttcagatcctattccaccgacgaaccttagcccggcagaactgtatcctattcaagtctcaaaacttgtcaaaccaggaggatactttctcatcacctgtacgagtcccttttccctcaccgtttctttgttcttgccttttgcggggtagccagcagctgaagaagaggacatgagttcagcctgtaactttacagaagaagagatcaaaaaacggttcactaaatcaacactcggtccgtctatctcttttctcgctcctcctcctcatcccgcctgttttttttttcttctgctgttccattcgctctctcgtctttttatgttctcatgccgacgttcaaacttcttcgcttcttgctgtacctcacaggtttctcttaccagtgcgtctttcgttctccttttttctctcctctttctcgttgaccgggtggaactgacctgaaacaactcaacctactatgatatacctcgtttccctattggtccctcatcgaaactggcttgatcagctcgagagtcaaccacccgacattcacgtttggaggctccaaagggtcgaccgtatgcactgtcgctttccaaaagacggcttcacacgccgaataagaacgaacgagatgaaggcggaacatgttcttcatgttttctccctgcttttttctcttccgatttggcttttggaatggtgatgaattaatagatagacacattcatttgagatagagaggagaaaagaagagaggagaaaaattgagtaagaaagaactcggaagacgtgaatgagacaagtaggtagaataatcaagagtcaagcggaacaaatgacacgttttgttttcctacaaacagtgtgaaaggagggcaaaaagtgaaacggacagaaggaaaa

SEQ ID NO: 2052 - DNA, 4699 bp, Xanthophyllomyces dendrorhous
gaaaagggaagattacgtgctagatccaaccgataagccatggaagagatgacagaaaagaaaaggtaaagaaagacgaaaacgagaacgagaacgaaaacgggaataagaggaagacgttatcgaaaaccggatgcagaagaagggggggggatagtagatcaagcggtacattcaatgaggacactggaggcggagaaacctattgaaacagcagagaaacaacacaggggtaggacaacagaggaaagttgaaacagaagtcgtatgcactgggcgcgccaggccggtcagacctagtcgagcgagattcggagctgctcaagaggtataggctctgttgttcgtcgagtcagaaagagaaggttccgtgtcagctcctggcgtttggtccagtcatagcgaaagaaaaccattaaagatgacacgtaccgaatccgtccaagttgatgcctcgcgaggcgagctcgggctccgtccactctgggacaagctggttgataagatctggtcgaccggaaagctcttccttcgtgaagctatagaacaaatgtccgagagccagaggaaaccaagagatggatcagatgtttggtcatgaaatcaagtcaacacggaaagagagaacgagagactgacttgaagagttccgggaagtcccgaccactagggagcttgcccccctcgattcggagctcgtcgaagaagggatgaaccatggcctcgtctatgaaattgaagcaaacaataataagggtttagtcgtctagaccgcttacccgattacatccttcatggaaagtcaaaagaggataccactcacaggcagacaatcggtgcccaggagtgtactctagtagtttggagatcaagtcgatcgcatccggggcggttcctgaaagaggtttcagacaagaacaaatgacaaccaagttagtcaccctcaaataaataagactgaaacgagaaaagaaaactctaaagacacgtactcggtcggaacactttggagaatggatggggcttgatctgagggaacttgtgctccatgtactgtttccaggaaacaaggacaaagagcccgtcagtcccgagtcaatgatgattcctggaccgagaagaagcgaacggcaagtaactcacgttaggattcatcgtcttgatctgttcccttgtcggtgttccgagaactttgatgatctcaacgagctgatcgattccactctctccggggaaaagaggctgtccgagcatgagctcagccatcacacaacccgtcgaccagatatctattatacgcgttcacggtcatcccagccaggtatgaatctgtcagctgtcgcaaccccatgtgcaccaacaagaccggtcgcctcgaaaaatagtgacgtaccgatgttggtcgaatagttggtcgctccaaagatcaactcgggagctcggtagtatctggaacagatgtacgacacatttggctctccggccaccaagatcttggccgatccaaaatcaattagcttgagcacgccggtggtcgggtggatgagcaagttctgaggcttgatatctcggtctgtgggaaacggtacgacggccagggtatgagcgtcttgacaggaaagcaaatccgtgagacagaatttgtaactcacggcagattccaaccgagtgaatgtatgcgagagaacggaagagctgatagatgtacagctgaatttacataacacgcaagcagtccaaagtcagcctcgatttcatcgtctctttgagttagcatgattgtgtagagaaaaatcccttctctaggcttcaacggccaagtcctctgtcgatcaagccatcatccaccctctccctcacacatcatatcctccctctaaatgactactgaagaaggggaaagagggcagaacgaaccttgatctggatcatgggcatcgtctgctttaacttggcgtagtgtctggaagcccggtagacggtctcaggaatgtactcgaggaccaaattaaggtaaacctcgtccttctaataaaatccaaagaattgagatatcatccggtttgaaaagagccgccggtagttgtggcaatagtgggaaggtgagtggtcggttgttaagatgaatgagaagcacatgtcgtcagatctccaaacatcagtggaaacttggagagaatcaaaaagaactgtagacaaaccttttctccgttagagtagaagaacgaccgaaggtcaacgacgttgggatgcgagaccaaacgcatgatctgtaactctcggttctaaagagttgttgtttccgttcgtgatttggaaaaagaaaaggagcgttcgatcaagaacgagatggcagtgaggatggatgtatcgtcagcttaacacgtatgtatgcaaacgggctgaggagcgaaaagagggaagaagaagaaagaaagatacagaccttgaatcgcttgtcctgcagtactttcttgatggcgatctcctcgagaacctcctctttcccgtcagcagactccttggctccttctgaagggaccgagaacaggtcgatgggaaaaggtggcgaacggtcagtggacgggtacgctcattgacattggaagatagtgtgtgtcttgttcataagaaaggaagtcagatgggagaagaagagtgaaggacgaatcgagatgaacggaattgttgcaacaaaaggccgtgtggacaggagatgggcgacgggaaaaggaaagggcgagatgggaggagaaaatgatttgcaaaagactccccatccgttttgcttgcgatgaggtatggaaactcggtatctgacatgtcggaggggaaaccggcccagtcctacttgcatctcttttctgtaatctgatgggactttgttgagggaagatcgtcccatctctgggttgccgaaaggtttcccgtcgttgggtcctagttgactctcccccttgttttccaagggttcccattcaacgagacgggcccgacttctcgtcgagctctctctctctctcaagattctcacgaccgatggagagatgactagaacaggagaaagaacatatgacgaaaagtgcacgcaccaggcttgactagctttgcggaaaagacgactccgaaggaaccgttaccgacaactttacagttggtgtacgcgatctctttctgatcgccagattttccgtcttgaccaacgaccttgacgatcttttgagggtcatcgatagctagagagggaggttgaggcatgtttaacgatgtatgtgttagtaggtgagaaagaaggaatagaacgagagatgaataaaggtcaattgaggaaagagtgtggttgttggttgtggttgcaagtgtgtggatgtgtgatggtggagtctgcgtatgaatcgcccgcttgggggcgggagaagagaggatcttagagaaagtgaggagagactacaaagttgtctaacacgaggactagagaaaaaaaaaagtagaatggcctagaccggggacccgagtttaagagaaactctgaatgatcattaagaggaaaaaaaaagccaccgtcgtcttcttgttgttttctctctaataagagaagcctttttgtttggttcaataacatgatcatgccagttacaatccttctcgctcttcttctttctccttgtactatatacctttgctttctttcttgccctggacttcttggtcttcgtgtcttgaagcggaagctcacacgatcacagccctgtctccatcacacatcttggttcatcacaacttctcactctccatcacacatctccgtccggatcttttctttttactttcttctctttctctctctcttttgatagattatgtgatacaagtacataagaagccaacaaccaatcaaacttaccagtgatcttgacaccgttgacgggaccatggtgagccattgctgattatgtctcttctttcttggtagagggtgatggtttgtttgggatgcttagtttggacggttcgttggatagagaatgacacacgcgttcacagtttcttttctttagggagacagacggtcgagggtgaatcttccaggcttgctgtgttgtgagcgaggatgagatagagggataggcaacaagaatagaggacaggcgaagagtgtatcgtgcaagaacgaaaaaataaagaatgtaccgttaggctcgtttgaggcctagagcttgagccaggtaaaccaaactgtgtgggacaccaatggttacgactcgagaatgtaacccggtttacacacgcgtcacatccacaagcacgccacaatatagaatcctcgtgatctccagacgcgcagcacatctcggagtgcagttcaagctgttggcgcgtctgcctcactcgattggatcatctcttgaccgagtcgtcctccttttcattctctcctctgctttgaatctcttcttcttctctgtttatttcattgtttctacatcttctcaatcagatacatcttccaagcatgtctgttagtcatccggttatatctatgtgaattgcattggcatcgctccatgtactcattctttggtcccttgttcaatctctcgatcagtcagccgaggttgtgagttctggagcccttttcgctcatacgtcctccatatggtcaagaaggggatttatttgcaagaaagaaagaaagaag

SEQ ID NO: 2053 - DNA, 17719 bp, Xanthophyllomyces dendrorhous
caagaaagaaagaaagaagacaacagtcaagagctcacatatcgatcttcttggacttcatccaaattactgtgtgcatatgcttgtgtgggaccaaaattgaacggcagaaatacgagtacgacgtcaagatgacctgtggaggttgttccggagctgtcactcgagcgcttacaaagatcattcctcgttcgtctttctttctgtttctcttcgttctttgtatgtcctcgtgatatcttggacttctctctaacatagtttctctctctgtagcctctcagttcgaggtcaacctggaatctcagaccgtcaaggtgtttgcaggcgagcaagagctccctccgttcgaaacggtgactgaaaagatcgcaaagactggcaaggaggttcgtttctagaaactgcccaacatatcttccaaaattactctttatcttctgctgactgagagagcatcatgttgtattctttctatctagattcgagccagcaaggctctctaaagtgtcttcctatgtctgcctgtttacctcatctgctcttatttgtctggtcattctctttgttccgttcattctattagatggctcagttatgaattggttgtcttctctcttgagaaccgtcactttgtcgttgttcttttttgttgtgtcaaatatctgtatcgagccaaaaagactattttgtcctcttctgaaacaaaaacacaagcaaactcaatatccatttcaatcgtcccatccacccactcccaatccggtactggattctgcaccatcgcccccatcctccccatctcttcgcgccgatccaactgtgccaaacacttgcttcaaatcaagatcctgcctcttctggacctttttctttgcctccttgacctgaatcaccttcaagaccgaagtctctgatttcacctttggcttcttcgcttttccagccgtctgactaggggctcccaatgctgaatctttctctgattggctttccggcgcctggacttctgttttggcgtccgtttcggaaacaagcgtaggcgcaggtgcaggctccgccagctgtccagaacgaccagtccgtttacgtttcttgttttccgaaggaatgccttcttcccgaacttccgttggctctccgtcagtcgagactttctgctttggtgccgagtggggttttcgttttctcttctttccttcctgtgcgccagtcgcttcggatccaggtttgctctcctccatggtggtcatggtgtcctgcatctcggcctcattgggagcggcgtcctctgcctgaggctcgacaggcgctcgttcacccgaggtgaaataagcatttgcgcccgtaggttggaatgctttgggctctcgtcgagctcgcgctttgggaacaggcagaattcctttgttctttcgttcgatcaagcgttgattatcaaggatctgaagtgatgggaggagttgagttatctatgattgcgcgtacccggtttatcgatgatggatgtagtgatgatttgacccgatataacagaagaggacatcagctactttgtttcaccggagatacagaacagatacatgaatgtatgcttgagaacagacctgatctttataatcctcagccgaggtcacgccacatcccttaagccctaaacttcgtaagccttcgagaccggccaagccgacttccaatgctgcccattcgtcgatcccacatcctcccaattcgatgacttccagtccatcacctcttctaccttgaccaaacttgccgcctgcccggtcagaagaaggtagtgtaccggtaccccatcgagcaaaatgcccgggtaactctcggagggtcgtattatgagagagtgaaaggacccgaagatatggtagagtcgacagatcaggcagtccagagctcgttagttctgcgttcgacgcggataactttgctagcatggggagacgtccgagggaggacggtaaggatcttaacgggttgtgtgagacgactgtttcgtgttttatttgtttcagacaaaggtcatcggtttagtaattggttaatggtagaattcaagctgaactggatatcacgtctgtacgtactcagggagtttaaaagtgaccattgagaaatgaccgagtcatccaattctgttaatttgttatgaatcgcgacgagcgccttgagcgagctaagcctggaaaattgttcagggattcttttcaggttgcatcccggtacattcaacactatcaagcaaacccagacaaattgatcagtcctgcacgcatcatactacgccctacccaaacccgggggaagagagtcacaaagaggacgcaccgactaatccagtaaggttctcgaacccgtcccatgcttcttcacccatctcaccaagcgcgtggcaccctcccagacccagccaggtcaactggcttccccattctttacctatccatccggcacctatcccttccagtccaccctcaacatccgtcaggtcgagcctcgtcagatgtgggtaagcctgtttggtcggtgctggattaggaaagggctgtcctttcagggagagagaggtctgatggtcagaggtcgagagcgcgagcgctttgggcttgtgggctgtaggtgcgtggttctgagcctgaggattcgcccggtcggcatgtctccgagagcgtgcaggatcaaacggccgagtagcttggggaccaacggtggaggtcgaagtcgaaggtttcgaatatgtccctcgaggcttgttctgatgaaatggaggaggcatatcaagtgagaggtcttattgaggtggttggttgatcgattggccggctggtcaaaagttaaaggtagagggaaaacttgcgtttcaaggaaacaaggatgacatgaaatattgagagataaaatatgacgataaaatatttacattacaaaaatacatgaaaagttataatagaatgctggacatttcctaatcgaccgaaatgcgccaagaatccggccagagttgcaaaggcctgactgatctgttgtcaactttccttcaactatcatctcgattcgtctttttcatttctccttggtcatcaatagttcaagatctctgcattatcaaccgataccatcatagaagaaaaatcaaaatggcactccttcctctctttcgacgccggccgaatgaagaccagtcaacagagcaccacagggtcaccttccgggaggttatgatatcctacggagccgattgggccctggcagtgcttctctgggtggtatttatctggatgaataaaatcgacggtcacaagagagaattctctcttgattcagacatcagcattcaacatacgtttgccgttcagtaagtctctacgtctctagatcgattgattggttccttgagagggctgactggtaggccatcgggggtaccctaaactgactttcttccacccattccttctacttacaaagcgaacgtgttcctgtatgtgtctctttcattctgtcagacttcattgctttatgagtcaaggctggatggttcgtcgtgactggcaaacatgcttgctaattctcttttctgttttcgctaaatccgcctgcagcccaacatgttgtttatcatctctcttggccttcctctgtgttcggtcctgttgatttcatcgctcatcatgaagaactcttggtacgtttctgacgtcttaattacgttcttcgaacctcaagaattcatcactcatgcgagcgcatcgtctcacagggatgtccataactcggttctttcggttgtgatgagctggactgtgtctggactgatcacccagatcatcaaggtcagtttcatcaaggcgcaaatggctatgagaagccatgacgaaatgatagagctaactccggtgtgtttggtgttatgaagattgctgtcggtcgacctcgaccggattttatcgatcgtaagcgcatagaccttatgcactcatccgttgtagagacaacgctttggatctgactaaatgcgcctcctaaatgtctcaatcttgtaggatgccaacctatccctggttcgtctccctcgcatctttataacaatcagcagtccctcattcctccgagtctcttacctatgtttgttctgcaatccgttttacgctcgactttcaggttcccatgatgcccatccatatggactctccaacgtgactatatgcacccaaaccaacgcgttcattcttgcggatggacacaagagcttcccttctggtcatagttcgttgtcgttcgctggactgggacttctttccttctatctggctggtaagcttcacctgttttctgtcagagggcaccagtccagggcatggctggcttttgctccacttttgggaggagcgatggttgccgtcagtcgaacgatggacaacaggcatcactggacagatgtaactgtacgtgctggctcgttgatcacgaatcaattttgacatacttctctaataaccacctgtcgggtttacgaacattcataggttggatccatcttgggtcttaccgtggcgtacgtcacctaccggggatactatcctcctctttctcatgcgcgctctcatcttccgtatgccccccgagaggttgaggaagatcatcctctgaacactatcagaacctcggctcatggatacgagcctgtcaatcgaaacggcgaggctgagcaagtcgtccgacgacccagcggagaatacggtgacgatgagtaggaaggagcattaaggacaggtcattctcgattgctgacaatcaattagatggagaaacctgtttgcgtctgagaattagaatgagtaatttgagtggcattctatcatgttatgattgttcgatctaccttgagcccgcctgtagtggcgaaaatgaaacatggagatgtggcacgcgtttgacacgtgcactcaccgctattgaactttttggtagacacccgtcattttcagaaattaccttcaactttgtttgtgataaacttgtgtgtagatacaaaacgaagctgcttgggtctcgacagacagctttataaatccatcatccgggccgcatctctactttaatcgtaaccaaacactaaaccaaatgtacggaagaggaaatcacaaaggaggccgaggtggtggcggcggcagcggcggtggccgaggaggcagaggaggaggcagaggaggaggcagaggaggcagtagttacaccgtcgctcggaatgctggacctcgaccagctttcaaagaggatcgaacgacattcctgcccaaagggcttctggatcagatcgatggtggacaaggtctgtctacttctctttctcttcctccgtactgcctgtttcctttctgggtttctccgttccgagctctgactcttgaaattggttcaaatctcgggaaactgtaattcgccggatgtgtgaaaaatagacgtcttgaacgctcaacgaggggatggtccgaaaggtcggaaagctgaacggaagtttgaacgagaccagaagaaatcaacacgaggtccatctcagagtcgttcatccggtagcactctcagcaccacgtctgcttctgcttctgcacctacgcctacgttcactcgattggaaccaacaccagcagctccagaagcagcagcagcagcaacagcatcctcgtcctcttcaaaaagaaagcgaagttctctcggttctgaagatccgtcatctgccgctccttcatccacgcgaaagaagctcccttcatcaactccactatctaagctcctctctggttcatcttcttcatccaaaaagacctcagggtcaaagaaaagaaagatttcgaccgcagagaagaatgaagatgatgaaatcgcttggctagagtaccatctgggtagaggtcggaaggggcctggagagaaagacaagaagaagaaaaagaagcttggagaggaagatggaggggagggggatgatggattggatgagctcttggatgatctggatcggttagaggaagaagagttaggcctggccagtagcgatgaagaagacatggaaggcacagaaaacgaggagatggatgaagaagacatggtatgttgctctgaattctttctgatgaagcgtttgatccggttggtaatgttgggtcgaaattcttatatattcaatctttattttcgattcctgaaatttgcaacagtcggacgatgaagctccagagctagtgagctatgcagaagatacgtctgaatggaaaggaattgcgcctgtccaagatgatgcttcgtccgaagttgacgaaactagttcgttcgatgaggatgaggatgaggatgaaatggatgagccgacctcgggatccaaacaagttcacttccgcctcccatcctcctctccaccacctgctcccgatactgctgctgtcagtaccattgcagcgcctggagggaaatatatccctcctgcgcttcgagcaagaatgttagccgagtcggctgcccagggggatagcgaagagaatgcgcagaggagggaagacaagctgaaacttaccaaagcaggtaaaggtctgttgaacaggttgggagagaataatatcgagggtattttaggcgaaatagaggggctatatagaaagcatcctcgaaatggttcgttggcccaccttgtttgtcttgggcgtctcttaacattgactaatacaaacgcccttctctattttttcgtgattaaaatgggcattcttatgcaaagacgtgacgtcaactctgacaacattgattctcgagacaatttcgtctcatgccaatctgctggggtcattcgtcgtactctatgcggctcttgtcgctggtctctacaaaatcatgggcgtcgattttggtttgtattctgccagctcatctgatttcagacctcttccttcttttgttcctctttctgactgaatctcctattttctgttttctcctaaccaggtgccaatcttgtacaaacactcgtcatccagcttatcaatcacctctcgaattccatatctacaccttcagcagaaaacgacgatggatctccagccggcaaggaaggcttgaatttgatcactctcttagctgagctttacaacttccaggtcgtatcgagcgtgttgatgtacgatctcgtaaggaggtttttggatagtgggttggatagagaacaaggtgttgaagggctcttgaaaattgttcgaagtgagttttctgttacatcattgtttgtttcgttcgtttttccattgcccatatacaacaaaaatgaaactcatatggtatttggatctcgatcgtgttcagatgctggacctcaacttagacaagatgatcccaccgcgctgaaggatatcataatgattgtgcaacaaaaagttgctgggatcaatcctgatgacctgaactctcgaacaaagtacatgctggagacattgacaaacctgaagaacaacagggtcaaagctgcgcctggaggtgaagcttcggctgaagctactcagcggatgaaaaagtttttgaacggtcttgccaagaagaagcctggtaagtttggatattcttatttatttgtctactctcgaatcaatccttacccaaattcttgccacgattattcatgctagtcctcgcccatgaacctctacgagtatcgctctcggatttactctcggctgatacaaaaggaaagtggtggcttgtcggtgctggttggggaggaaatccgttggtagatcgacaagagaccaagaagcaagccgtcgttcaggagagcgcgatggaagaggatgagctgttgcagcttgcaagaaaacagggaatgaatacagatatccgacggagggttttcgtgacaatcatgggaagctcggttcgttagatgattcccttcttcacttgtaatattgggatgattaggctgactcaattctgcttcttcttcaaatgcatcaggacttcatggacgctcatgaccaactgctgcaactaggattgacggatatccaacaacgagagattgtccgagttcttctacattgcagtggaaatgttagtctttctcttgcctgtgggattctctcatcatcgcatagaactttgcctgatgtttgcgctcttctctcgacatccacacaattgacgaatgtgaataggaaaagatctacaatcctttctatactcttgttctgtcgcacctgctctcccttcacactcacaaatttactttccagtatagcctttgggactttcttcgggagatgggtgaaggcgacgtcggtggtgcagctatcgttcaagctcacaagggcaccaaaactggtaagaagaaggttccagtaaggcagattagaaactgggcgaaggtttatggatggtgtatagccaaagagggggctactctagccctattcaaggtatgtgtactgtcaacccgacttcatcgttcgcgggcctttatcttcatccaaacggatacactttggttaaacatttgatcatctttgttcttcctcagcccgttaactttacagcccttcgaccgcaaactgagttattcttccttcacttgataactgcgctgattctatcaacccagacgacgtcgcctgtgcttctcttgcctggatcattatctgaaccggtggcttcgccgttggaacaacatatcatgaaggtcgccaatttgccttccctctgtgagggacttttatatttcttgaccacgagtatggcaggagaagattggctcgatactgttggtgtagagggcaagaaggaacgaaaagtggttcggtggggagtcgaggtgtggaaagagagattatcgatggagattgaaggcaggggtggagatgaagagtaggtgtaatgtatgatccatccaaacagaaaacgtctatcaaatgatcgagacacttcaaaacagatttgagcaactatctggatgatctgagactttcatataacatagcagaatccgaggtatgcttcgatttcaataagtttagtcaaagagaaagatatgaagtgggttagggttattattgaactctgagccggatcgagatgtccgaagtatgagatcaccggctcggagataattccatttaaagcttgtctatccgaccatagtctttcatcatctctcttttcgttcttgttcaacacactgccctcaaacaatcaccaagccatttcagcttcccaacaagatggaatttgacccatcagatcatcctcacaggagatgtatgttttaaatcaggtctgaattccttttcttgtggctatactttagactgatagctcctttctcttctaacatcaaacctcagacaatcctctgaccaagacccatgtattggtatctccccatcggttcggccatccactcattgatgcactttcataagtgtttaagtcttcctaacagtctccttgtctcgtgtttgtacagaaccaaacgtccatggctaggccaggtggatccgcccgctgtggacaagctgccagagtacgatgctaaatgctacctctgtcccggcaatgagcggatgggtgggggtatcaatgaacagtatcctggcgtctatgtgagtctctgagtaggcgcggattagtgacctttgttagggatagatgttgacctttcaacacttttctcctttagcgattcacgaacgactttcaagctctgcttcctcctccgatcccaacgatctctcctgattctgctttgtcggtgtcgggtacaaattttttcgaaatgaaacctgttggaggaaattgcgacgtgatctgcttttcccccaggcacgacctaactcttgctaagatgagtgagaaggaaattgaaagcgttgtcagaggatggacagagatttgggagtccaaggccaaagaggaagataaagtggaatacgtacagatatttgaggttcgtgggtgcttcatttggcaacatattaataggcattggtagtccaagcgaggcatcaaactaaagagcttttgtgctggattttatagaatcgagggtcaatgatggtacgtatctatcactctcaggatcgctcttgaaagagtgaaacatgatgttcatctcggcgttaatttctatcatctgcttttcaagggcgcatccaacccacatcctcatggccaagtttggtctctctcctatattccgacagagcctgctctagtattagagtcgcttaaggagtattcagaggctgagattacgaaaggaaaatgtcttctactggattatgcaatgctcgaggctgaaaagaaagaacgagtgtacgtccttcttcttcttcttcgcaacttgtggaataagataactaagcttcaggcgtaggtgttcttccctgaaaatgtacgatttgctcttcttagaattgcgcagaacaaagattgggtagttgttgttccattttgggcggtgtggccttatgagaccatgggttcgtttgaatttctccaatagatgaaacgtgcttccagtcgaaactcatctgtcttcaagtgccctggttctcaatgtcatcacttagttcttcctttgaaacgacggattcggtcgttggcagagttgactcagactgaagtcgagagtttggccgagataacgaaagcattgcttgtcaagtatgacaaccttttcaggtaagttctctgttgtcactgtgtcttctgtctgtatcgatacagcttggatagctaaacaatcttgtcttgtctctggtaccgtagctgccctttctcttactcgatgggtattcaccagtaagagctgtggcatcttcccatgtggatcaacttcctttcattgtccgcactaaggcttacaaaacgtcttcaaactcgtccaatgatattcaataaacaaactaggtctccttcgccccggtatgcggctagattgaaagcggaaaacaaggatgacgtctctcagttacactttttgtactaccctcctttattgagaagcgcgagcgtcagaaagtttgcggtcgggtgagtggcattcatttcttcacgtcatgctgcgccgaagaccgagctcatgctgccgtacatgctgtcgtttgactctaaaacacagattcgaattactctcagagtctcaggtatgaacttttctcttcatcaactttctgtatggatatcgcgtctggacggatttaccagcgcttcagctgactcattaaccatcaaattcctacatagcgtgatctaacacctgaacaagctgctgcaaagctacaggcttgcgaggatgtgcactatcttgaaagaattaaggatagcttatgagagacaacgaagaagacgacctgtaccagagatctgtagcctttgataaatgttcagtccggtgactacccgtaacacatcctgctacgctttactgtaacccaaccctgttccttgggtttttttactcacacgccagttcaactttctgctgctctcttgcatgttccccagatcgctcttcagccaaagaatcactagaccatctttctacatattaaatagactcatgtcgaccaccatcaacgtttccgagatcgtcacccaggccattcaggtcttgccttctccgtccaaggatcaggacaaggtcgatcaatgggtcgctaccgccaagcagggagagatcaaggatctcgacgagctgtgagtccgaacttttcttcctggttggaactcatcacattggatatagtcatgttgatggctgacccaacgattgtttgatcccctatctttcgttcgtttgtagtaacaagaagcttacgcctttaacttacctctttgtacgaccaccttttcttcgccagcttttcttcttttctttaaagcagtcaatcctaactgatgtcttttctcctaaatcttctcgtatacattgatagaaccaagagcttactaccgctgatgtggccacctatgcttctcttcaccctacttacgtatgtcgagatctatacctgcgtttcgaccaacagaatattgaccagcatcgtttcgtttctttcagtcggttctccctgcaagcgagcactttgcccgacctgctctcactcgatacctccttcacatccaatctcaccctgccgtcgctcctcttctcgcaaactttgctcctatcaccgtcgacgtgaatgctcttcctccgcttgagcgtaaatccgctgcgaccaaggagaagaagccaaagaagccgacggaggaggccaaggctgtcgctaccaatgccgcccccgccgccaagggtgctgtcgagggaatcaccgacaagttggctggactcaaagttcaggctgagggagcgctcggaagtgtcgctggagctgtcggatcgttagccgagagcgtggttggctcggttgtcggtgccaagaacgccgtggtcggtcaggccggggatgctgctcaggccgttgagggacaggtcaagaaggagaagaaggaaaagaaggagaagaagcctaaggcgccggtcgttgccgctgagccgactggacctatgcctagcatgatcgatcttcgagtgcgttgttgatttgttcgaaacatataatcctttccgcgcgatcgtctcgctgaagtactgacctaatttccctctgaaacacatcttgatcaggtcggacacatcttgtcggtcgagaagcacccggatgccgactcgctctatgtcgagaaggtcgatgttggagaagccgagccccgaactatcgtctctggattggtcaactacatgaccattgatgaggtcaaggacaagcgaatcgttgttgtcgtacgttttattcctctctcagaacctggaaattgttcagttgtttatctcttggatcttgttctttctcatgtttgactatatgataggccaacatgaagcctgttgctatgcgaggtatcaagtccttcgccatggtcctctgcgtaagattcttctcatcagattgttgaccttgatatattgttctgacctgtcctcccttttgcatattattttcatcactaggctaccagctcggacggtaaggacggtggtattgagtttgttcagcctccaccggccagcaagcccggagacaggatttactttgagggtgccaagtacgagagtgagtactcttccacgcacggccttttcaagaagaagagataaggagagaaaagaatagaaaaagagagttaattctgatgataccgtgtctaaaactgatgatgaataaacgattagacgagactccgctggacgtgttgaaccccaagaagaaggtctttgaagccatccgttcgttttcatctttctcttactatcaacatccatctatgcatccatcattaaaaatcccgcatccaaatgctaaaattattattttccataaacgaccgaacagaacccggattcactactctctccactctcgaggccgcctgggtcgacccatcgacaaaggaagcccaccgaatccgaacggcggacgggttttgcagagtcgcaaagttcgtcggtgccagtctttcgtaaagtattcaaaccatctttctgtctatctagattggatgcaaccgcgcggcttcttgtagagagagagtttgtttttttgtttgtgtgagggggaaggtttgtgagatgaaagatttaaagatcaatgtgtttccttatagtttatttccgtccgactctgctttcggttgtgggtgtctgtcctcttgtgtccttgaaagagcgaacgagccgagaagtgaaaagcacgtttgctttcgcttcactgtatgaaatcggaaaattccatcaagatctttgttctgtatgaatcgggtggaggggttcttatcgttctatccctagttggtttctttgtatgactacatcaatttctttttctttttgactcttaaacggaaaaaacgtttactctcgaatctgttcacacacacacacacacacacgcggaaaggaggaacccagaccagttcgaggttagcaacaatggaaaacagagtgcaggataggactagcaaaagtaaaggaaaaaaaaagagtaaagagagaagatagacgtacaactccgacctgggcggctcggatgactcgtcctttgagcgtgtaaccgagggacgagacgtcgaacaccgttccgggggtctttccagggataggagcttggaagagagcctttttttaaaagttcgggttgaaaagaaccatggtatgttagtagtgaagagaggaaggaagaagattaccggggaagaataaaaaagcgggattgcaaaatacagggagagagagaaagaaaaaggtggaagaaagacgaacctcgtgaaggttggggtcaaacttctcgcccgtaggatcaaactgctccactccgtgcttcttcaagaccttcaacaactctgcctgagtcatcttcacaccgtcaaacaacgagctcaactctgtgttctcggccgggacgggctgagtcacatgtttcaatgccaaggtgaggatgtcaattgtcgagagaaggtcggacgcgaacttggagatggcgtagtctcgggccttgtcttgctcgatggacgatcgcctctggaggttctggaagtctgcctgggagtattgaagcgcggtctgtgagtaatgcaaatgcgatatcaccaagtagaatgtttgtcagtcgaccgaaggaatagacgacaggccagccaaaagagaggattagcacaaaagaggaaagcgaagacgcgagaaggaagagaagagaaagcacaagggacgaacggtgagctcagctgccttcttcccagcctcctcgatctttgcctgaagttccttcaactttggatcctcgaccacgacatcctcgccttccttctgtgcctctgcactagcagacgactcagtcttgtccgatccctccacagacttgggagcatcggtagagtatcctctgatggacctcacggagaacgatgcgggagaaggagtgtatgacgagattcgagcggacgaggttaatggtcggccggccgatcggatgatcatcgaaggagtagtggtggtggaggtagcagcggcgcatgaacgggtagccgctcgaaggaacgttcgggacatcatttttgagctctctgaatctaggatgggaagaaagcaagcagaatagcgaggccagaggatgacagaagtagaaagtaggcgtgtgggtgcgggcagaatgtgtttgagtggagatgttgaaacggaaagaattaaagaaggaaggaggaaaaaaaagttcggtcgtccgtcagagatattgccgcttatgtaagcgcaagtctcatctcggcttccggagcgactttaactgggttgtctctttttccgtgggctgtgtctttctttgactgtaaaacggaccgagatgatcagatagccagagaaccaaaacatatgatagaaagagatatgaagagagaagtgaaaagaagggcaggacagatatgacgtccactctaaacagatccaaacactagacaagatcgaccggaaaggaaattatgaaaagaccaaaaaaaagagagatgagaggatgaagagaagatggagaagaaagctagattgtatttaagtctaaatagatccctcggccatcttggcgtcgtagtacctgaccatctcctcgactccggcaagaacggtgaagttgggctgccacttgagctcggcctttgctcgggtggtgtcgggtcgtcgtcgggcagggtcgtcggtggggatctccttgtgaatgataccgactcgcttggtgaaggttcccttctccttctggaccttctcgacaacctctcggacggcctcggcaaactcgaggatggtgaactcgtcggggtttccaaggttgaccggtcgggtctcctcggagttcatgaggaggatcaaaccagagacgagatcgtggacgtattggaaggatcgggtctgggaaccatctccgtaaacggtcatgtcctcacccttgagggcctggatgatgaagttggagacgactcgtccgtcgtaggggttcattcggggaccgaaggtgttgaagattcgggcgactcgaacctcaacgttgtcctgccgcatgaaaccgtaggtgagagtctataggaaaaagaagaaagcgtgacgttagccaggaaaatcgctattattgagaacaaacgttctggcacataaaatggatgattcttacctcggcaactcgcttaccctcatcgtaacaggctcggggtccgatggggttgacgtgtccccagtagtcctcaggctgggggtgaacctctgggtctccgtaaacctcggaggtggaagagatcaagaatcgagccttggttcgcttggcgagaccgagcatgttgagcgttccgaggaaggaagtcttgatggtcttgacggcgttgtactggtagtgggggggcgaagcagggcaggccaagtggtagatctctgagaggagggagcaacaagagatgaaaagccagagatcgaaagatgagcaaacgaaggagtagaggacggatcagaggagacaaactcacggtcgacctcaatcatgaagggctcaaccacatcgtgtcggaccatctcgaagttggggtgtcccacccagtgggagacctaattgaaagcgaaccacaaagttgtgagccaagatgtggtgcgatgaagatgaaggagataacttacagtggttcgggaaccggtgaagaagttatcaacgacggtgacctcgtgtccgagcatcatcaatcggtcgaccaagtgggacccgacgaaaccggcaccaccagtgctatagaaggatgaagaacaagagattttagtctgaccattcaacaagctggaggaagccgacgatgaatgagcacttacacaaggatccgcttcctgtcggcgttgggaagcatcttgacgggagggaatcgctgaagggtggagaaagagacggtgtgcttctcctcacttttgatagaagaaaaagaaaaggaaagaaagagtaagaacggggtacacggagtgcagtgtaaaaactagggtcaactttggaaggaaactaccacatactcgaagacagcgttgttggtgtagaggtcggaggaagcgtgagccttggggttaatgttggacctctgtggatacaagggaaggtaatttgtcagttgaattgtaagaaaaaggaaggctaagatagatcgagtaatgtttcagatctgggatgggaaaaaatagaacgagattgatacacacgaggtaaagcgacctcaaagagtcgatgggaacgatcgagttgaaaccgaactggtcgtgtccaacggtggtaatctcctttccctataggttatcaagacaaccaacgagataccgaagcgaagaagcattgaagagaaagaagaagaaaaaaacagaggtaggaaaaacaacaacaaaacgcgttaggctgaatcgctcagaagtcgctcaaaaacgagaacaagacgaagcccaggatagaaccacttacgtccttaccgagaacaggagtagcgggagcagcagccatgattggaaagatttaagataaagaggaggacgggtaagatgtaggaagaaagatagagagat

SEQ ID NO: 2054 - DNA, 592 bp, Xanthophyllomyces dendrorhous
aaaaaaaaaaaaaaggaaatcgtttaagagcgggccgcttcttatgcattccgaaaggtccagctgaaacgcgcagcaggaaccgtttggcccgaagatcgatgccgctgcgcccatcccgacggacgcgtcctagtacggttccggacgggattgtctattgggatgtctatcaaagtctgtagtccgggttctggttcggtttgcagtcggctttctatcagagcggctattgactctggcagcagctcggctggatgcgttgtaccgcaagcgaggaacatatcgtccgagacaacgtatcaatcttgtacgagacggagttaggacgggtcggacagactgctcgctagacgattgatgtgcagtgtgagatttattgtctgattcgatgtctatcacggtgtcttgtgtgtggcatggagtgatgatgcattgtgtggtgtatcgtctgatacactgtttgttaggccatccgatagttcctctgtagttccttcctatctggaaacaggccagtcgcccaagtgttgtctgccttgttcttagccttactatacctgacacacacacacacacacacacacacacc

SEQ ID NO: 2055 - DNA, 21036 bp, Xanthophyllomyces dendrorhous
cgtgttccaccttcgtcctgtcctctgcgctcttcccagccccaatccaacttgtacccagacccccgattgtccccaagtttggtccaaaaggaacccccggcaggatgtctgataacaacgagcaacaccatcagcatcagcatcatcaacagcaacagcagcagcagcagcagcagcatcaacaacaacagcagcaacaacaccaccataatcagcaacagagtcatcttcatcatcatcaacaacaccatctaggctaccaccctaatcagcaaccacacagtctgcatcagcagcaacacgtccagttagtcgatcctcaacttcaacagtccttccaatcctcaacccacagtccgcctcaatcaccttcacaccaggcttcgtcccatccggttgactcgcccagcagtctcgttaatccgatagccaataatctgaatcccgactctgggcggacaacccctttcgctcaggcccatcaggcgttgtcggcccagacccaatctccgccttcctcctcggtcgaacccaccgggatcgtcccctcggccaatgaccctttcaatgtcgccgccttttcttcttccgcgcctgcttcttctctgtcagctgtcgacggatccagtaacgtcaactcgaacggcccccaaagcggctctatccaggtgacggccacccatggctgttccaattgcttctctctacagcaaaagtatatcgcggcccttgaatcggtcgccacgctcaaccaccggatcacctctctcatcgaagaaaagtcaacgttgagcgaagaaaaaaccgcgctccagggtcaggtctttcagttgcaccaaggttggtcaccttctcttgccgctacgagctgcctgaatcactgatcacttttgtttccttatcgaccacactctttctcttcatgacttgttttatcgggactcgctttctttacagcccaacagtttgcacaggcccaagctgcccatcaagctcagcagcaacagatcctacaacagcaacagcatcatattgcccaacttcaacaaccgggaccagacgcgtccagtctcgaccccacccatccttccggttccgtcgttgtcgccagcggcaatctcctcgggacccaacagctcatcggtaccggtggtcacgcgagataccagccttcgttaccaatctccatcccggaggacaggttggaaatcgcaagaaagcagtacgggtcgtacgatccgtacaaggatatcgacagagacgaactagagatgattctctcggtcactcccaattggacggcggaccaccagacgaggaaagctatctggtccgagttgaccaatcgacatggaattcgtgagtcctttctggttcccatatacttgtcttttgccaggtatgttgtaacctactcacctttgtcctccttcttctccaacagcggttatgcgaaagatggagccaggagaggacccaaaagaatacgcattggaacgacagaaatcggccgaatgggcccaaatctctcaaaccgcccggtcgatcgcaagggaactgctagtccccggtcgaacatggttcgaccaaacggacgaagcccagaagttggccatcaaggcttgccagctaaaggtcgaacagactcggtggtgtgagaataactggaaggcagtcgtcctgttggattctaggttggtcgagtggaatagagcttggcgggagaagaacgaagatccggcaggcgccgatccggcagacggagatctcttgaggccgacgaaaggtgggagaagaaaacgaagaagggtgagtacgaaggtggggcttgctggtcttcaggcagaactggctgagcaggcggataggtctcaggacggggaagaacttgagatggaacatatcgaggatcatatgcagtgatgatcttctgttgttcgtcaacacatcttttcgtatctagattgtagtatctcttccctacacattccgtatctctacacgtttcgtcctcccggacattcttcctatattcgatttcttcctcctatagtttcatcatccctttctttgcgtttgcctgtatcacatgaactcctccccacgagcgacatatcgccttggcgattataaacttgacctacgtaattttaataagatgtcccatgctgactaatgtagtcgaccgagacgatcatcgctttccttggacgcccaccttaagcgctttcccacaagtgtctctacacatcataactctctcttctgcaaacgttcagccataggtttgtagattacaaacaagaaaacattgatttccttcaagaaagggtaagaattttgttctttctaccaagaagagttcaacgcctggacgaaaggaaggagaaggtgtcctccgactgagacgcggtcgctcgcctccgaacacctccttcttttttactgacagcctttcacgccttttctccttgaccttcctttcagtccttctacatcaccacttctggcagctctctgcaaacttttcttatcccatcatcaggcgcatatagtcctgccatacatccatgttatctggtgctcctatcgatctcaccctatcggatgacgagactgatcaacccgacgatgccaaccaagcaaagaaaccaaggctcgaccatcagactctaccttctctttcgagtcttcaacatccgttagcttcctcttcagagctcccgagttcttatgagtccacggtgacgtctgtagtacttccgaacggtctccccggtactgcgtttgcttctgaatccagctccggacccggattgaggttgccaggcctgcacagtatccctggaggcgatcagggtggaagtatcttcttaaacggacacggccgaccgacgtcggataagcaggtctttccgacgggtcaatggccaaccgatccttcttcctcgaccaacattgcaagcaattccctttcgtctgtttctgccggccagtgtccgtcggtgttcgggcaaagctcgttcacagcgtcgacttcaacagggtatcctcctcaaccagtatcgcatcaacagccgtatcctccttcttttcaagctgatccgttcgcattcaatccgtcccattctcgttcaacttcgttctcaagctcaaattcagcccagggaagtggtcatcacgcgtccgggtttacacccaggaagcaactaccattaccgttgacatcgacaaacccatatgcttttccccaacaaacgtcttcgaaagctgaccgtctagttgtcgcagcgaacgcaagtgaaccgatagatgtcgacagtcttccttcgccacctagacaacatgtggcacccccgccgacagcgcctccgccacctcaaccgacgctgatcggtgtacttcaaacaacagcgttgatcacctacccaatggcctacctgaacccgactgtcccacccgggatgacactacaaaaggagatgcccaaaggagaggttctctttgtgaacaaccaagagtgggctagagtgaaactcaaggggaacaaaccatctgatggaccggccggatacggccacgggtccttgggtgaagaaacagtcaacatatttccatatctaccatccgcagtggcaaaagaaccgttcggagtggtcgcgaaagccacaggcgatgtcatgggcccgtttctgaaaaagggtctgttgagggccgagggttggatccagagaggtactgatcagtctgtaagccaacgtttcctttcacacatatgtatgcgcgtatgtctctcttggaagttcgcgcgtgtttctcattcttcgatcatccggtttctttcttgcttgctcttgaaagaaattttgctcggtcctacacctgtatcttctcacgatccctccgaatatcacatacattgccaacaatctttcaaattcaaatctatacctccaacaccctcaacttccctggcgacctcaatggttccaaaattgcctgtatcataacccacatctactcggagggacgaacgctgacggtttccgaaacggaccagggtcatcggctgcgttagcgaacgcgttggccggtagaggaggaacccaagctgctgctgctagagtggtggagcaacagagatcccaggtcgacgaagtgtttcaaagtctgaagggtggagatgacttagaagagacagatcctggtaagtcgagtgttccatacatctcatcagtaccagagatcaggattctcaactcaacttttctctctctctcttattctgtcgtgaatctaatcaaggacccttgattggaaccccattatacccgcatcaacgaaaggccatttctttccttcgagagagggagaatgaaaaacgtccaccgacaggagtctccaaaaaggattatatcgtgcctgagagaggaagtctctggaagccgctgccattcatcaaagagaatgggaagaagagctcgagcggaaagatctcggcttgggagcaccgggtcacaaaagaggtcgttaaaggaaaaccaagggagtgtagaggtgccattttggctgacgatgtgagctgacgagccttgtcgagttttcatctgttccttttcttcatgctaatctgataacccctcgaggggattctcttttcttatcacctttttcgtcttcaaagatgggcctcggtaaatccctttcaattgtttctctggtagcatcaactatgtcaacggcccgaaaattcgagatcaaacctatcgaagagccttcacctccatcgacaacagggaacaatatcgatatctctcattttgccggcgctgtatacgggatgcctgtcgagctgtcagccaaacagaaagctgagcagaggttgaaacaagaagcagaagccgaacattacgctcgtcggatgaggatcatcgttcggaccagaggaacactgatcgtctgtccgctcactacggtcagtaactgggaagatcaattattggaacattgggcaggcccggtcaccgtgttctccgctagtgcaggcgcaggtgacaaaggtatcaaacggaacggaagggccgcgctaaaagcgcaattaaagaaggacaagaaggagagctcgacagaaagtagtgcgtcagacaatgaagacgaggaagaagccaccctcagagtttatgtttatcacgggaatacgagaaacttggacccggagtttatcgcggacttcgacgtcgtgatcactacgttctccactctcgccaccgagttttccaagcaaagcaggacggcagaagggaccagcacaccggtaggaggtgggagcggtagcagtagcaagaagaaggaggaagaagatgaggacagtgacggagtcatagaagtagacgcgaatggaaaccatgcggtaaaggtcgaggagaaagtgaaaaagagaaaacggacgaaagcaagcttgactcagttgggtttagctagagactcggaagtcacgtctccgttgcagcagatagagtggttcagggttgtgctggacgaagctcagtcagtagaactcatctttctttagctctattttctattccggccaacagtctcacaatgtctcttgtttctcttgactctatagctttatcaaggacgccaacacagtagccgccagagcttgttgctatcttgaagcccagcgtcggatttgtttgactggaactccgattcaaaacaagctcgacgatctctgggccctcctcaagttcatccgtttggaaccatttgatgacaaagccgtttggtcgactttcatctcttcgcctgccaagtttggggattctataggagtcgctcgtttacaggtcattatgcggcatatcactcttcgtcgaacaaaggaaacgagattaccgacaggcaagactctcttggaactcccgcctcgaaaggacgagatccgttatctccagttcagtgaaaaagaacaggagatttatcatcgatacttccaggataccaaggaagactttaccactatgatcgaagacggagaagaaggtcaacagatctctaatatgaattacgtcaatatccttcagaaaatccttcgacttcgtcaaatatgcgaccattatttgttgatcggggacaccaacggagaggaggaagacgtggacgacggcgaggttctggattacgagactgctgctgctgctattggagctcacgggctcacccagagaagagcggctgctgtgatgacttggatgaaagaaggctcgatgtgcgaatgtgtagaatgtaagcttgatctaacctgcttggccgccggtgttgcgcctaccgagaccgaagcagacacgccgtctgcgccggtaaagaagggaaaggctaagaagaagccacctcaggctattatgacgaaatgccagcacttgttttgtaagatccttcctacttcgggtgttcattcattcagtcaaccgagcggaagaaacagtcaagttaacaagtcttttctcgataccttttctttctttctcttcttctctcgacacaggcctatcttgcttcaaaaaatcgatttatgccgcctggccaaaatcactaggaggagttggacgatcctgtccaaattgcacgactggccttcgacttgctgccgattgtatcgagatcatccctcctggtacatcagaagctggctcttcggctgattacattgctgttaaagctccgaagaagaaaagtcgaccccgtcgatatctcgagaaccgatcggaccttgtcatgtcaacgaagatcaccttcctcatgtcggacctgctctctttctctgctcaaaatccgtactcaaccaactatactggttcggaccctcgatcatccaactctacgttcattcaacctttagaagacaatcttccggaagcggccccaggaatgttagtcgaagatgaggacaatgaggatgcaccgaagctagtggcggacatgaatgttcttgcacttccttctagaaacccttcggccgagtccagtccacctgtggtcgacccttcaccgaccatagctgacaagacaacggacgattcccaagaagcacggtctatgccctttgaaaagggaggtgaccacatcaaggaggatcatcctctggacagttcgactgcggctgccaattctaccaatcctgctactactgattctgatgttgtcgttcctgttcttcctgaaagtactcctcaatcaatcaaggagactactttatcaagcacgacatctgaacaagccactacagtcaaggccaccgatcttgttcctaatgctccacctgccgcgccggtgttggaggaaccctatgcgtccgatcttgcttctggaaaaccaatcaaaacgatcgtcttttctcaatggacgtcgatgctggataggatcgaagatgcattggtcgactctgggatcaagtacgatcgactagacggaaccatgaaaagagacgatcgaacgttggcgatggagaggttgaaaagcgatcctgcttgcgaggtcttgctcgttagtttacgagcaggaggtgttggcttaaacctgacagctgctaaccgctgttatttgatggacccttactgtgagtttttccggtttcattgatttttccttacatgcgagtgatgagactaacgggtagatgagctctgtgtgttatagggaatccggctgttgagaatcaagcggtcgaccgaatcgtaagtccatcctcttgtcatttccgtggaaatttaagaggagaatcttatctgtcctgtctttgatattaactcatatcctgtagcatcggctgggtcaatctcgtcctgtcatcaccgttaaatatatcagtacgtgtctttcaaccaaaagacgaatagtctcaaacccacttcgttgacgctccttcatttccctgatatttgttttcgcgcactctctcacttgtgtattcgattagttcaagataccctggaagacaagatgcttgatatacagcgtaggaagagcgagcttgcaaatctctcgctttcgcagacgatcagtaagaaggaactgcacgagaggaggatggaagagcttaaggtacgtttaaaaaaaatcaattccccattctagtcttaaacctcccaaacatcaacgtatcgaacgctgatccaagaaaatattcttgttgcatttacttagacgttgttcgcataaacctattagaaaatcaagatagaacatctatagagccaacttccactgtcccatctcatctgctcactctttatatttcgttttgatctggaatattctctctttggtttagaatttttcttttctcgtcctagagtagtaaactgatataaatatatgtttgagtttgttttcgatttttctctttctcatcctgctttctctgaatgaagggtgctttagttgcgccacaagattgtatggatccgaccttggtcaagaagaagaatgtatataaaagcaagacagaacaccgtttaccagacacagcactgtatgcagaaatgaccccctcgaaaagcgaggaggcagaagagattaccatcaagaatgaaccagtaagaaagtcctctaaccaagactgatcaatcgctgaacctgcggaaccatcaattcgttcaacccaacattgttaaccttgtgctatcaaagaagaggaagaggcacaatgggtaatatttgctaagaaaaaggtttacgtacagccaacaacgctctgtatctgacgtcaggattctcgtgcgtcatgagcgccatcacacgagtttttgctcccatattgttgacgagcctgtaggagaaagaagaaaagaaaaaaggatcacgtagaatgggaagggagaaccgcacggctgttagggaattgtaacatgacgagcctcgatatagagatagcaatgatgttggttctgaaaaaaaatttgactgacttctttccggactcgtagttcttgacatagtgcccaatgtcagcgcatgcaacagctagcactactgggtcatcagaagccttcaaaagatccaccaaaatccttgtaaatgatgaagaggacaaagaatatcgattacaaagaagatcagcctcgaccgtcacaactgaatatacatttgagccgtaagattcggcgatggtttagaaataacacatacttgatgagctttccgtccttctcgttcagctttgtggcattctctttccagaaatcttctgattcatgtatgggcgaccaggcgagatgaccactctcaacctcagacgcatattcgtcccaggttctacaggtgtcaagttttccttgtcaggaagcgttgaagcgtatggaagaaattcgaagaagaagcacgtacgagaggttgcttctggcctccttcaacacatcccctagcacgttcagatcgtcctccagctcggtatcttctcccagctttcgccccttcaagctctctacaaatggagcaaccctagcagccaacatcgccgggacattcacctgcggagcaagggtgatcaagtttcggaaggttgcaagagtaattcgaaggactttttgcttgggcgacgattgagctagcgaaagcagatgcggcacaagattaagttttctataaatattcgatttaatacagacggagtagaagacaaaatgtcagtcaaatacatcctggtaacaaagggaaggacgatgctaaggactgacttgtcgattccttcacaaacttgtctatcaaacgtcaactcccagaaacagaacccgacccagtacatcacttgagggttcgcatctctaacgacaccctgacctgcggggctagccccagagatcgatcgtaggatcttggataagctggaaagtacaggaatggatgtatcctctagggcccagatcgaggatcgaatggaagttacagagagcaggagggcgagtgattgcagagcaatctctttggagtgtggagaaggagctgagaagcagaggatgacatatagatacctgtttgttagcttcgtctcagactatagctacaagatatggaaaggcatggcggacgtagacgacactgagacaaaccttgaagcaggttagccaatacagacagtagagggtgcaatgtcgagtctgagactagcttgggcgagctagagatcaggaccgtgagcagctgggtagccttaagttgaatgaactcgtcagagagagaaatcgctctagaggacatggttaagcgtgacatccctcttataaggtttatataattctctatcttgagaaagaggaatctacttacttgatcagaggagcaaagggaagctcagagctctgggattgaaggttgtaaaataggttcagtcgatcttgagattctgttgaggtagagaagaacaacaccaacatatacaggcgttaaagagatcaactccatcaagaacctcatacgtagttgaaaaaggaacataccaccgatgagatctcccattccgactaagacggcctggacggtatccactctgaccaactttccaagcaagccctcaaacaagccggcatagacttcttgctccttctcaaagacctgttgctgtttggccaagggttgtcggtcgattttcttgaggagagctagttcagaaggcgagacaaggttcgctcgttggtagccctatcgtgtatgaaaagaaaagaatagtaagcgatggaacgtgtcataaaccaaataaggacgagggcggaaggagatctatatatccaaggcttcatctctgccatcgtcaagcaaaggagagggttcaaaagacgcacatcccagggaacagcctttgctctgatcttgctcgaatgttccgagagccagggagaagagacgaggacgatattggacattgcttgatagacgttgagggagaggagcaaaagggagatgaacgtcttcttcatatcgctcggccgtcagcgtcagcttagtcagcatccgcaagacatgttcacccaggtatcagactcaaacggatacccaactattcattgatatctagatgactacgaatagagatgtacatgttggaagattcgtttcacgagtccagtgactagactccgctcggccggacaccgattctcttccagaacaaatcctctctcagtcttacaagctccttccaggtcttctcctcccaactgtcttccttcacaggcgcgctctcttcaacctcaaccttcttctccgtttcgtccagtgaaggagaaggagctgcaatatccgtagtagccccttgttccttatgttccgttgctttctcttccggcaacgccaaaaccggagaagcagaaaccggatcggcatcagataaggacacatccgaaggctgattaggcacatcagacacggcactcagatcagacacctcagaaggtccatcagagatggtcgggatagatagtgtagtcttgataggcgaagcctcccttggctcgtcaactaaggcgggcaccggggtagctggacgagttccagcctcggaaacagctgtcgaggtaggtaccggcggaactgctcgccttgctgccgctcgttttggcaaaggaggcgcaggaccagtggcgacggcactcggttgtttcgaagaaggctgttcaagagaagctctgtttgaaccagtctgttcaagggatgttcgggccgaagcagacccctctacctccttttcagaagcaagtatatcagcggcgggcgtgtagtctactcctttaggacttgcgccgatgggatcaactgaggcctcttccgcattgacagacggaagctcaacaatctcagctggctcttcattgtgggccaactcgttctctgatggagcagcaggagtttcctcgagctgtgtctcggacgattcagcctgaatctcactctcttgagaagtactctctgcgattggctcgactggaagcgattcttgagttactgcttcagtccccatgaacgaagaggaagcaggctcatccgacaagctctggtccggctgagtggggtggacgctcactgtcgtttcttcgtcagctcgatcttgaacttttgcggaagtgagaggaggaggcaattttctagccggcaagttaggtgccaccgtcaatgctttgttcgaattctcgtcttttggagttccaggctggctttttgataatccccatccacctgaagacggtccagatgattttccgaacccaagatttagaccccatgagttgctttttctagcaggcaacgccggtttgaccggctctgcggctttgtcaggtgtgggctgtgtctgactgacatgctccgatctggctggaagtttgggaggaccagccggcgttgttccgtcgtcatagctccacactgggttcataattccagttttgacgaaccgccagagctcacatgttgctcgtagacgatccaacgaccatccctcagctacagggtacaaacttgtcgatttttctgacggggactgtgacacagctggagctatatgaaagacgtagatcggcggatgagaacctgatgaggtactaccaggccggcttagtcctggacgatgtgcaggggagattggacgcgtaaccatggttcgattgaagaacgacaaaccgcgagtttgaggaggagcggcggatgaagttgaattaggctcagcattctgcagaagcggattggccgaggccggggagataagctctccggatagtgcacagacgatatctccttctggtttttgagaaaacacttgagctgttaagataggacatcatcgttagttcgatcccacacttcgtctgcggtaaagaaataagtcacacagacctgctgacactggctcaacaatcagcatactatctatcactgcttgactgattgatttcttgttcaaccagctaactccaggtgcgaagtcaagtcggagtgcaggctcgtgatcctcagtgattactcgagcaaagaaagccatgttgacgaactgaagaagggagctgaatggtggggctgacgaccggtttcgagggcgcatcgatcgaagatgagtgacaaatgccaggaactcggcataaggaatgtggtcgtttcgaaagattggatgaggtttagctgagccgagattcgtcttggtttgagaagcttctgaggaaagtgaaagcgcctgcatagcagactgcatttcccgaacaacattctcggcaacggaaaggttttcctctgcggcaaccagccgagtctctgctctagaacgggcgagtcgttcggctgcgaccattgaattcgcctataaaccagatgttgaaatgaaaatcagactacaaaggcctctatttggagaagatttaatagagtcaaatgaacgcacttgttgaaagagcgaagcagccaaatcatcgacttcgctctcaaccttttgctttccctcttcagccaaatctctctttccttgctcatccatcaaactagcggccaagcgctgcatttcttgtttcacgtttgactgctcaaccagtaagcccgtactacatcatcaatcaagacggcgaggacagtcagtcattaacaggaagacggcaagcactgagtgggacttactccaaagcatgaagatgctcctttcgttctcgttccagctcatcgatttgacgtttctgagcgtctgttgtatccctgatctgaaacaaatcgtcttccaaatcagccattcttgagaaagatgtcactagtcttgtgtgtaaagccgacatgggaatgcatcatcattcgtcagacctgtggttcatgttcttcttgacatcagagtattgaggagagggcctacttctggttcaacatgtctctttgttcagataaagcctcaagctgtgctttcagagaactgacaagatttgaggtcggactgtcgggttcatgcccataagtagcgagcctcgaagcggcaatgattgagttggatggaccatgaggagaagtaatcgcaatatttggaaggttgatggtccgaggtgttggagaactttagtggacggaaggaagaggagaaacgcatgagaatcattgtttgatatgaagaggagatgacaacatatcatacacactcgaagattgtccaagatgtctggagattcttctggccggccatcacccgatacctcaggcaacggatgatctttgttttctggagttccgaagggtgtagacgcagccgagtcggaggcgtgaccgttgtcggagacagactgttggaagatcaagttcgtttcattgcattcggtcggctcaaaattagttttcttacgataaagagtctctatctctcaacgtacaaggagatctgactagagcgatgagagaaagtcgaaaagacgacaaacttactgggcggttttctacaggttcaacctcagactgttgggcagcttcctcgggttctcttgtctcggactgctcttcgggatcagatagtctttcattgtctacgcttttgtcttccttcgaggacaggtctaccgactcagtcgactctcctttggtatccatgtcctgatcagcagaaggaataggaaggctgtcgggcatgtccgttgaatgtgttgggttagaaacgtcctgctctggtgagtggctgtttggagaagtatgctccatgagtttattaagatctgagtcaaagacgagacttgttgaggagatgaaagctaggagataggaagaaggtgaaacaaaagaattggaaagaagatcggaaggagatggttgatgtggatgtgacgagtgtctgtgaatttccatctatcactttcaatccgcacagtatcttgaccttgagtctctcctatatatttaataattctccttcggttgtaagggtacttttctttggaaagcgccatggcaatgatcttatattacatcttcaactgtagatatatacttcacatcggtccaaatgaattctcagacacttctttcctgttcctcgccttgatatctatcagatcctgcgtcgttcgctcgatatctagattcgcctgagcgagcgcagcctcaagctgggcgattgactttcgctcttctctcatcctgttaagagatcgaatcctggaggcatctttcatcgcgcccaaggcaatctgatcgcgtagtatgcaacgatgagttactcgcaagttggaatgactcttgtgaattatgaatgaacctggaaatacgaaccatgaccatctcctgatgaagattttccatccagatcaatttcttcgtcaagtgatcggtcttttgcaatagcgcggctctcaacgcattgaaatcactcggtcgttccacttcggtctcctccaagaacaacttgatctttgaccgaacatcgtctagttttggtcccccaatccgagtcgatggcattgcactttccgtcagaatcatctctatattcttcggtggtaacgattgcaagatatcgcatatcgaatcggaaagcaacgttaacaccgttgcaagagatacgacagcctcatcgatcgttgagattttatgaggcgccgtcaaagcagtcagcgcaaacgaaagtgcttcaggttcgagtctagatgatttggtaatcgttgacggttgttggtcgtctttgaagaaaaaaagacttcgatagtccatgccgttcattgctcggttcaacatatcactcaaagtgcgagcgactgtttcctcttgaggcggattaagtcgctcatagatatcaaacttcatcatctgagcttccgcttcagtaccagtcttcgaatgacggtcagtgtcaggaatggcttggccggctgaaggaagatcatctttaacctcatttgaaaccatcagcggattctctaccagcatagtgatagctatatccggggtgtcaagtttggtatcggtgagaggaggcgaagaagagcggacagattcagagagaggatgtctgactgtctttgcaagtgaatcagtcgcctccgggattatcgagttcacaagatcagtctctacgttcaccagagctgaaatttcagatgacgcgcgagcagtcggtttgtccgatcccaagagcttgaacgccttgatctttcttttcttcccattccgatgaggtgagggagtccgtggttccgatccaaacgagagcgaaatggattgctctacagagtgcatcttcgattcagtagccttcatgtccacctccgtgaccggccgaaaattaactggtttctcaagagtaaactccgagaattcaggattgtctgcgattggcttgtcctcagttctccgagatggttttgacggcgttaatataacagttgaaccaaccatacatggtctcggtaacgaggtaggaattgctagtagggcaggcatagacgatagctgagcgggcgaaccaactctcgaagcagatacctcctttgaagctatcgcaatctcctgaagctccttccgggacttcgttgccggggttgtcacaggttgagcatagacgatagacagaagaggatcggcgtgattcatcttagcaggactggtttcaagttctttcgtggttggcttcataatgtacgtctggatgttccccagaaaaagatagaaacataattccaagagttttctcaggatgtgagtaacaatcaatctcaaaacaagactcttcatagaagaaacatacctgttcaacttcactcatgacaccatcttctgtatccttcagcgctatcttcttgtcatcaggaacttgtcgatcagtcgtacctttcgaacatgaacccgtagacgacgaaaaactcatgccgttcttcatgcgctccccaaacaaatccattgaaaccagttcttctctgatatcaagtttgacgcccagactcaaatccagattcaggtcggcgtccatgctcaaacggctgttacgtctacccatatacgtatgaggttgagctgcgctatggacaccaacaggtttcatacccatcgtcagcaatggcgacgatgtgagcatggtcgacccaaaaggagggctgaatccgttttcggtttctcccgtcaactctacatctcgaagtgtcttgtaataagccgcactcagcggcaggtgttgctgtgaacagtaatcatttggcctgggattgacgaagctagctgttgcggttactttgggcaaaggaagatcactctcttgagatatatcagacgaaactaatacgtctgatggcgggattggaaagcaagcgagaaagaggaaaccagaggtcagtacggacagacgctcattggatgcaattaaagatgtcatcggggtagggaggggtctttttcgtacattgtatgctagaggagtcaaagggaggtaccctctattttatatcatgcggcggggtagtagtaataagggtaaaattgcaaggtttgaagagggttgacgaaaagtacgaggaacatatgggttgtgaggaatgacggaaacaacaggacaaaagaccaagagcggaaggataagagttgtaggaaattaagaattaagacaactgtagagggaagaagaaactattggacagatgacgagagcacgagcttctctctttatccttctcaatccttctcagttattttcttattcaaagcacccctccccttgtcatgaaagacaagccagagtcgttgtacctaccctggtgaccgactccggctaaagttgacggcgagtccgcccttccgctactggcactagcgttcccagctcccgctccagcacctgtaccgttagcgttgaaaggatagttctgaggctgctgttgctgctgttggtgaagctgctgaagaagtctagcatttctagcagaatcggaagtaagaccctgagaagtaaaagggaaagtgcctagcccagacgggtcggccgttcctccaattccagccattccaagatcaggtccgtagttattaggcggaaattcgttgtgttgctgttgttgctgctgttgttgttgttgctgctgctgttgagaagatgtcatcctcatagacatgatggcggggtcttggaacggcatctggttcattccaaggtctattagaaaattcagcaaccacggttagaagaccaaagtacaaaggatacagcgccagtgcatggataagaaaacgaaccactagatcccactcccattgctcccatcccagtcattgaacccatagatcccatgccgcccattccattaatccccatcattccaacacctaacatatctttcaaggtctgagcctgagtcgcacgttcggctgacataacatatgatccttgctggccagggtgttgctgaggatgctgctgctgttgatgttgctgtcgctgctgaggctggaattgctgttgatgctgttgctgttgctgccttgcaaatgccattcggctctctctggtttcaacaggcggaagtccaccaagggaaagatttccattgggagaagacgctgatagctggtgaatccaattagcagggttggtactaccgccgtttccattaatatggctgtttgacgacccgatgccaccgttggtagcagctgtggtcccggaagaagttgaggctgcagcagggttaccggaattcaaaatggggatgccagatccaaggccagaagaagcctgagacttcaacccaagccccggaggaggcggatttgcgtggaaagaggatgtcgaaggctgtctagataaaccatgggatgaagccccggcattggtcatgaagccggaaagaccgggtggaggtaatctcgttgatcctaagcctagagaagggccttgctcttccaatcgatttccccccatgaatcctgtattggacatggatgaccaaggtagcaaagtcgagccatcctccgtatcccctcctccagcggacatgtatcctcctctctcgtcaacactgtctcgtctgggtgaggcaaaccctgacagacttttcggcaatccagtcaacccatgtactggacttctctctgatggccttctccttgcaaaatcaaaccttgatcgtttagttccgtctgccgcttcatccattgaaccctgtccgccatctccaaatggatcgaagttaccaacatagggaacagatgggccagctccaagatccggtcctaaccgccctgcgttgctcatcggcaatgcaaagccaaacggagagaacccaccgccagccccggcaagtgtaccaagaggtccaaatgagtaagcggattcttcagcggctgaggattggtgaggcctgtttcgaggaagattggctttctcgtccaagtgaagattgaatccaaattggccatcctcgaatgaggaaagcatcttattgaggtccggaaagggagagaacagtgaggatggttgagcctctctccgagcagtcatctctgagacgagcgcctgggtctgtgaggaaggatgatatgcttgttgatgcggaagctgctgggtttgttgttgctgttgtatgatgttcgactgaaacgcattctccggtacactttcggatgacaccggcgatgatggttgctgcaacggctgagatacaggttctggcgtagtaatcgcctgatttggtactatttcagtcggaacagctagaggagaagacggcctagacggtgccggtgttggtagggaaggcacggcaggtggtgcttctggcgtttctgtcactactgctgctaccgttgtctttggcgatgaagagacggaagcgggtgtggaagcaggagcagatatgggagcagaaacctgaggcacaaggaccgctcgggtgggtgcaggtgatgcctgcctcgatggtggttgactggcgaacaacgtcaaaccaggaggaggcgcacttgtgacaaccggtgttgaaggagccgaaggaaccgcgggtactggcggtggaggctgaggggatgtaacaatgactggtctcggagattttggaggagggattccactggacgacgaagagactgataatttagcagctgacaatactggcgtccctgccctcgaagctgaggcggattttgagcctggtccctccgagtccttgcctaggccaggaggaggtccagcagttttcgatagagtagcagtcttggatttgctgaccgttggtgagggagcagacgacgatgtggaggccccaattgaagcgagcgagacaacgacattcttttttggcagaatcctagtagaggagggtgttcctgggatttgggatttgactgacgagccatttggtgctggaagtgttgggttgggagggagagaggcaagacccgtaccaggtcgagctccccaagatgctgtacgtggtagtgccgaggctgtagtgaaaaataacaggatgtcagaaatcttgcacagaatgaggttgcgcgtaaggaagacgaaccatctgtcaattcgtccagcttttttgctcgagagctggttgctgttgacatcggcttttgtaagcgctctgtatccttcatcgaatggttgcttaagaaaagttagggtttcagtagaaatgagctatcgttctgctgcttgggagataaacagcgaaactcaatggacacatacagtgtagctaaatcatccctcgtgaaacaatctcgctcgtcgccccagtcatgcaaacccatacaacttgaattctcgcactttgtgtttcttagccagttctcacagtacttggctgttccataactggccctcagaacttgaccgggcacactcggtgaggggaagccatcaagtgcagcaatcgctcgagcagcgtcctctcgccgaaggtaagtgatgtaaattcctacgtttggcaaattatttgaggaaggtgtggaggaaggtggtcgcttatggagaattagtttcgatatcttgccgtactggccgaagtagtcattcgagcgaagagttgcaagttgctatagaat

SEQ ID NO: 2056 - DNA, 63660 bp, Xanthophyllomyces dendrorhous
agaattatcaagaagaaacaggagagccaaggggtgaggtttctctaccgatgggaatataacaacgatagttgatgtattttgaaaaagacgaaaacatacctcttctgctctaccttcttggccgacgcccattccaacaacaaacaccatgctcttcacgataatccgcacatctttcagatgtcgtcggccaagagactccaactccttgttgactttggcctttgtcttcttcagagcagtaagacgtttaattctgatcaaaccgagaggaatgggtcgtgtcagctcaaccaaataaatctctgcctattgaacagagctgaagtttgacatactcttctggagatacaggggtaaattcgattccttcttcagtgtattctcgacgacaagcaggacatcgtttattcaagtttgcaatgatatggtggtgacagaaccgacaaatctaaaaagtcaaataatcggcggtcagagataatgctacagtatcagaaacagatagaatgtccaaattcatactgaagaaaaggaagagacggtacctgataaccacaaggacagggcttgaagttgatatctgacaaatccatctcttccatacagagaggacactctggatcctcttcctgtggaaccaacagtgaagagtcggttaaaaagaaagagaggacatgaaacaaagaaccgcaaccattagccaatcgaaaagaatcaacaaagtgagttttgtaaatgtaattggaagataaaaagagattgtgtagaacagaaaggatgagataggacgaaagtgccagcacactgagaaaaaataatctcgcacgccatattttggttcgtgtttgtactatgcacatcaggaatcaagcgaatgcgaagacaattgctctggtagagtgttcgatatctgacactgatcctttcccttgagcaagtagttgccttgctctccggtgggaagccaaaaagtgattttccaacacgaacgcgttatgaagggatgccaaaggctaaaagcagagaaagaaaggaagtgacgaagtgaagaaggtagagctgggaggtcgttcaaaatgaagataaaatgatgttctcttccgttccaccaggataaaacgaagggtttccatatagatcatctctcccatagcatgttcccaagaggaacacagtcggttcgaatgaggtagcgaatagaacagagccaaacgaaatatcaaaacaaatgtgacaaacactcacctcatcgtcactccaatagacgtcttgaaggcctttcagtaaatcagacttttcgtctctatgtgagttagaggacaggacgatccttgagccggacgaagcggaagaaagtatagcggtgggagccatatggagaaatttagctggtgagagtagtaagtgattgaatgaaccggactgcaagaatggaacgaaaagagatagagagacagtcgacacaaagaaggaagggtatatgctatcgttcgagagtgatggtcgttcaaaagatctgatgttgattgagaagcaagaaaaaaggggaacgagaaagagaaggaggagagagaaacggttcgaaaagggcaagggtgaaaaacagcgagagaaaaaaagaaatcaaatttgagttgtcttaagttgtctaagaggcagcggccgtgagactgattacaagccagactatgaagaaggtggagtcatctgtattgagatctctattactttctagagtccggtttcgtagtctttctgtgcactttctgtagtctctagatatgatttctgtagttcaatagatcgattttcactcagttatccacacgtacatgctccatctctcatacgatccctataccttcataccggctatcctcaacttattctctattcctatctttcattgttctgtcccttcttcaagcctttgaatatgtcttcctggttctcttatctcacgccctcaaatacatcagacgccctttcaagtcggcctggcccggctgactcgcctacggtgactcgtagtcctccagccactgctcctgcttctgattcatttgcttaccggaacgaatcatcacaagcacaacccactcaatctacgcctgaagtagattttcaaggaagacgaaacatatatgacctagacagctactatcccaagtcaggtcatcggtttgtggacccacctgttacagatcctgacgatccctgtttgtgtttcatctttcttcatgatctctctcaccatggatctatggtactgatgctttcttttgattgtccaaacaatccagctgctcctccaccgtctttatcaccatcgccagcagctgctccaggaccgaactttccgaaagtaccggaaaccgctttcgagcgcgtgttcaaagccaaaaacccatcggaaccgctaccggaggtcctcatcaaagacccagaacaaatcaagcttgaccatcagtatatcaacactcaggccaaagtaaactgctcggatatacatgctcaactttcagaatgtaaatgtccctaccacggtcgttccttgattgcgtttcatcatttgacagagtactgacatacgaatttctattcttcatcctttctttggggaacaggtcgcatgagttggacaaagccatactttacgcttgaatgccacgagctatctactcgagcagacagatgtatacgcatacaaagagtcagttctctgcttactattctagtcttttatatgcgcgctgattgtacaatctattttttgttttcattttcggacaaacgacaggagcttttaccagctatgaagtttggagaacaggataacactgtagcccaggatcggctgtatgccagattggcggatgatgaaggcagaagactaatggcagaggaggacgaacgagcaaaaacaggatctcagacaagtgatgcataatcttctctttggcttttgattgtggctctgttgttgtatctggatattgtagctaggtatgaaaagtattcattctatacaaaataataatttttccatatgtatgtgtatgcggagggaaacaagtctttcaaaatcctgttaaccggacccatctctctctgacttcaccgacctgtacgcaaacacccgcgctcgacctccttactttgcctccaccctcaccaccaccttccccagacactcgttcaccggactccgtcctcttgaaaacaagctcagcccattcggcaatagcgaggactagcccatgatgggatgtcactagtgtctgtcctgcatcgaggtctctggatgcatctagtgtgacgagcgccaaatccaacgatgaccctaacacactgatctcgtccgcttcttcgtcttctacctgccctcttttattgagagtagatgacagaggtcgagagccgagagttaccgctagctgtagagcttctggggcaatgacggcgaggaagagtgtagagtgtcttgatgcatgtaccaataccatcaacgttgctaagaactttgatagcgacaacggggataagatcattcccgttccagtcgcggacggcgtcgaagacgaagaagaacgaagagactgtgtggtctgttcctggtagtgattccaaaatcgattgatcatcggcaaaatgaagaattcggcagctactgtcgtaaaagaaacttcgttgggcgatctcatctttggtctgcttgacccgttgctatctgtcagagactcctgaacaagtggcttggtcgatctggggtttactcgaagtcgtttttcccgttggaaagattcaatatttgattctgcatcttccctacctcgctcgatcgctagatccttcaattcatcggcaatcctctctaccgctcctcctcgtatggacgtggctgagcggatcgctcggattggatcagatggtgagatgtatttcgaatgtagagcgttcggtagacgtttgctaggccaatcagtcgaggtgaccgaagggagggcaagaacgggtaaggaagccgcttcgcgcgcacccatagcgagcgcagtgagaatagcagatctttggtggagagagtattggttgtggaagtactgctcaatcaacgccctggttgaaagtcatcaaactattttcagtctggttgactacagacacagaagatggcaagtagagaagaggaaggaaaacttacggcgcgacttttcgaggcgagcaacacactaaggcattcaaaattccttgtttcctgttctcaaaatcttccagttcgaagttgtcattcaaaccagcgagggtgaccgctatgaactcggcattctcctctgtggatgttattcagagaaaacagcgatttgtcagataaattcagccatttgtaacatgtgggaaaagagatcgtgaaatgacagatgtttcctacctagttccagtccaaagtctctctttctcctaaccaaactttcgccccacttcaggccaacctctaatttgtccggatcgtctctactgcctaatagctctcctaactgggtcagatagaccggtttcggcaccttcttctttttgggcgcgtacaacgtcgggtcgtcgatgtattcatctagatcggagggagtaggagacgaagatcgagatgaaatccggctagatatggaatgtgatgacgaggcgtagccggtgagagagtcatcagaatcagataggacagtgatcttggaggaagacacctttgtcgatttcttcttttttatctttgatcgagtttcacgatctagttgagatcgaagtctcgacgcagatgcgggtggagagggttgtctagaggattcgaaaggaggagaagacgactgagcctgctgattccaccccaatagatccaactccgacccagtttctaatccctcatttgcccttgtgaactgattccagtcaatctcgacttttcttagttctctacagatcctttttccaccttcgtccccctcccagacaccgaaattcaagactttgtctccagaaggcgtacttctcgagctgatgacttcggctgacaacattcctaaatggcgaatcgttggatctgggtgggataggtagtgagggagacattggagaaactctggaaggaagcttagacggatgatttgaggtgaacgtatagggaacgagcggacggcgagaaggaggatggtcagaacgtctttcacgcataacggattcgcaccacgttcaagatcaatgattcataggttagattaaacacaaacaagtatcagaggggtgaagaagttgagagtgcgtacagatatgttttttgacgagcgagtatttgatgaattgcacatcggtccaaagctccaacactttggacatgaatttctcgagcgctgtattcaatcataataatcatcagtctctcgcaagataaagacaatataaatctactccgtagaagggacaaaccatcagaattctttgattctcccccgacccaaccgatcccaactatcgctctctgccttatgtcccgttctgatcctaaagatgaagcttctgctcccaaaagaaccttttgccagactccctcctcctccctacctatgactagtcccatgactttactagctctccccagtctgacgatttccgaagcctcattgagattgtcgctcgatgcattcagtccagccaagagatgccgtaggagactctcagctgcacgagcgaggtcagagaaagggagcgcctggaagagcttccggtaagtcttacagtactcaacagaaggtgatgaagatgcgatcacgcgcggaagaaggataggtaagagatgagagaatagtgtttgagcaggttggcgtgggttgagggacgaggaaagtccgaggaagccttgacgaagaagacccgacagaatgggggccaactggtcttcaagtgcagaagctgtatatataagagaagaatcagcttcataccgttggcgtactcagacggaacaacatcaactaacggctataacgtccggttgagcttgcctcccagacgagtcggtctatattcaagacgatatgaccgagccaacgatttgagtccaactcttttggaacttccaccagagtacctccttgagtagcattcatcacttttgttggtatattcaataatagttttgtgtagccctcccatataaccacattttttgcgttcgaaccggcgctttgatgaggactgggcgggaagaggacattgaagacgatgggaattggataggatatcgacattacctgaagaaagtcaaggatgagactgagagatgtgttagacttgaaagacgaccgagatgatgatctggacgcttcttttgatgaagaggcagccgatatcgagctgagacgtgtccccaatgcctgaaatccacagagaacgagaacagttcgaaaacggccttctccttcaactaaagacggagagaaccaagtccagataagagctcttccgaaaagatcttcaggttctttcccatcttccaacacattccaccagacttccagcacggtttccaacagaacatgctgaattccgagggcaaacctagagagcaagatctcttgagcgtccggcgatctggaaccaggccataagagtttgggtttgaggtacgcgagttgatggtcgaccggaggtaaaagattaagcagatggagcggttgggctatcaaagaaatcagttcatccttagattctatcggcttagacaacgcatctcggacgtgccggagatgcaagatgggatctgtggacatggtcgactcgacacagaactcggtgtgcagtagattgaaagaaattgggagtgtaggtaaaggatacggtgactaaccgatactaaccctaacacatgacgttcacacaagcattccaacccagcggatcttttcgaatgataccgtcaacccacctaggggtttgacctctgacggaggctatttcatagtataacaagatgggacaaagtctcagttgtctaatccgtagtagagcacaggtgtgatgcgagcagttgacctcttgtcttgaatcttgagtttttttcgttattatttgaggacttgaaagactccatcagaacaggcaaagacggtcgtacaggctttagtgcatacccaaatacatgaatgtgttcctctgagcagtacttgggacaatcatacatacatcatcttcgcctctgttcactctcctcatcagatcctttcgactcttcctctcatcccgactgttacctttcttcttccgtccaagctgacggagaagcaaaagtcgcgtgatgagataatgtggatagacaacaaccaagtgatctgtgtgatcgatcaactgcgataatgcagagcttcaaaccaaagaccatggtaagaagtcgaactacacgatgatcgtgtgaagatgtttgacgatgatgtcctgatttgatcatcacaaacttcccactacgaattgtcacattttttgtaatcaagttttgtaatcttttttcttcattctcctacgtggccatttcggattttcttctccttcgcctccaaacacccatcgtctggatctcgaacactgtaaagatggctgccacttccaaacgggcaaacgctcagcaacaaaagtctttcatcgggaagcctagtgtgtcccatggaagcatgtacgatgctctcaagatagagggttacgactcggatgaggaagaagaggaggaagacgataacgccaaggtcgtcgtctctcagataactgaagctccgtacgttcctctcatcaactctttcttctctcgttgtattctttcgaattggtctgcttcatagatcgtttcattcctgaaggataagaagtcgcacatgctgtcgccatatgaggaataccaatgtgacacgatctcacgtacaaactcatgttcctctcgataaacattatcccttgttggcttgaaaaaatcactatacagcccagccccactttccaagtctgctcgaaagcgactctcgcgtcaaaacctcaagcaatcttcctcttccgcttcttcctccactccttccacccctcctatccagcccgaggagtcatctcagaagccttcttcgatcaacattcccaagaacaaccatctggatgctcctgtgccagcacttgccgcttccaccccggaggtcgaagctcttcaggagatgggtgttcaaaatgacggaaccggtccttctgccggaggaagaggaaatccttccaaggaatcgccctcaacgttgtctctcggcgagattctccacgagccagccgtaatggataaggctgcgagcgtgaaggaaaaggtcaaggctgaggtccaaaacaggctgccatcgtcgttgaaaccctccctatcgaaagaggaggccgcagatgctgcttcgagatcggctgccaaaggtttccatccaaccaatcttccggcctcgctaccgacattaaagccggctggtccgacaaccccgcagaagcggcatcagccctcggactttgtttcgtccgagctcaaggagaaaaagagcgttcggtttgagtcgagtgtcgtcggccagggcgagtcagctgaggatgcagagaagcgaatcgagtccgaaaaggccaggaagaaaaagatcagagacgccggagtcaggacgggtagtactctagccatgatcgccggattcttcggtatgacttgactcttgctctagcgtatagacatatggtgtcggtcacactctcagacaactgattactctgctctgttcacataggtttcttgttcatgggacatccttacatgattgttctcgtcgagatctgtagcactttggtctacaaagaggtcaccgctttgttcggcttgtcagacagtacgtcatatccttctcctatcctgttatcatcgacatctgcccatatttattcttatgttcttcacatatacaggtggttccaagaagcccggtcaagaagggggcgataagtggtccaaaacccttaactggtaggtggttgtgtctacttgtctcatcgaatacatacatcgtgtactcacttctcagttgaaacgcgcatgccatccaacaggtacttctttgccgtcgccaactacttcttctatggagaatccatcatctactacttcaagcacatcgtctttgttgatagcttgttcgctgtatttgcgagaaaccaccgatttgtcagcttcatgctatacgtcattggtatgtctcatcaagctctgcacgcagacaataacttttcttgacgctccattctttttttgacccgaaaacactacataggttttgttggttttgtcgccaatctacaaaagccctacttgaaccaacagtttgcgttgttctgctgggttcatatgtcccttctcgtcatcgttgtctcgagccattttatcgtgaacaacatcgtggaaggcatgatctggtttttccttcctgcaactttggtcatctgtaacgatatctgggcctacatctgtggtacgatactggtttaattggtctcgttgcgtgggctggaatttgaatcataactgatgtttgaaattaattcaaatgactcttgtcaaatacgtctttaggtatgaccttcggaaagacgccgctcatcaagctcagccctaagaagacggtcgagggctttgtgggcgcgttcgtgtgcactgtcatctttgctgtctttgtacgtttttcttcgggtttcatctaaagcttttcgaaaacaaccaaagctgaggtgtacatgtccatgtaatctttcttcaatccaagtggtctaccttcttgatgaggttcgactacatgatctgccctgctaaagacctcggaagttccgcgttctctgggatgacgtgtgaccccaacccagtgttcctatggaggaaggcaaccttacccgtcgagctcgatggctggctccgagatcatgtatgtttttcttttctgatcgttgtcttggtatgtgattcgttacacagagcgactgacgtcccaatcttttccaatattcccttgaaactctacagctcggattctcgttccctacgatttcttacgtccccttccaaatccacgctgtcgtcatggcttgctttgcttctctcttcgctcctttcggagggttctttgcttccggtttcaaacgggctttcaacatcaaggactttggacactccatcccaggtcatggtggtatgaccgatagaatggactgccaattcttgatgggcatgttctcctatgtttactactcgtcactcatccgagtaagtctcctcctccttttctttccatctgtatttatttttcgtgacgttcgttattcctaacgacagtcctgagttctaacctccctggaattttctttttaccataccaaaggtcaataccgccaccccggcatcgatcttgcaaactgttgctagcatgtctgtcgaacaacaggttgaagtcgtcaggactttgggagcgtacctccagtccaagggcatcagatattaaaccgagtttcctctaaatctctcacaaagttgttgaggtattcgaggctcgagggttgaatctcaagaaggagaaagaagaggtagaaaaaagtgaatggaaggaagaaggaaacaaaagcggatggagatcagaagagttagaactggagaagagatggaaagaagagcgaaggaaaaaaaaatcgcgtggatcgaatcatacatgtaaattcgttttctctttcccatctccaatcctcgcatcacgttgtatcacttgcagagagagcatatgacgaaacacagatgagaccacgaaagcgaagcaagaaaatgatcaaatgtgataaatctcatcatacaaaagaaaacaagcacacacacacaaacacacacacaaaaaaaaagaacaaacaactaaaacacaagatggctgatgtataagaaagacgacaaaacaaaacgaaactaaagccaatcctttcttcatccgagttcaaaactcagatattttcgtccattccctcaacgagaatcaaattcctacaaatacttgagtgatctactggcgattgatgacactctctgcagcttcggcttggagctgggcaatgtcctttgctcgtgagcgacggagaacttctctctgaagctcaagctttcgagaactgtgacgagagtttcgtccgtaacacagtcaaaagagaaggagacaaaggatatcgagaagaaaaggtcagaacgaagtatatatgttagagccgaggagaaggcgagcaagcatcatcatctctcggctgttcaaggtagggaaagaggaacaaaagaacagtcgcgaacgtacacttgtagagaaagatcgtgatagacgttcccggcgtatgccccaacacctacagctgtgaaatgacccaaccaagactttagtgggtctgatgaacaagagcagatgttcaggtccgataatcatttaacccggagtagtcaaaacatttgcgaagcacacaaatgacagattcatattgtccaaagagttagtatcgtattagtgtctctgaaaagccgtcgaagccaggcacaggacgtacaaccccaagggatggcaggccgtctaagaaagcttagttgaagcgatcggatggcgaacccagcagcgatgaatccgaggactcgtatttgtctggttccattgatctgatagtcacctgatcggtatgattcgagaccgttgtgaaacgggttgaagggcttagctggaacggtgctaagaccaccggtggtagtactggccatgatgaagaagagaagagagtggaaactagggaatgtaggcgagatggtgaaagagaggaagatgattggagagggatccggcagtatctggccgggtgcgtcagatatttgattagtatttgatttacaaagtgttctgaacagactagtctgacaactacaaatcgttgtaatacgcgactacagaaaagatgaacaacactgtattgatttcattcacttagaaaaacctccaaaattcttctacatcatccgttatcagcgagcaagcaagcatccatcaacgtccaaagaacaacgacaattagagaggtttttcttcaagcaagacacttggtcatgtcaaaaagtatctccaagatggagactcttttgctcaaggcactcccttcttcaatcacctttcccagctctctcctcgaagcagatcagtcaccagtgataaccgatcctgctactgaaacagctatcaagcaggccgccgctcttctccggaaaggagagctcgtcgcttttccgacagagaccgtttatggtctcggtgcaaacgctttagatgggaacgctgtgaaaaagatttatcaggccaaaggttcgtttgtgtgctgatctattgacgcgttattctaccttttggctattgatcctttctggtcgtgtgaagaaccgggcttactccgtgatttccggatcctacaacatgctgtgtaaaaaattcgacgacgtacaggcagaccttcggacaaccctctgatcgttcatgtgtcttcactcgctatgttgcactcccttcttccagcctctcgggtaccactctccaagacatactctcatctgacaaacacccattggcctggcgcgcttactctgttattcccatcgtcctccctccttccatcgatcactacggcctctctctcgaccgtagccatccgcatgccttctcaccctgtcgctcgagcgctcattcactacgcaggtgtccctcttgcggctccgtcggctaattcgtcaggccgaccgagtccgaccagagcggaccatgtgttcaaagacctagaaggcaaagttggtctaatcctcgatggaggaaactgtgaaatcgggttggaaagcaccgtgttggattgtggagaaggaacagaagagagccatcaaggagctgattggagagttctccgaccaggaggtgtcacggtcgagtcgttggaaacttcggtcaacgctttgttcggcgagagtgaacaatcatcgacagattcttcaagacccaaagttttggtttggaagaaagacttccacgatcctgaccaagaggcagctcctaggacaccaggaatgaagtacaaacactatactcctggtgttccagtttacattctgaccccttgcgctcagtcgttagagcaggagaagctgccaagtcctgaagaagctatcttatctttattggacttgaagcaagagtcgacttcatcatgttctcctaatcaaacatcgctgtcttcgtcaccagcaccagtacccgcatcatcgacctcatcgtcatccccatcatcattcagtgtatccccatcgacgcttcctttacatccaaaaattggcctcatgcactacgcaccctcacctctctcctctctcctgacaaatcctgctcatcctcttccatttgaaattcagtcataccctctcggtcctcggtctcaacctgatatcgctgcgcaaagactgttcgcaggtcttcttgaactagaagccgttggatgtgaagcaatctttgtagaagaaggtttagaagaaggtgtcgggagagcggtcggagaacggttggggaaggctgttggaggtaaagctggagtgatcgtcaaagtctgagaggtagagtgcggaaaagaacgcatacatatgtgaggacggagggtgaaggaaggcacgtcaaaacaatctcaagttcaaatagatttttcatagatgtgatgatgtctcaaccaaaccacatggctatgtagtaggcaaggaagaagtatatcggattatattcccggaacagatggatggtcgtcatgtgcatcaaaaagatgcggaccatcagtagaggggaagtgcgaaaaaggacgaccacatgcgtcttatctataaatatcgtttaataatgagacactttattcaaccgacaggcgtcgttgcttccgattcaatctcgatcacacccagcttctggtcttcaatggaggactcaattgatcctaaccgggtcatcagcctttcgaattctacctcagtttctctcaaagcgagattcagactctcgatcttttcgtctttggcctgcaactgaatttcaagggtttcgacccgaaggccgagcgcaactgatggcggatatgattcggactttgatggcagtgatggcgaagagggtgaggacagagtggtatcgatacggtgggattgtttcatacgggatatctcggccgagaaggctctgtaatgatcatcgtcagatcaacgtgagcatctggatcaagtgttcagaggaaggaaggaaaagagaaaaaacgacgtaccgctcttgctcaactaggtccgagcgaagtcggttgatctccttctcacctacccgaatcaaatcgtctcgctacgataattgcgcgagatacaaaagattagccgatggataaagagtaaattcgatgattaaactgtcaatagttgaatgatgagacggacctgaaggacttcctgtttcatcgattcaatgacaacgttctgtagttcccgctgcttgtaaaccgcttgactgaggaaacaccagaaagaaagcagtgtcgatcaatttgccgaacatattagacacaaaaggcgacgttaggcaggtttgtgaacgaacgagtttttctccagagcggtgagcttctcgatctgggcttcataacctgtgatggtctaaatcagatatgaaaacgtttagttcagtgacatcatcggcatgcactgataacaatcgatagactcactcgaattttcggctcagcttctatcagcttgttgttgatttcaaaacatcttgagaaacaatcaagacaagattgttaagtatcaaagagacgtccagtagaagagcaacacaatgagatgctgggccttacctattcttttcatctgccagatctcttctgagtcgatccctttcctcacagacctgctgaagttcatttcttaggggtgagatcaccttctccagctcatcaaccttagcccgagctttggtgacgtttgagttgaatcggtcgttcttcgccttctggttggcctgggtcgtggcgatcgttagcttgagctcgtctcgttcgcgttggagactagatattcggttttgaagagatttatatttattgtgctgccaatcaaggtgacaaagaaatgaagggaagcatcaatgaaccatacgtgatagaaaaagaaaactcatcacagcactcacaagagattgcatttcagattcttggcccgctcggaacacgctatctcgatggagttgttggttgtctgcagaggcataacataacgatagatcagcaatgttccatcaacccaggatggaagtttctgtcgttgatacgcacgggcagtgatcatgtttttgagatagacctctaacgataactcatttctcagcaacaacacgcttcttctcaagaatgccaactctgaaactcccttcgagattcccgtccgcttcatctgtccttcgtctcctctttgaatacgaagttccgttcctgtcttgaccatctgcaagtatgaatctggcaccacacttcctacataatctctattcggttccacgtaaggatcagatcgagcttcgcctagtgaagcgatgaactcgccagaaggcgtaaactcaggaagtggttccgaaggtgtagggttcataagagttggcgcggacacaaccgaccagggtttgggaggcgcaggagctcgtatcaaagtgaccgaggcaacgatctccgaaggctgaagcttgcctatccttttcttgtttgcttcagaaaactcagtggaggcgtcggtcgaaagcatatcaggatgtagaacgattaatcgagcaagtggctgtacaaaacggttagaggatttgttccaacaaaacggcgtaattcactaaagaatgcatcattactgagaaactcaccacacatcgagatgcaaattctctcttatcatatacaacttcccactctttgccatctcgactctgcttcataccatgcgctcgaaaaaagctcgctggatcacgcatgaattcgagtgtactacagggtagcagagaataaagataagagagaagtgaaatgggctggacagatgcgggaggtaagggtagaccgaaggccttgtctatgaaatcctcaaatgagtcgccaagagaccactatgatcaattggaagtttgttgatcgcagaatggaagaatatatgaacttacctaacttctgccaatcagaaagatctctcatgtctattgtagaccttcgtgaaggtaatcgagacacatccggtgaatctgattgggtagaaggtgaaagaggggacagcagcgtggccgaggattcgtcgggtgtgggagatgaaggtctcgaaagcttaatttcttctgaagctggcaaatgttcagaatcgtccagaccgatggctcgaaggagaatagcataaatgtccaagtttctgtgtagacggaattatgtgatggcactatgtgagacaagttgtaaggttgatacacactttggggtatagatatactgacctgtcaatcaacaccaacggagctccactcagaatagtgagaaagatggccagttcaacgtaaaacaatgttgtactagtatcgatctgagctgagatcaggagagcatctaataaaggcgtctgcaacaaagattgcgccgttatggattgggccattagaaaggttgagagaaagatagccgttcggaatcgagaagacacgttgatgaaagcggggtgaagtagattgaacaggctctatatcatcacaacaacgtcggtcagcatagaatttgatagagttagcatacacagtctagaatgtagcaagcatggcagtctgattgccaaactgtgttgaaagaaacataccaagggatctctccttccccaagccaacagacactgttcagcagcaatcaactctccatccttctccatccagggcgactcgtctatcgaagagtttgcatggtctaacgccacaggctgctctacatgatgaattcctccgctcagatagacctgaaggacagtttctcggacttgctgaaccttgggatcatcctttgccgggcttgccatgacctccacgatctctttgccgggaagctccgagagtatagtcatattgtgccagatatatcgagcacgttcctgcaggtatgtttcgtgatgataggtcttatggaaagagagtgttggttgtaggcttgtcgagtgaggtatataaaccaaatcgagatcaagtttgtgatagcagagagagatggagttagtggaaggaagattgatggtctgccgataagtgacgtctgtgaagattaatgggaaacctctcaatcgtcctgacaatatcacatctcgacatcgtctgttataccactctcagcttctatactatccaccgtcgcttctagtcatggattccgatagagaacagatctgtttcgtgacggttggctcaacctcgtttacagctctcatcagtcacgtcctttctatagattcattggctgctctgaccacacaagggtttcgaaaacttatcgttcaatacggcaattctgatcttcctccgaggtgggtagcggggacgcagaatatacatacaacagacgaacggacgatcgaggtggaactttggaagtttagggatcgagtcgaggacattgtggatcaagctgacctggtgatatcacacgcaggtacgagctgagtctcaaccttaacttctcttctgtcttgaagcggattgacatgatatactctgacgcattcatttctggctcgttttccgtttgtaacaaatctatgtaggagccggatcaatcttgacttctcttcgacagaaaaagactttgatcgttgtggtcaatctatcattgatggacaatcatcaagccgagctggccaaaactctctcatccaagagttatctgctggtagcgacgcctgagtacgtcgaataatcttctttcccatcgacatgtcttgagattgaacccttctgacaatatcctgttgtacttctcaatgaacaggtccttgtccagcgtgatatctactttgtcgactgccgcgcccaaacttgtctcttttcctgccccggattcgactcgttttctggatgtcatcaacgaagaactgaatcttgtttaaacccacgtcgatatcttgttgcttgctacacgtacacacatctttatataccccaaaattgtagtctatgtatcttgccgcttgcttacatcgagtccatcaaagacagctcagtcgcatttctcccccaaagtccatgctgatgggtgaggcatgggtcggaagagatcatcttattgaacattttttgagacgagtcaacggtttgagaacacatcccgatgtgtgtcaatgggtatcaaagatgatgatattgtccgaaacattcgagttgcgctctacgctaggtgttgaactgaaggaagacaatgacagctatatgcacgtggtggttgtctcagccacaaaagacgcgtcttggacgatcagtctcactccatctatcatacttgtctcatctatccttcatccaacaaagtctttcttacctgtcctgctttcgatcttggttgaatccagaagaggacttcgggttatttctgtctctctggtaccgttcgccaggctcgttaacggacggtcgtcgggtgtacaaggggtttatgaacaacaactaatccgcgcacggccctttcatcccctgacccaacctgagaaaggaacataggacatatacaacaccacctcctttcactttgatcaaccacacctcagcatatacccttgtttcagttcttctttgttcaattctcgttccgctccctgacccgtgagaagacagttcaatcgacgcataatactctcgacattctcaatataagtctctccgatgtctaacgtccatagacgatctcaaacaggctcgataggctcaatagcaggcgtgttgagcccttctgccggcccgacggagatagctgcagaaggcccaactagtaatgggagctcaaatgaagggaatgttcaagtgggtgagtatatgtgattggtagtgacgtgctttgaagtcgttcctatagagagagacaggctttcacatcagatgtgctcaaagggaagagagtgatatggagtacaattacgtcgagaagagagttgacagaattggaagaagaggagatccgtttgaaagtaatcctcatgaacgacatgggtcattcttcgtacgaaggcgttgccgtattgggtgcgcgacagagacgtcaagttgcagaagaaaccagcttctcagcaaccatgtgtacctaaaaccagttcatgctaacctttattttctacactttcttttccttctcttttgtttcatcgaaacattatagtcctccgaatcagacctaccactcctcatgatctctccaccattccgcctcgtttccagagaatttcccttttcccaacatcacctacctctatcacagtggacccggcaggagccgccgtggcggtccccagttctagttcggggtccaaacgaaatcaaaacctgcaataccactacgacagagttttgggaccagacgaaggccagaaagatctttatcaggctgcagccgaaaggctcgttgggaaatttctgcagggattcaatgtaaccattttagcgtacgtacagacacggtcagcatgtcaatatgtgagtatacactgatacattctcttggattttgattgatgtatccagatacggtcaaacatcatctggcaaatcatattcgatgggaacggccattgataccgctcaagcgacttcttttgacatcacacccgaaaccggactggttcctcgcgctgtagccgatatattcagtcgatgcgctgaattagaaagacaggcaggggggaaacaaaacttcaaatatgaagctgtttgttcattcatagagctctacaatgaggtacatcgtagaatttttgggtgtcttggctctacatcttgactcttcaatctgtctgacttgctcgtacttattattttgatgcgcttcaaaaacaggacttgctggacctactcgctgattctgatccatccagcagaccgcccgtcaatatacgcgaagacaaaggtcagatcatctggtctggtttgaaagaagttcgagtgtcttcaaaggaggacgtgatggccaaccttcgacagggttccctccttcgacgaacgaacgaaaccgatatgaacgctaccagttctcgtagtcatgccatcttctctttgactctcactcaaagaaagcgcgttggcatccgaccctcgtctccaccaccatcatcatcatcatcatcatcatcatcatcatcatcaaatccctttttttctagcacaaacactactttaaccggtgttaatgggtttggactaagccttccatcgacacctaaccgaatgctgcctcgaccaggctcaatgatgggttctagaacaatgtcgcctacgcctacatctagaccatcgaccccttccagtttgccactgcccaaaggatcaggcctgaaacctttgggaccatccattaacggagcagcatctagggtagctagtccggcattgtcaggaccgaaacatacgagaagattgtctggaatgatcaacgtcctgaaagatgaagagggagacacttttgaaggattcaatggaaaagagaaagatagcggagactgggtcactgtgactagtaaattccatttcgttggtgagtctgcgcgttctatactctaagcccatcctcatcccccgttctgttcgcgtctttctcatcgtatctatctcactgactcgccttcgtcttcacacttgggctatcagatctagccggaagcgagagagtaagtcttatcatccacaactgctctcccaaccatatcaatgtcatttccgagctcatacttcgccttacagttgaagcgaacggcggcgcaaggagagcgaatgaaggaaggaatctctatcaactcggggttactagcgctcgggaatgtcatctcaaccctgggagatccctcaaaggcgaaagccagaggagctagtgagattgtcgttcaagttgaattgatttgcatctttccgtttccatcgttgacaaacaaaatatttgttttccaaaccaattcacagcgcatattccctatcgcgactccaagctcacccggctacttcaagactctttgggtgggaacgctcatacgcttatgatcgcctgtgtatcccccacgttagtgtttggcagcgcaagttcttccttccgttctcaatgttgagctgaaacgtctatggctatacacgcattatcttaaacagcgaatataacttgacggaaacgctcagcacaatcaaatatgccaatagagctcgaaacatcaaaaatttggctaaaatcaacgaacaagaggctggttgggatgatctcgagcaccttcaagctgctctaataaaactccgtaaggagcatgcggcattgaaagtcgctgcctcttcagccggaattgctctttctactgagggcaatgcgtctgcctcaacagactctgtcttaacagagggtatcaaatctagtctagcaactgattcttccttcgtgcggctatcaagtcaagtctcggatttgacagagaagaatgcagacatgagtgatagatatcattcagcgatgacagaaatcgcaagattgaggagagaggtcgaagaagctaggttgggagggcatgaggcgtctactggattcgcagagatggttcaaccagtgatcgaagaatacgagaaggcaattagtgggttggaaaccgaattgaagctttcaagagcagctttagtaagccttgtttctttcattttgaagcttttcgagtattggttttatgtagctcaatatccgatgactacgtgatactcttattcctttcaggctcatacaaacgaattctgcaacgaccaagaacttcaaatctccaatctttatctactgcaggctcaggctgacacctacactgccgagcttcgggacagaattcacaaactttctgatcgggagtctttgaccgagatgctcattctcgatcttgaagccaagatcaaatcctatgcggacgaagaagaaaccgcgtctactaagatgtccgagctcgaggatgaagtcgcgcagctcaaaaagttgaacactgataccattgaacagattgctgagttgaaccttcgtttagctcaggcggacgagtcaaacgaaggcttaacaacaaaggttgacaatctggagaaagaagtcaaacgccgcgaggtgatgtgccgagagttggaagacagacttgcatccgtcgatactccgaacgagaacaaacgtcttttggcggagcttgaccagaaaagctctgtcgcggccgctttgcagcaggagctagcagattccattgaagaaatgaagcagcttgggaaagaaagatctcttcttttggaacaggtaaaacaaaccgaggccgagcgacagttgttgcaaggaaagctcgcagaatcacacggtcaatcggaagacactgctcctgctgcttctgagacttcttcttccaagattcccgaaattgtcttgcatggtcaagattcctcgctagacaccggtctcgttcagttgtccaccacttcttccacggtcgatagtctggaacgtcagttgcaagaccttcaggtcacacacgcaacaacattgattgagttggagaccatctccttgaaatatcggtatgtcggtcgttagtcattattcagtcaacgtttcattcactcacaatctgatacctggtgttatagagatgcgctcaaagagatcggcgacttggcgaagcaagtggacgataataaccctatagtcggctcacgcgctatcttccgtcgctcggtgtctggctcctccgtctcctccaatgacccggcgaaggtaccccgatcattctcaagatcaaattcgtcagaatcagtctcaccaggtccttcatctcgtcaacgagttggaggggaccgaggacgagattcggtccctattttgtccgggtcaaatctcaccacaccatcgtcaagcggccagggttttggcttcaggggaagtgggcaacagcaatctatgttagtataaccagagtttttcgttctagttttattgaatttcaaccatcattcgagacgtcagtctgacatacttgtgttccatgttcacgaacacaggcttatgtctccatcgcaggaggtacgttagcgctgatatgagaactcatacgagcgaaaataataacacaattgtaccttcatcttgtctacattggtctagttatcttcatcgcagccgtcgcgttccaactgggccgggatggctccgagcctcctgaccacttccccggtacaaacaacttccgctaagattgagcgctccgctcaatcttttgaagacgaaatcatgagtttgcaaaatgtgagtctattgaatcagaggatgatgttcgacgatactgaattggattggccatgtttccgtgattggttttaaacagagtttgagatcacgcgatgcagagatttcccaattggaaaacgatttacggagccaactttcagcatcaatatcttcctccccagtcgtgtctagttcaaactcagacggcaacgtatcctccgcctcccacacatccggattcacagcgccctcatccattgacgatagcgagcaacaaagatctgtggttaatgagctcatgaagtaagtgcatctcatctgtatacgttttttttgactggagttgatgtgttctgtgcgaacgttcaggtcgatggctcaaaaagacactttccaccgagaggctaatgaatcactgcaggcagaggtggataagctacgtcgtgagaacgcagagatgacagcattgaaccgtgaccaagtaagatatattcattctcagagtttttgtttaagtagctctgaacgtttttttttcttttttaggcattaaatgtctcagcagagcttgaagcgctacgcaaagaactggtcgccgttgaagatcggtctgaagatttgatgaaccagcttgagaaatctcgccatcgagagcaagccttagcatcttcagaagctcgaaccaaggcggagcacgaaaagcacctggcgtctcaatcagaggccgctcgaaagcaggctcagtcgtcaacgtcaatgattcgtatcgttaggcaagagctagctcaggccaaggttgatcatgatgaagataaaattaaacatggttccatggcagtcaaactctttgacgagcaccagaaggcaaccgatgcgttcgaagaaaatatcagaactctgaacaaatcgatacaagcccagaccgcgcttcacaaagtacgtcttatctcttggttgttatattatactgggtcaatcgttcccaccttgactctgtaactaggttgagctggacgcagaggttaggaaacgatcggatcttcaacgacaactggaagagctgtactctacccagtcatcatctcgagctgaaaagatcttgattcagacggcccatcaggaagaagttcaaaggctcgaggatgaattgtctagcacgttcgatactattcgggatttggaggatgtcgttgctgaggaacgaacacaacaactgtcgacaaagtcagagcttaacaggctggtagccaaggtcgaaggtctcgataaattccaacgggaaacgatggatatgatcgctgctcgagatgccttgactgggacgatcgaggcgcaaaaatcggtgctcagtcaacttcaggcggaactcaagcgtggtagtttcgagatgattggtctgaccgaaggacgtctccgacaagatatgatcacaagagaaagactatcaaggtcggtggtttgaaacatgtgacatatgggtgatcatgtactgactaatcgtctatgttgaatcgtcacaggacaagttcaagcaatctggccaatgatgggccgttacagtcggacagaccatcttctgaaacgacaggtcggcgaactttcattccagaagaacaatcgcctcaactcattgagcaactggatcagtgcaaacagacgattatcagtctcgagaaacgactggttcactgcgaatctgatttacaagccaacattgatcttgtcaacgttctcgaggcatctcttgtatgtatcgagttcatttcttcttgtttgtagaagtatgtgcgctcacaagaatgctctccctttgacctgacttagaatgattccgagcgagctctccgtaaggctcggctgtctgcaaacgatctttctaaagaacgagaccgagcggctgaggaacgtgatacgttacgttctctcctctccagcgctcgagccgagtacgtacccctctacctttactttcgccttccttttctcccttgtaccagcattaagaagagctcatcatgtcgcatcacattcttataatctagagttctctcggtgaagagttcaattgacgaggataaccggcgtgctatcatcaagacggagaatgagcgggcggagaaagaaaacgcgaaaaaagagttggaactcaagttgaaggagttgaagaaacggaaatcaaagttcaatgttcgtctcttccctatctctgtcgtcttttcattctcaagacagtcattctcggtgtgcgtcgatctgtttaattggaagactaattttgcgcatgtttacctgttcgttcgttcggaatagtgtttttaaggcaaaatctcatctcgtacgcgtttctaccgggcaccgtgatctttgtgaccgttttcttgtctcgttctatatctttcatccttctctcttcacggctggtaataccatgtgcaacccctcttatctcgatggacgattcataccaactgtcaattacgtcaggcacccattcgtccgtccgaacgaccgaacgaccgaccgaccgaccgactgatttacgatcattctgtatatcctggactctgttatctttcctcttccctctttgctctttttctcttctctctctaagccccctcttttttgtctttattgagttttaaactattacgatgcgcacttcttgatgactgaacgaattgatataacgggaaaaaagaatatagtagagattacatgtatctaagaaagagcgaaaacaatccgaggtagtaagtagaaggaaacaaagtgagacaccataaaaagacaagaaagatgggaggggggagaagaggagaggacaagaccgatagatgaaagataacgaaggagacgagatgagatgagatgagattaagaaggaaaaggaaagttagaacagaaaagattaaggacgttgtaagttggacgaccaggccaaacggacgtaacgtgtcgaaaccacatgccgacagcaaaaggtggatgaaatgaagagatcagatagtatgaaaaaagggagatgataggagtctttccggagacaattcaacatgagacgaaaatcaaacgaaaataaaaagatcaaagtcaaagttgaaaaaaaagaaaaaaagaaggataaagcataatctatataaggcgattggattggaagaaaaagaatcgaaagaaagagagaaagaaagaagaaaattgaagaaaaacaaaagtgtccacagggcgtagaattcaactcgacgttcgctctcgtcgatcgagatacatcggcactcggcatctggaccctcccggggtcccagttctctctccgactgctactcaaagctcccgttcataatcaggcgtgcgtaacggctgaccaagcatcgggattgctcgtatcgagccttttgcgatgtctggatccgagtctggaaatgtcggtcggtgtggtggtgagtatggttctgttggtggttctctattgtgtgcaataaatcgaggaagtatttttttttcgtatttttgattagcctcagagaacaaggaaacaaatgaaggagaaagtaaaaatcgaaattgatgaacgaacgcgaaatagatagcactgctagcaggatatcccaactctccgaaatttccggatccgtagatactgactcctctcccgttgataccgtcctcgccggagaagccgtcctgcccgtaattatcgacaagctcctcggcatctgcgaaactagcgtttccgtcctcgccctctaccgtgctttccggttcgagatgtgatcgggcttgagaatactgggaggaggtcgagggaccagtctggtggccgctgttgctaccgccgacatgttctgcctggaaagaacgatctcgttggtgggatacggtgggaagatgttctctcgacggaacccatctcggccgtggtctggtagagatcgacgtcctggtcggcgattcttccgagctcgagcccgagaacgacggcctcggctggaaatcatcagcgaccgcggggccgccgctaccggagctggcttgccagctttcgtcaccttcactagaagcaaacctcgagtcgtccctcgggaaggtcggtcgttccaacggtccggtctccagctctggctcttcgtcctcttggacgatgttgaaaccatgcggataggaagcatcgccgaatctcgacaacggggaagcgatcgaggtgtttgatccgaaattatttgacgacctgatgaacccggccgggccgacagcattcgacagcgaattggtagatgacgaggccgagggtccgctggctgctactgctgctgcttcttcttcggcggcgtccgcgaaggtggacgatgtgagatctcttccttgctcggtgataggccgagggggtcccaaggagtcggccgggagcggatctctcgaaccgacgtcgccactcgtccaacggaagctttcggaggactcccaactggctctgctctcgctatcaacaccgtcgtcgaacgtggtcgagtcagaatccgtcgggtctgggggtgaaccgggttcgacgggtccgagcggttcgggaacaatgacgatcgagtccgaatggaccaggtttccttgatgatcgaacgcctcgtccgagtagatgacacttcgaccggaaagggttctggtgaggaaggagctgacgagacctgaagaatccttagcgatcatggccttcgggtcctctgtctcaccggtggatgcgaacaagccattcatgacgtcgagccgccttgctccgtcttctcctagggcgacggtatgaagaccgttaggagtgggcgtcactctggatcgagtggatccaaggggaagagtcgggataggtgacgaggtcgactttcggttgttgctcaccgcaaatggatccggtccgaggtcaacattggtcatttcgccctctgcgttcgtaccaccggttcccgcggctgccgcagccgctgccgctttcgatcgggtctttctctcggtgtccaacgcgtctttggaggcttctactttttttctagctcgtcttcgaatacagcagaatcccaagagacagagcaggatcaaggcgacggcaccgccgatggcgcctccgatagcggctttagctcctgtggagaggccaccggtggaaggatctccaagaacagtcgaggtgggggaacccgagttagtggtagtagtcgaagggacgacgttcgttccgataagcatgaggccgagactggcctggccggccaaaccggtactcgaatctgtggcggtgaagatgacttcgataaggtcgtagtctgccgacccggggggtacgccgacaagagaacctgaagacttgtcgaacgacagccaatgctgggcttccacaggggagacctgggcggagagcgtggttactttggagtcaaaggacgactgattcgttaggtgtggggggacagagtaggtgaacgagctgttggcgaccgccgttgtgtttgcgaggacgaacgaggagaacgggaaggggtggatgtccaaaggaaggacggagaggtaggaagcattagtgctgatggatgtcaaggtgataggcaaattgatcgggaggagtgttccgttgatgtagcccgacggaggggtccccgagagcgtttggttggtacttttgggaagagaaagtcgaagtatagaatggtgtcagcagcagagcataaagagcgaaagaaaacaaagacaaagacaaagacaaagacaaagtcaaagataaggaaggaaaaaaagaagaaaaagacaacgactcacccatcaaacgaaagccaatcctcgtaaccgacgaggtcgaccgaggcgacgacgtcttttctgtcgatagtgttgtcgtccaacctgaggccatctatctcgacctggtgtgagagcggcgtgtcggcgagacctaacgcggtctgcaggttgtcgatgagatccaaagcgtgtgtgccgatctcgatggtgagggtgtccttgacgtctccgaagccttcttgttcggagccgaccagaacgatgttccaaacgccttgggcgagaggggccacgccgttaaaggtcgcggtggtattgtcaaaagtgagccaggcagggagagttgtcgaggcggaggtcatggcagagtagtagatcatcttgttttgggtagacacaacggacgagcggacaaagccgagagagaacgaataagccgggtggatgagaacgccggtggtggaggcgagcatggtggccgacgagactgactgagtgttgttgacgagctgggaggccatagaccgggccagataaggcggtgggctagcaatagtggtgaggttgaaggtggagtttgtggagagcgtgccctccgaggcggacagggtgatattgagcgagcctatggagtcggtgctcgaaggttcaccgtagaagacgaggtcgagtggatcaaattggagccaggagggaaggttgtaggtggtgtaatttaaatcacgcgtcgaggccgaaagggaagaggtgaaagtgccgggaagaagagtgaagttgaaggcgtggttgacgtgagcgatgggaggcttttgggtttggattgggtagacgagaacgggagcaccggaagaggtgtcctgtgcgacgaccgacctggccatggacacgaccgacgcgaccgcgatgagccaggagaggatgaacatgggaagattgacgatcgagtaaggaaggggagatagaaggagaggacgacctgaagagacctgggctcttgaggatggtgtgaacgcgggtgaatctatgagaattcaagcttcaagctcgaagaaagagaaagacaaagacgcgtcccaaggaacagaacagaggaaggctatagaaaggatggtgagagaacagaaaggtgaccactggacggatggcaaagagaaaggaggaagaagaagaagcaaagagaggcgagttagtgaggaagctctcctgagtgggcgattgttttcacgcccacgcgtacaaaaacacacacacacgcacacacacggcaagagaacacactcaccaagcacctcacagacacagatacacgcacacgcacacacacaaagagacgtcgatgctggaacagacactggcgggtcaacttctcgagtcccaagacggagggagaagtgaaaagtgaaggcaggcgtgggcggaaggcgcagcagaggaaaccatcacaacaagaaggtgtcacgtgacgtgcacagctgttaagcaggctgtgtaaggggccgggttacagggttacgcaaggtgactgtagttgactagggatgctcgaggcgtggaggtttaggcttccaggctcagggaagagaggatgaatcgtgattgaatagcactggtagctactaggttatttaacaaggatcctaacttgaagaaccacatcttgaaggagcgcgcacgcgatccttttatgtgttctagctacgatgaagtggcaaccaggtggccactcgattactaaactacaggattatcaactagagattatcaagcaacagatcactaatccatatcgctaatcctatcactaatcaagggaacgtagctgagaaggattatcaagcgcataaggtgaggagaaggagcataacgaaatggaaggcttgatgaataatggaatgtgagcatggtcacgctgtcgtgtatatgttacctaactctggttcctgacaggctgtgtcattcaatgtggcaaggtgcccggcatgtatctcctgggggaacatgcgcggaacacatggcttgtagactgttcgccttgtaagagcttgaggttctacctttgcgctcgcctctttatgagttgttcgcgttttgttctttcgatgtcagcgtagatcaagtctttcagatgtgctagtcgctagaacgctgtgagcatcagtcagcggcgctgttcgttcatagtatcgatgacagcgagtatatatgggggttcgtaaatcatcagacatatatagatatacaagtgaactcatacagacgatctctcagtctccgcaagaacatgcatccagccctcgtcagtatcagtagggcaagtttgagccgtcgtagctcaaaaactttcctccatgagactccctagtagcctcgttgacgaccttgaggatcgcttccgcactttcctcaaggctgatcgtttgatttgcaaacggattctctttaccatcaggaaacagttttttcacgaccgcatcaaacatatcggttttgacggtacctaatgaagagaaggaacgaagaaagaaacagtcaagtttagatattttttttcctctttccatctaattggagaagcgtaagcgcgcatataaggagaccgacctggatgcagagggaacgcgataagtccgaagtccttgctctctagatggatcttgacggttgcatagttgaccgccgctttcgatgtgctatatattccaaatggcttgtcgaactgaggagccagttccaaggatccagcgattgaagagacgacaataaatttggctgcaaccttcgaggcccgaagaagtgagtagaactccttgtagagcacaacaggtccgaccacgttgacttcgtagtgggcggtccattgcgcaggatccgactcgtgcacaaattgggcagcttcaggagcaccaacacctgagaacgtttggtggatcaatacaacatctcgtcagtaactagtttcaatcagagtagctatttcagagtgttacgccgtcgaccagacaacgttatgcattcacccgcgttggcgatgatgacatcgactctgccggcggccttcttgatctcctcggctgccttgtggttgctctccgtgtcggcagacacaaggccgataacgttgatcttggcctggctgctctttgcgagctcgtggagggcagtcgccttggcaggagtccgagccccggcaaagatgacgttggcagggttgctagcgagtgctttgacgatgctgaggccgatccctcggttggcgccggtgactgcagaggcgaggcaaggtgagacaaggcgtcggggatggtgtgagcgcggtgcgagaagagaaacccgcagaaaggcaaaagagacgtcagaagagaagtcagaagagaagcaggtaagaagcacgcagggaagcacaggactgaccgagatatacggtggtgtcggacatggctgcagaggtatggcttgttggtatgatccgagacttgacgggtgatgagtgatgggtgataggtaatggacagtgggtgatggaacaggttgagtgacggaagacaagacgagcagagtgacggatgacggccagatgtacggtctcgttatatatggttgggcgtgttgagacgatggcccaatggtcaacccggtagccaactctacaagtctggttgaaatgtcgtccgggcattgcttacagatcaagcgacatgagccggggatcagtgcaggacccacgccgagacagatcggtcaaaggacagtgcttattcaatcacattcggtatctaggatttatttcgggtgatgctcggtcagttctgctcatccagcaggtcagcatgttctgtgatcaccgagcccgactctgtcgtgatagtctggggacccgatggagcagactgcatagctcagttgactacatgcgacttggtcaaggttgaaaaggcgatcgtcgattaagagttcgtctttgggcgtggccggtgctgataacgggacgggcaacggtatagatgacttgtcatgatctcgaggactgacggtcagaagctgaagctaattgatcaagttcaacgaagacaggagcgcaggtaaacaagattgatagtcagtacaaaaaacggggaccaggttagcagacgatgaacaagagcatagacgagggattcaggattgatatggactacgctgtgtctagcggaggaggtctgtcttttatctgctctatccggttcaaagactactacggtacatgctacatcatgggttgcgaccaagttcttttcagatcacaatccttataccggacaatcatgaaggcgtagccatgcagattcatcgatgattcggtggagaggagggatcgcccaggggccagggcagggggagggagagggtgtgcagcaggtgaagcgcagtaacaagcgctcaggcacagaactttaatccgagttccgaattccccttgattaggaacaactttgctggggcggatgtgcctatgacaggaacggatgaacgcccagtaccctaacgagttttcccccgccccgccccggccctggcccaaagccacaaagggactgcgggcgcccttaccagcagcctttctctgggtgttcctgggcagccctgagtgttcgttcggctgagcagaacacactacaatacacacaaggacagctctctccttgcacagccctgcgatccacctgccaccctgtcgatcaccccaccgctcttctgctcttcggccgagctgtagtcgctgcctctttgccacatcacgtgatatatcaaacacgtgaccatccttccaatcaaccttctcaccatccactcgatctcactgctctctcatgtctttgctcaccatgtgtcttcgtttgttttcttgcgctcttgctgtttcgatgcgatattctctgtagtgatggagctgctagtacgcgcaagttcgtactgagaatcgtatcgtaagagggtcatcgttgggccagaatacagactccaatacagtcccttcttcataaccccttccagtacctctggtgatgtccatcgatgataacgcatgccaaccgtgaaacaaatcgaagcatacaccgccagacccaccaacaccatgtccatactgttgcgctcttctaccaccacctcgctagtcaatcctgacactcccccagccgcccaacaaacgcagacgaaccgagaacacgcgggtggccacgtgggaagcacagctttccatcggctccctccctcgccgcttctccccggagatctctaatctttgagttccatcaatttcctttttctcccccccccccaaatttctgtcggaccatcagctttttctttcttttcccccaaagtcttttcccttcttacctctaactcgttctgtttcatctctttcgctggtggttctcttcctcctgtcatcgacccatcgattgatcgttcagtcgtctctttaacccttcttgcctttcctaaccatgcctcgcagattcgcagtactgatctactcgggaccgggagtgtcggctacatgcctcgcacaaaccactcactgcttctcccggatgctctcccagcactacaccgtctcacacctcacgcctcactctctcctggcggacccatggccagcatcctgtgcgttgctcgttctgcccggcggaagagatctgccctacgttgaacacattggcgcctacgggaacgcccggatcagagactacgtccagtccggtggctcctaccttggcatctgcgctggtgggtactatgcctctgcccacgtcgcttttgcccccggagatgccgagctagaggtcgtcggcgaccgggagcttgccttctggcctggcacctgccacggaccggtcttccccgggttccagtatggcactgagctcggcgcccatctcgccaacgtaggcgactcggatgtcgatcctgccctccaagcgacctgcctgtactacaacggcggaggtcactttatctccccccttccggatggtgccatgcctcccggtgcaactgtgcttgcaaagttcgttgatcacccagacaagccaaacgccgggatcctcatcaaacacggtcagggaaccgtcatccttctcggctttcacccagagtacaccctgctcacggagccactcaaaaagattctcgcctccatgccgaacggcctaaaggacgaagagcacatcctcgccgccgaggaggccagacttgacctcgtcagaggctatctcgctctcctcggtgtccatccgcccccgccgttgttgcccaggccgataaccagcactgacggtgcctccgcatcagacgacccagccgtcgagtttgatctcgaacacccgacgaagccgttgccccaggttctcatgacccatccaaagtcatccgccatcgtccagtccatcatcgaggcgctcagcccacagttccaacaaccagaagacgatcttcccgaaacatcttcacatcccacctctgtggcttccaccttggactaccaacctctcgtcctggtagacgccaacgatactctccatcactaccaatcctccaatcatccttccatcaaggacctcattcattctgttcggtcaaccccgctcaccccagagcaggccgccaacatggacgacctcctggtcaagcatgtcgttctgtgcgactcgcctgacgaccacaccaaggttatcaacgaaagatggacacccctctggaactggcctgctttctggaaggagctcgatcgaaagagacagccccggcggtccggtgtcgatcccaagacctggagactaggtgacgcaatgatgtatgccgaggcggtcaccagtacccaaaccatgctcgacaagtaagttcgatatacaatctgattgcgcctgtcgtacatacatcacgcctggtacatatctgcaaagaacattgagattttcatacgtcctaccttttaatcattttgcagaaatcccaaactgctgttggcgctgcccaccccgatcatctcgttcgcgagctaccaactctctggaagaggcagaggaggcaacgtctggctctcacccaccggctgtctccagttctccaccgtggtctctcttccctcggcccaagcccagaaggtcgtgttcgtccaatacctgatggctctcgcaatctgcaaggcgctcgatcccgcaccgaactgcgcccgggacgaaggcaaactccggatcaggatcaagtggccgaacgacgtgtacgtgatcaccgaaaaggacggaaaggaggaaaggctcaagctgggtggagtcttggttcattccaactggtgtggcggtcaattcaagttgatcattggtgagcttcatctggctttaaaaaaaaaattaaatctttgtccttagcttgtcatcttactaacacctcctatcgtctttaaaaggctgtggaatcaacatccttaacgagcgcccaacaacctcgcttgtctcgcttgtcaaagactacaactcgaaaatcccggccgactcatccgaagaactcatgcccctacccaccatggaaagctgtctcgcccggatcgtcgcccagtttgaaaccatgtgggacatcttcctccagagtgatcgtggcgggttcgcagagttcatcaaggattacgaagaccggtggttgcattcgtgagtgtttttcaagtcctggtggaagctagccatcatgagcgtgttgcttccacgtctgacgaagaacaatctgaatttatcctcctacgcagagaccagctcgtgcatctccagtcgaccaacccgccgacggccgtgcggatagagaccatcacgctcgactacgggctcctccggaccaggcccgtccggaaggttgactacggaggcgagtacgacgcattcgaccggctgagtctcgcaaagaagaagaaagcgccagagcccgagtttatcgatctgcagccggacggaaacagtttcgtgcgttcccgagatcttctcttgctttctctctttctttcgtccaatgttccttttttgaactcgtgctgatcttttctgatccctttctttttattttcttgtggctgacactttgatgatcatctgtgctggtaccgaatctaggatatgttggccaatatgatccgaacgaagtaaagaacatgagaatgtgtgcgcgtgtatgtgcgtgtgtgtatcgagtagacttatcagaaatgagcatttcaaattcaaaacactcgaggtctttgttctgtcggtctcatcagacgggacggacccaggatgatttccgactgtacatgacctcgtctgactcgatagcccttctcttgataataacatatattccctctcaagcgcgctacaaaagagggagaaaaaagagtatactgtacaaagagtataacacaacactaagcgcaacagattgaaaggaaaatgaaaagcggacagctgctaatcatccagatcggaattcagatcaaagtcaaagatctcgtcgttcatctggggtcgatttgtcgaaattccgttcatcaagtgagacggcaaaccggactgtaatgtctgtccgtcaggcactattcgagaggaaaaagaaatgcaaagaagagtgaggactgatcaggacgagaagcaatacggcagcaaggcaaatgggcatgggaacgaaccttcagaagtgacacctacgacccccaagccctcgcccagcccaagtttccctctccggagcgtcgactctggcgggaaaggcggtcggaatattccactcggcggtagcgacgggtcgaacgagggcggggcggacgtgtagggcgcgagagacgaggcatatgcgagcaccgtcggtggatcttgtttgtctgtacggtgaacgatccgttatcaccagatatcaacacggtgcctacagaagatgacctctaacacacaagagagaacacagtgggcggaaagacgaacgagtgaaagctgtatcgatcgaccgaacgacctccttcccttcttccactagttctctcaactctctcctcccgctctccatctcgatcaacaccttcctgttcccgacctccaaccgttcgacctccttcttcaatcgctccaaccgactccacttttcttgatggattcgagcccgttcacacagcgtagctagcgatccatcgagcgcggcgagctcagaatggatcgtatgcaacggtggaagatgtcgactcgcctgggttgggacagatagatgcgaagctgctgctatcaagtgaggcaagagtgagatttgacgagagatattgtcgatcagcgatgtctgaacagagattggctcggacgtctgcatcctttcctttcccaaaagtgattcgcgacagtcggtgttgtatgtgttgattgtcgtcgtcgtcgtcgtcgtcgtcgatgatgaggaggaggaaaagatgatggttaaacattagaaaaaaataaaaataaaaataaaataaacaaaatccgaaatttccagattgtcaatttatttttcatccaagaaccttccatcatccggtgtgcaaccacgtcccaacagcccccttacattacttatcaatggagccgacaccggggaaagacgttaaacccaggatcccttctgcgtcgtcgtcgtcagcagcggcagcggcagtgtcagcagcgaaaccgacgatcgtagggaacaccgtgcccagaccttcggctacaactgccactactagcaccagctcgactggtcctgccgctcaagctgggaaacccaagatgatgttcaagcctgttgttcccgttcgaaaaagaaccgagtatgttcttcttttttctatgagttacctggagttcctcttgcttcacccttcgtaccgctctgtcacgtcgtcgggccggatggaagaccatagtgacttcattgtcgtgcaccgcaaaataaggtaatcaagactgaaccggacatgcacaaactctttcttcaaatgaaccaaacagaacggcggctgtccctgaaccgacggcctccatccggacgaatgaccgaactcgaggcagaggtagtcgaggtggatctggagcgtctttcagagggagaggcgccgctagttctgccagaggtggaatcgcacccatgactgccagtggagtgttctccatgggtccaagtaacatcagttgagtctataatcatcatttatgtcttttcttatcttgcatgctcatcatttaatttcctttgcttcgctccgcttctctcctctttcggacattatcccctgacattacaggaagcaagaaatccatggtccgaacgggtcattcggcaggaagcatgctcgagcccggccaagcaccggtctataaactaccagaagacagaaaaccaaacttggaaggggaggaagaatattctgatcaagaacaaggagtcgagatcgttgacatggggcatctggagagcttggatgtcttggctccgaaagggttgaagagagacccggtcagatctagctcgaggaaagaaattaaacgttcgttcgaatattctcactctcctcatcctttggcatgtagatacttcttgccttgttatatctgctgatatgaacatcgaatccagaacacatcaaaggaaagaacagagcgcccgataccgatcgaatggacgtcagcggcgatgaagctgacgagttggtggacgagattaatctcggtcaagccttggatctgagcgagagtgaagacgaggaagaacacagtaatgttgctggtgacttcattggctgggatgggcaacctgttcgtctttctctcttcctttttttttctaccgctcatcttgcttttctagcttctgtccttcttgggtgacaatatgaatagagctctgacgatttgctacatctttcactcgtcaatctacacaggttccaccagatcagctttactttttccaattcccacgaacattccccacgttccttccccttccactttcagatccctccagcgccgaccctctcaccacctccacaagcccaaagaaatccagtctagaaacctccgccaaagactctttagatgtcgacatgtccgagaagaagcctagtcgagaagcagaagtaaaggaagagaaagaagagaaggaaaggatgcctgagggtcaggtcgggacgttgttgattacaaagaaaggaaaagtgaagatgagactgggtgatggcttcttatacgatgtcggtctctttgctctttttctttcatcatcgtttcctctaccttctgtcagctaatcaagtttctgacctcctcctttttggaaacgccttgctcgatgatctcagatcaacgctggatcccaccttgactttcttcagcaattcgtcaatatcgaccttccctcaaaacgggtcaccactctctcttcttctgctcctactcctcgattcatcgctacgcctgacatggacgagctacttcgactgttgtccgaggagggtgatgcctcgtctggtggaccgaacggaaagagttcgaatggaaagagaggaaaaccaaagggtggattgtcaaagaccgaggtggaaacagaagaggacgggttgatgacatttgatgcgggaagtgatagtgaatgattttatagcttttcgctcgatctcggatccctgtgtttgtgaaacatcctgtacatctttcttgtgtgtctagtccctctatctggggtacacgttgacatccaacgttgaaatttgggtggaaaaaatacatgcaatgccaaaaacagttcgtccttcgccatccccgtcgactcctctgatatgcgacgcatcacgttatcggtctgtgccattcacgcaaacgaatgagtatggacaaagatgagtcagttgggggcccctgaggaggtctctgattgaaataaaaatcaactcacaaaactccataacgtcgtcgcccttcctgactgtactcttgtaggattcttcgaagtctaaaggcagaattacataacggttcttcctcaccgctgttacatgtgcaaaaaggaaagaacgtcagtccaatcctacgtgccttctgaacaatagaggggggagagaaaacaacagaccttgcaaaccagctccctgacaaatactagcaatctccgccgatgataacttatctggtcgctggacatctatgcgtatgccctctcgaggtcacggttagtaatcttgcccactaaagtgacagaactcaagtgaggagaaagagcacgaacaatcttccaggtcgacatctggcgccaagttcatcgttgatgttaccgtctggaaaatcaatcgcttctctcgcctcgaagggttcgggaattcaatcttcctgtccaaccgaccgggtctcaacaaagctggatcaagcgtgtcttgtctgttcgtggccatgataacctatttgatttggtagtactcgatagtatcagttacgattcaacaaactcgagaaacaatggagtattacgcaccttgacattggatccctggtcaaatccatccatctggttcaacaactcgagcaaaatccgctgaacctctcggtccgctccggtctgagcgtcgaatcgctttgtggcgattgcatcgacctcatcaatgaaaatgattgctggtgcattttctcttgccaaccggaagacatctcgaaccatacgaggtccctatagtacaaagaaggcggctcaatgttgagcaagcgttgaattgcacctggaagaaattctagaaaagactgacctctccaaggtacttttgaacaaactcggaaccgacgactctgatgaaagaagccgaggtcgagttcgctactgctttcaccagcattgtctttcccgttccggggggaccgtaaagaagaacacctctaggaggatctataccgatctttttgtataggtcaaactatgaaagaagtggacagtgggatcgaaaatcagaagaagtcaggcgatagcggcaataaaatgttaaatatagacccacctcagtgatggctaactcgacagcttctcgaatttcctgcttttggctgtccaatcctccaatatcggagtacttgacatcgggccggtcttctgctcgcaaaagagtgattgatctacgtgttgtatgcaattaaagtccaagagtgggtattgcgatcagcatacatggcccgatattgacattcgaacggcagagacatacgaatcagcctcaggaggcaggatatcaaccaaactgtgagaatgcctgtgaagagccacagaagatgacggcttgagaagctctcggtcgagcgttgataaaattcggaccacatagtttgatcctgtcgagccatgtattaaaagcatcgtccaagtcagccagcgttgagatgaagctgagataagtataggtgaccgacctgttgtgcttcctacaattccgtacttctcatcgatagcctccaagaattgaccgatcaccagaggaacggcctacaaaccatgggagaagaaagtatatgagcatgtaagaatgatagatggcaaagaagtagcgaaacagagacactgccgaagaaattagctcgtacctggatacgtttaacttcttcttgagctcgaaggagctcacgacgaaggttgtgagtctcgtagatgatgtactcctggagatagcaaaacgtggaaccggaaaaggttgagcattcgtggagtctgaggaaacgatgatgatgatctttggctccctctgtaatactctacatcacgcttgatcgcacgcccttcgttgatggaagcgtgaaccaagataccaccgtcaccattcattcaattgtgttgaccgacatcgttcaaatgccaactgccacccagatgtcggcacccaaccatacggagcggcctgaacaagtaagaacgatcgaatgaagcactgcaaaacgaacctcttggagatctagaaactcttcatggccctcaagtcgcttccactttgcgtaaagctcctcgtcctgttgaggaagtgaggcgagcaatttggatttttcagataccactgcaggaaacgttgggtcctgcttggacagctcgatgccaatctcttccattatatgcttagtttgatgacagttagaaggaaggttgaatggcttgaggtgttgtgtattcgatgcgagatgggtcggaagggtcaaacgaaaagacagagagatgttggtgaggtggaactcgagacactaagcctgacatcaagccagcgcgagactggcatgagtgccgagcctctaaatgactgactacaaatctttgtagtcacctattagagaaagattgtaatgatttatggaacgagaagaactacaactttttgtaatacgtccattacagaattctctaatgacgttctaccttctcaccatcacaagtacatacacttcaaagctgacctcagagcatactcacaaaactcatcgagagcacatatagacatctttgctcactatcagtcttttgggagttgcagttgctacagtttcagccggccttggtatgtctctcttgtctaaactgtagagagaactagcttgcaaactcatcatgttgctttcatcgacgagttggtgaacagtcctcgtccgagttggtcgtcagcacaacgcatcttgaccgaccatcgggaacccagcacttgtacatggccgcatgcttcggtctaacatcccgcctaaaccttcgctacactttcccttaatatgcgccgtcctattctgctcgctcaagttcctttgcttctcttcgtctactttctagccgcccggtcaccctttctgccctcgtcgacgcaacttgcgtcatgggcttgtcgaatgtcttggatgtccccatcctatatccacataactaccttcgacaaaaccgttcatcccatagccgataaatacaagctctttctttacagggaggttggttgggatggagatcatacagtgcgttcgtctgctatcttctaaccatgcgtgtgaaagtccttgaactcaactttgatttttcaaactgtgcaaaccaatctacaaaagccggacggtcaaccagtcttgtacataccagggaacgctggttcgatgatgcaagttcggagtattgcttcgtctgcctctcgtcagtactggactgggcccttcatttcaaacaaagcgttcatcgaaagaggaatcaaaccacttgactttttcaccggtcagaacccataactctttacattttgtgtttcctgagccacactaaacttgatcctctcatctttggaactcagccgacttcaatgaagcgctttccgcttttcacggcccgacgcttctgtctcaatcgaattatgtagcccaggcgattcctcacatcctctctttgtatgatcacttgccctcttcttctcggccgacatcagtcatcctcttgggacactcgatgggtggagttgtggctcgtcaagccacccttcttctctccgacccatctcaagttcatgtcatcttgaccctctccacgcctcatagattccctccggtctcctcggatcacactatgcagcagatatactcctctatcaattctcccgtttctcattcattaaacgcttctctgatctctgtctgtggaggatctgcagacccaactttagcgtctgatgcatgtgcgcttcctccttctggtcataacgaccgcgaagatgaaaccaggttgggggtctttacaagtgggatgattgggacttggactggggtcgatcatgaggccatggtatggtgtcatcaggtcagatcaaggattgcccggttattgttagagttcggcgtgggacctatgactgctagtcaaaggaaagaagtggcagtgaagtggttggtgggtgaaccgacaaaggctaatgatctcaaggctcaccaagatcaagacctcgtgaagaagagccttccttcgacagtcattcacgcgggcgaaagattcgaatctagcttatcttcttctcaacagacattcctttaccgcatccctccaaacagcacgacgtttgatctcttgtcaacctatactatcaattctatcggcgccgagtcttctccatcagctcgtatctttcaatgtgtatcgtctgggaaatcgcccatcggtgatatatcattaagatgcgctcagcttcaaacaacaagactcgaacttataccgccgtcaccgacggaccgagctgcattcctgcctggagaaggaattgacgagaaggagggtatggttttctttcagggaaagttagacaggtcatccaaggagaacccaggcgatcgatggatcttggttgaaacagacggaaagggatggggcgtgcattcttttggtgaaccagacaaggaatcacttcacgtccaaaatgatcgtccgtggagtatgttcatttttctcatattatacttctcactggacgctgtttctgtctccttgatgtttgctgatcaccgaacatcagagtttatttttgggggagttgtgatcgatcacttccagcgcgtcaatagcagattacatcgacaagtctctctaataaatgccatctctcactctttacttgtctacaaagtgtctttctctgggccttcatgcacatgtacgccataggctttgttttgatttccctctgacgtcgtatctgatcagtcttgttttatcatctacaagtggaagcttcgcctcttttccggcccttgctctcacatcatacgatttcatcacatcgtttcaaccacgaaaagtccttctatgccgatccgtcagccgcacctgtctatcttcactctcactcggcgggagtacctttctcatcttcctcatcttcgggctttgtcctggatctgtgggaagacccctcttctcggtgtgttaaagatgtctatggtagagtgaacgaagatgacgagcgacttgtgtttgtccaaattgatgtggaggctagtctggggagagtagcattaaggtacagagcagcggcactaggttggtcggttggtgttgtggcatttgtgatgggaatcagtcttcagcaattcaggtcgagtggttcgttctttcagcgatgatgtgcttgtcgcctcagtcattctactgacttcacgtgggatgatcatatattgcattcgcaggtgtatttccttcattcgtagactctatgtctttcgctatacggacctacaccgttcatgccattctcgcaattatttcccttgcctcaattcaaacaactctctctttcgtctttccaacatctcagcgaacctttgcgctcctattaggtgtgccagggctcatattcgttccgttccatgtagtctgcttgggggtctcaattggtttggtaaatgtgatgctcggaattctgaaagggtgcatttggctcggtgctcgaggattgaatatctggaaaggaggaagagaagccaggtgaggcatactgtacttttttgtacgcgagctcccccggatatcaattctgatgaacaaatcattataccgcaggtcgtccgagaaaaacgatgcatctttcacgatcactcggttcctcccgatcatcgtccttcttggatcggtggtcatcgtactaccttaccaagtcgcctttctggtcctctacctgatccatttccaaaccacgttctgttcctgctccctcaactcttcggtcaagactgccagttacgatgtctcatcgacagaatcggaatcggtttcgagaagtaattttcatatttccctgcttttctttatgctttggcttttacctctcaacggggcggtcttgatagtttgggttagagattttatgagtggttgggtcgaatggggagggcccgaccgttcaatcgtaggtttgatgggatgtttgttgatcgtagaggtttgcgcgagaggtgggttcttgagaaatgaggccagaaagaggtttgtcccctgattgtcacaactcatgtcctcaaactcaacgctgatagacaacctacatgtagcctgctcgttcaagttctacagatcgggttcttccttctttccgcatgttcgtttttgattggcagtcaacatactttccggctctacagtctgtcgaacggtctcttggcgctggcggcagtagcttgtgtatttacaaaaagagcacctgaggtgtcttgaaactagattttatgtatatgtacaaacaaacgaactatgaatcatacagcgatcaacgaatgtaagaggactcaccacgaagtagaaggcatgtgtggcagacatcgatggattcggatatcgccgactgtttaaaccgaaactcaactgataccctcgcgagccatacatcgatcatcatcttccattcaccatctgttgccaatcatccaatccacttcgtttacatgtacggcctaaagcctttcatttttattgctctaccgatagcggcatcggccgtaactcatcaggatgaacatcgattgattcgaggaggagtccctcaaatcggtcgactgcaacatctgatcaatgttgatgagcaagtcaacaatcggccctctgcgaaatcatgggacgatgcatcgctgtgagtcttagcctgttcaatccatactcaaacatagcaaatttatttgaagatatgatttgtcctgataatgatcgtctgtaactttggggcgaatgaacgaatgaatgagcaggcaaaccgttttgtccgctaccggagctgtgggggagaaggaatttcaggctcattgtttttatcagccagtctctcattttatccctgaaacagacgatccattctacagggatgcagtaaaccagactttctgtcaaagatactggtttgatctggaatactatcagcctggaggaccggtgttcgtgctagatggaggggagactagcggggcgaatcgattggacttcttgaggacgggaatcattcaacggttggccaaagtatgctttttccgtttattcatcccttgtcttccttttatgtcacatccctcagctgatgctgccttcaaacctctgtatacaggaatacaacggaatccctgttgtgcttgaacaccgatactatggttactcattccccttggggcccaagtccaacctatcaaccgactcgcttcggttcttgaacaacgaagaagcgttggaagactcggccgagttcatcagaaacgttcaattcgacgggattcatgaagatcttactggaggaaagggtaagaagacaaagtggatctactagttcgtccatttctcgcttcatcctccttcttcatccatcgacttcatatccgaaccgtacaaacacaggcttgaagctgacttgaccgttcctatagcggtgggagttacgccggtgccagagcagctcatatgagaaaactctatcctaacgaggttttcggagctatcgctagttctgccgtcactcacgcacaagtctattaccctggtaggctcttgtcttcccctcgtttactcttcattacccctagttggtccccaaggctaacaataattttatgataccgatccaaaattatacagaatacatggacgctattcgagtttggggtcctcctgaatgcgtgcgcttcaaattttgtttgccatcgccacatgaaaattgcattactgatatattgtacttttatcaatagattggtcacattgaaactgttgttcaggcagttgatacgacgctggaccgtgcgtcttcatcgaagaaggcagctcgccgtgctcaacacctcaaggctcagtttgggcttgaagatctggaggatgacgagtaagcgccctttctctctcttttctaagattcctcgagatatcacacagatgtacagacaattcggttgacctttaccatataactcaataatttcagctttgtttcggtcctttctgagcccttgggttattggcaagcccggaactgggaccccgaacttggttccctcaagttctatgagttctgtgatgcgctcaagaacgtttcccttggctccaccgaagttgtgaaggaagttttgactgtggatgagttgattgcgaactatgctactttcatcaaggtattattcagttttgttcctcttcggtttttttttctttgtaggcgagcctcgttagtctgacgcggagaacggatcgactgtgatttctatagaaagagattcagtcttgccctgagaaggacgataccgcctcagtacaaacaggaaagaaaaagaaactggacgtcgttcaggtgagtccactttccaatcatcgaatgaaaaaattcattttctcgataaccatcatatgctgataatcatacgattgctcgtttcatttctgcatggtaaaagtgcttcggaacacacgatgatgccaagttccaagatgttagcaggatgcagacttggagagcgtggtatgtacccgtttctttctccccaaagaggtcgcgtctgtttgactcagacccgaatgagttttcattttcatctttttcaggctgttccaagtatgtactcaatggggttacttccaaggcgctcgtaagtgaattttaatcattttttccagcatcatgatacgactaataagacaacacgatggatcaacagctcttgaaggacctagaatcatatcccatcggatcaacttgaattacacatccaagatctgtcgacaagtaaggtctttcactttcctatattgatggctcatcgtcattaagctcatcagtgttcgtcatgtgtccatcttcatcaggccttccctgctggagaactcatgactgtgcccgagtggccagatgtaagcgtggtaaacgatctaggggatttcgacctctctgaagatcgattggccatcatagatggggactcggacccctggagacctgcaactcctcaaagtgattacgcaaagaagagggaggatacagtcatcagacctgtcaaacttatccctggtttgtccttcattcaagttttttttttccttaggactaaagagctgatagaatctaccttcatcttttcgatttctttcatcgggccaatgtattgatagacgctgttcatcactacgatgaggtgagctgagatacagccaatcttctcctaatgattgatttccctactaactaggcgtttcgtcccgtgtttgtcagaatggacttgcgaaccccgcttttgagccagagcgtatccagaaagttcataaggagatgatcgacttcgttggagaatggttaaagagcgatgattgatcagcctctctgggtatcaggcgttttgaaatagtatagtctttttggtagaataatgctgaatgaatatgctcttctacgagaaagccgcaatgactgggatccaaccagtcttactctttgaaaccaaacaaatcagaatgatagttgaacatcatagatagaagagagatagaatgttgttgccagtcggagaaggccgacagttcaagtcctcaatttaaacttccatctcttcgcactttctcttaacaccatctacgagcattgatcctccttcattccgatactaacaatgcaaccagccgttatccctgcctcattcaaggcctttaacctggctatgatccaacttgggtcgataacagctaataaatcagcaaatttaatccatgcaaaaaagatgatcctccaagcgatccgaggtcaggaaacggtatctgaaaacgcggatggtcaggaaaagatcgatttggtgatgctgcctgtaggtcccttctatcaaaacttcgccagcttttctctcgaagtgagagattcgattgggagatgttaatttctgttgatccgtcgatgtctttaggaaatcttcaactcgcctactgagtcctcggcttatcgcaagaacgccgagccgattcccacaccaagtcctttatctcctattccatcctcacatctcccatccattgaggaatcgcccactttacatgtgtgtaaacgataagaatcctgttcattcaacatagatatgttgctcaagttggtgaatgaatttttatccgtctgaagctcagatgttatcagaagcagctcgagaacaaggcgtatatatcatcggagggtctattcctgaatgtcaagatggagaagaaaagctatggaacacatgtacagtatgggatcctcagggtaaacaacttgtttcgctttctctctgctctttgttacttctcttctttcttctctcaacattatcatttcctatctttacgaaatgtataggtaacctaatcgctaaacatcggaaaatccatatgtacgatgttgacatacctggtggaatcaccttcatggtttgtttctttctgagttcttaggcggttatatgctcgcgaagtctgtaatctcatctttgttctaatgcatgtgtatgtctatacaggagtcgaaaagtctttcgccaggagacaagataactgtttttgatactcgtcggtcgaactgcagttttcactatcatatgttgcatccacgctcggactcactttgcttagtttttttttctcaactaccagcattcggaaagattgctactgctatttggttagtttttgctttatgttattttgactcaaacaattctctgatctggattatctttctatcatcaatagtttcgacatccggttcccttctctgctgacctacattcttcaggtccatcccgacgtatgcgccttcctgcttccaagcgcattcaacatgacgactggtccccgagattgggagcttcttcagcgtatgagggctgtggacaatcagatttacgttggaatgtgttcaggagctcgggatactagcgcgcaggtcggtttcttctagatatgtctctgaaatttcagcacgatgttcatcgctcaacaagcgccatgcctttctttttcctcaatgaaccggatatacgacagtacgtcaactatggacacacccttctcgcttcgcctagaggagacatcatctctagcccgacaccttcagacgaaggagagtcgatcgtattcgccaagttggatccgagtgtgatgagatctgtgagggagggattgcctctctggagggttagtccttcattctttgcaacctctcactctgttcttgtggagaaaaactgaacacccgtcttgataatcgtaacttcttggtttctctgtttttattcctatcaacttgaacgtcaaaacagagccaaaagtacaatgtttacgggaaactagaggggggcgataaatacgcttagggagacaatcatggcatgtaaccctaacagtatttctcaacgcttctgtgcccacaatagcattaaacccaaccgtgggttttttctctcgtctcgctcatcatagcatcttgtaattattttttgtagtcatgacgtttactatcccctgttcgtagcgtacgtaagatcaactgatgtgtgaaaattaacccgaagtatgataaggtcacatgagagggttttctatatcacatcaacgatggaaggaagcaagcaaaacgaatgatgaattgaaaaacaaatgaacatcaagatatgaaagttgataacaagagtataacccaggaataagaaaaggattgaagaagagaacagagagtccaggtaggttgccaagtctaagctccatcggcacctagatggaagcaaaatataaaagacgtcaaaatgttgttgatcgaagctcaagacaaactggcaggcgatggttgtagaacggaagaggagtcacttaccggaatcgtttgtgaactgaatgtgtttcgtgatatcggcttccgtcaccgttggtcgtgtctgtgataatgatatatattgcacgaaaaaaaaaacaaattgagtacagggacatgaaccgatcaagcgaaaagaagatcagaagatgaggaacacggaccgaagaaatagctctcaagaaatccttcattcccaagattggttcttgcagttgatctccgtccacatcactccatgtcatctcctttgcttttggatctcccggagaacaaggcgtaagcttggtgatggttttttccggatcttctgccgagggggcttcaacctgtatagacaaaaaatcgaggcaccaattcctgataaacaaacatgtacatccaacagtgtttcgctagagaaaacaagctcaaaagacagacctctttaaagtgggttgcactcaacacttttctaacaggctgcattagcgcgtctctcacgacaacagcgatgtccgatccagagtacctggacaatgatagagtcatcaatgaacggcgtaagtgacggcttgagcaagagcttataccagtgctcagctgactatatgaatatacaaaccctttcgtctgatcggctagttgcctgtattccttctgcgtcaaatcgcaaggagtcgtgcccacattgagttcgaacattcgctttctggcttccggatcaggtagcggaatgtagattcgtttctcgaatctatgattggaacaagcaaaggaagcgaaattaacatcagaccggacaacgtataaggatatcagagagtggaggacagaccgtcgcttaattgcggggtcaagctgccacgggatattggttgctcccaagataaggacacccgtctcgtcgtttccaactccgttcatctgcaccaggaactctacagagacaaagatggcacaaatcccatcgaaaacatcgaccagtcagaatgtatacgattggaaccggcgaggcgtaaggcgagagaacgacaacctacccgtcttgattcgccttgaggcttcactctctccttctcctctcgttcctgccagcgaatcgatctcatcaataaagatgatactcggttttgcctctcttgccatctggaacaactgtttcaccaatctttcactctctcccatccacttgctcaccagatcactcgagctcacactgaagaacgtgctttttgcctcggttgctaccgcttttgccaaaaatgattttccagttccgggaggaccataaaggaggattcctttccacggagttcgtttgccagtgaagagatgaggaaacttgataggcaggatgacggcttccttaagggattcctttgcctgctcaagcccagcgacatccgtccatttcacattcggcgtctcggacaagattgcacctggattagagggagcgtttgggtaagagtgttagtgacaagctgaatcaagaaattcttaccagagatggagtgcgcacgtactgcttagcccggctcgaagtttctttgtctctgcatcatcctcgtcatctttctttcctccacccccacctccgttcgctccggctccagccgacttgcccgacccatccgctccaactccaacccgcgctcgtttctcgtcggactttgtgaggtgctctttaagtttttccgctcgatcaagatattccgtgaactttttacgaatgagctctttgagcttgtcgttcttttcgtctgttcgtgaatgtgtaaagaatatcaatcacccgccgcttgaaagagcgagctgatgtgaagagagaagattcatcctacatttcatctgaacaagacaaagaaaatcaagaagatttgagcaaagtctctcttgtgaatcccagagcacccgaacagtgtatggatatgatatggagttcaagacttacagccatcataaagtagtccagcgagttttgatacctgaccaacccatcgatacaaagatgaacgaaacgtatcagccacaaccaaagtctcatcatctgaacgctcttctcgcctacttatgagcaacgctgctcataactcagggctgatatctccaaagagatggagctaacccctcgtggccctgagacgaacaccctgtttcgctttcttgatcgaagaaagcgaggggaagagagacagagcagatatgcgacagagggaaaagaagaaaacatactgcttgtaagcttcctcatagtcctgtttgacatccgcatcaatagctttctggacgatctcgattgctttctgtggagtgatatcgtttccaccgtaaacatccaccaacagtatccgtatcaccgatatcatcaggtcaaccggaccggagttaataaggtcagcattatgaaaaccaacacagaaatctgagcgaaatgaaaggacgaggagacacaggtgatgatcgacaggcagggatagaagacgatgcccttgccagtccaggctgaacgaatgggtagcgtagacggggatgaacaaggaaaggactaacgtcgaggaaattcgagttggacgacatgatcgctcgattgtattgagtaccaaggtagcagtagttgttctggtctatctacgtccggtttgaatgagttgatagaatccttgtctgcgaagagagagatacacaacccgcgttgttgagagtagatcgacagatgggagatttcgaaagaaagcgggcgagatgggagacgaccgacaattgaacgacgcgtgtcaaaagactggcgcagataaagaaggccacctagacctcatcattcttcatactgtttcccttccgatatactatttgagatccaaattacattatcatacaatatatacgtctatgcaagtagattgttgtagagggtgtggagatgaggagaatatatggagaacgatgacatatggaaaggatgctttatgcctcctggaacgaatacacgtcgcttcacctgactgtttctgcacttagatcgaccagacttccgtcaaaaggagagagtctcccctccgagacattcaactttttcctgagcggctcactcgactcctctactatgatgagttctggtgataggttcgatttttctccagcgactatctcgacctcgacctctacatcaggttcgacaagcgagtcaaacaacgttcgtttcagatgagtcatagcctcctcgattgatggaagcttacgatgtctgatggtcgtagtggatgagcgagaggcgcctgaagatgaagatggttgcataggaatgaacacaggctgttgggggcgcgagcgagaactgcccagatcggcccagtcgtcggtgaacggaagaggagcaatcatcggccgaggagtgttcaggtgggagctatcaggggacatgggtctggaaccatggccattcaaagtagcaaacgtgctcatgaaggagcgtacagagcaaacactcgctcgagatgacatcgaagtccgtcgtgaatcaaaatgctgttgcgaggagcaaagagcttgtcaggattgcatgattttctcaattatcaagagggttcaaaaggggcgcacgtatgtgtcatacagatcttcgacctcgacccaccaagcgggctcaccggaatcgaacgaggacgcatccgagaaagcgggcgacgttggtctcgatatctttataaaatttaaagagatagaggtttgtattggacaccggattacgaggcatgaagagaaatgaaaatgagattaaaaaataaagacttaccgagctagctcgtctttgcatacttgggcgtaccatcgggcccactttcgctacgactgggtctgacgaccttcgctctacgataaagctttcctgcctcatggagaagtgaaaattcaaggctgaagagcgacgatcggaagaatgaatggtgtgggatcctaatcctcaaaggttaattccaaggaaacagatgcttcgacaagattgtgtgaattagagtatgatatgattcgagccgatgtattgaggaactcaaagagaaagagagagagagagagagagcagatacggaccgagatcaagaacgagaaccaagactctccctctcttatatgcgaatagcaaatccctcgcccccaatggtttcggtgtttgacttgtgttggcatcatcaggctatcctgcctgtgtatgcatcagggccgatgtgaagaagaggcggagggttccttgcttccgtttagctgttgccctgatcggtccaggggagcagagcaggaatggataatgaacgacactcagcactcgacggcggtggtcaatcagccggacgggccgacgggcggatgttgtttcttaggttccttccgatcgtccctttttaggataaggttcctggtcggatataaattcggttggagtgcctgaagattatgtcgatcgtgacgggttatgtatccgatgtgcctctgttgagctcgaccaatatcaggtgcctgagcttgccatcctgacgacaaatcggttgaggtcataggaagcccagaaacggagtgagcttatagccgttcgacgtaatctctgtaccttcatcgaccatcagtgtctgggtcgtcatgagtctcatatttgttgttggtgatgatgatgatgatgatgatgtggtctgaaggccgggtttcattgctgttgtcatcataaggtaacatgtgcaaggtcagcatctgttcgacatctcaatggtcagtatgtatgggatcatccatctgaggtcagtgtaggtcgtatcgtcaacctgtgtcgtcagtctagagaggttgtttgggcttgttgggaggagtaaagaaatcgcaatgctcccgcctgaatctcatctcttgcctttcaacacaacgcctatccacaatcattcagcctgccttgctttcttcgttcttcacaactcacacaaacacatacattagatgtctcatcttgctatccttgctcgtctcgaactccttcacgcatctactcttcttcgtctttccggtcgaccggaaagatcgtcggatatccatgagagcatcgatcatccagacagtgttcttccagtgaccgaagattccgatcaatcgaccgccgaggaagcatgggacgaagtcgcctcgctactgaaagttctcggagatggtctcagagaaggtaagtcattctctctgcctgattatggatacgaatggtttctctgttcttgggactgatcttgcatctcctcggctgtacatgcacaatgaagaatcgctaagaatacctctcggcaagacctcgcttccttcgaccttggctgatttgcttcggttcgcacttgatagtccatcaacaacggcttctgatcggcttccatccccagtacctggatgtcctcaagggaagaaatctcaagcgatcgtagagatctgtcgagtggccggaaacttgtgcttcgattgtggttggtccttgagctttccattcgcatccgttcaactgatcgatcctaaatgcactcaggttcttcttttctatcacaaatccaaagatgaaaacaggtcgattcttctagagtattcattcccacaaaccctaatcgtcctcattgcttccatcgcctcaacaatagattcaaacgtgaaccttgcaaaatccgcgctaggagcgcttctcaacatatcacttgatcatggtccgtttcccctctatatctttgagccttctcagatgttcttggatctatgtataccaactatgtctgctgcacgctttagaccagactcagactgctatcttgaacatggaaggcgctctagaggtcttgatcaaggcagctaacaactgctacctacccgacccagtcaagggcaacagcagtgcggacaatgttgagcttcggagagcgatctctggatgggcatggcgggttgttggagaaatctcgttgctcggtaggtgttttcgcgctgatcaaagagatagttcaagctatactgacgaatctcctcatctccttctcctcaaatcttctgacctgaatcgatagaatctgcctcgactgtcctctccgctcaagccgaagctctgttcccacacctggttcttcccatattaacctaccttcctccctcttcatcgcccgttccgttcaagccggaagacgttcttattctcaccaccgccacccagatcattgaggctaatactctcgattccgagtcctggcaacacacgctcgctaactcgcgcgcgtctcaatcagaatcttcagttgactcttcacctgctccgggtccatggtctattcaacagaaagggagagagtcagagaaagaagaaatctctgtgtggagcctgatcttagatttcgtcgagggtgtctacatcgctcccaaggaagagatcacggatcaggaggaaagagaagagcaagaagaagaagaggaagaagagattttgagcttgggtagcatcaaagggggattgatcaagagcatagtcgccgtcgctggctcggatgaattggcagaaagcttgtttgaggcgcccggacgaacaggattcttgggtcgcatgaaatccttcttgagtggagggaatgtacaggaagacagagaggatctggtcatttgtacgtgttcaatcttgtttcttcaatttggcaagcatgatgttcatcatttcttaaattatgttacctgatacaggcgcggtattgagtcttggaaacctcgctcgatcaggtcggtcttcttttccttgtttttttttttcgaggtaacggatcgtttcaagctttggtcaaaaagattaacatgaaaacgtgtttgttgtaccgccaaacaagacgcgcgatgcgcctcgcttcttgaaccatcttcttccatcttgccctcaatcctacctttgatggtctccacgacggacatcaaaatccaacatggacttggtcagtggttgaatgttgtctgataatttgcgtgagaagtatgttgaccgagtgattcttgcgcttcctacgtatacacacttcagttggtctgcttaagaatctggctgtctgcgatcagaacaaatccattctaggtgaagcaggtgtaattgaacaaatcatccagatgaaatgtctgcaaccagaacgagacacagtcagttctgtacagggcggagcaattggcgtgttgaagaatttggcaaagaataatcgttcgtaatatttctctcatcttggaacgcctgttgtcgcgagttggaaagcacctgcatatgctgacatcccatcatatacgaatgacacatgggcctcaaaagtttcaaactcccttcgaatcctctcaccgccatcctcgacagacgaagccgctctttcctccattcttgcgtttaacgcccgaagtgacgatttcagcctccaagccgagtcggctcgagttctcgttaacgtgatccgaaccctactctcctccccacacaccattacttcagaacctaaaccagagtctaaaccagacaccaacacaagcacggacgaggtagagcgagtgcagatcgcaagaggagtgttagttgagaagaaagacgagatcacaaaggcattgatcgggctgatcaagggtgggattggaaagaagtacgagatactctgcgcagagggtgtaatggcgctggcgatgttagccggtagctcggaagccatcggtgcgttcttcttcgtcatccttaccttcttcttcctatgacagaaaaagccttaggtgattttcgtttttctttgggtgaaaaaatcgatagccaaaacaataggggccgctcttctcgaaccgatatcttcaacatctcctcgcgccgaatcaagctctatcactgattcttctgaatccagttccacagcaccatcagctgtcgcgtcgacatctgtgtcgaaaaactcagcgaccctgcttgatgagttggctgttcttctttctcttcagccccaacctcaatcaatttcttcggaggctttcaccatctcacctgcgttgaagggaaatatcagcagcctgctcgccatttctggccgagctctttcctcagatggttataccaagggtgacccgagggagcaatttgggaaggcgttggagagaatggcggtggaaaatacaccgggggggatggctgatgtaaaggagaaggcgctaaagattctccgtgattgaacgatccaaatgaatgggtaaaaccaatcttcatacgaatggattctatcatttgagtacaagtctctgatgtatcttaggtatgggacatatataagggacaccatcatataattctctatcaaaaagagcgtgcacgtgatgtagaaggagatgctgaaataacatgaatcagttgctgatggccgcatttggatctttcataccaatcagatttctgaaccaatcggtttggatgaggtacttggaaatcatccaaagattgtagcttaaacctatcacctgattccgagatggaaagatacatgcaaatgatcagcataatcattctttcttgcccaagaaccttcgaatttgaaataaaaacaaaaagaagaagcacaacgtactgagatgagcaacgaagtccaaacaaaagccgttacctctcttctacgtcgttcgtgaaaggcccttatctcgccaaagccatcatccatattctcgatatctccttttcgaaagattcttcgatgatattcttctatatcaacaaattgcagtcttttggccagcctggaatctctcaaggcggtgatccgaatgcgctgttgttcatccttttcgtctagaccaaggatctgctgttttatttctgaatgatatttaccaggcatggtgattgagcccctcatcggacttcaagctacgcagccgataaagtcgacatccactcaccgaggtcttcagttggcctagatgttctttgtcccattgggtctgttcttattcgtgataatgtttgcgtgtctttctggtgtattttatgaactcttgatagatgatctcccggtttatgacctctttatatcttcttgattgtcaatgccgaaatcaccatttgcgataaaattcggcacgagctcaaacccgctgatcgacgtcatgaactttatcttgccgacgtctcaaattcatcttcagctccctccatctagatatcgacaccttggttctcttgaactcgtcgttcattcttcgatgcgctcatcaacttggtcgagattgaagaagcaggaacaagatctacctttcggtctgcattaaatcaagggcgtatggaaattttctagatcttgactcgagctttcttgtttggtttcttcttctcagcctcatccaccaccgtcacctccacaccctgctcgtcatcctcttcatcctcactgtcaaacccgctgtcgctttcactatcggcctcgagctcatcgtcaacgatctcacccatcccctcccaaacgtcaccttcgtctccgtcttcgtcctgctcgtcctcctcctttgcatcctccaacgcgcgtttctggtgcgcagataacggtttgatgatccgtccttcgtcggccaagacgctctccgagacgccccaccctcgttcggttccctcgggtagaaggactggaccacccgtggagccccccacgcgagctacggtgaatcctttttcgggagtcgctttagggttggcagggagcgggttcgtcaggttgatagagatcgttccgtcttgagctagagagagtagggtgttgggggaaggagttgatgagagcggtaggagggatgtggcggttgaagtggagcctaagaggtttgcgcgcgagagagagagagagagaaagaggagttcgcgtgagctgattgtaaaccaaagagaagacagggcgagaagaaaacggaaaggaaacagaactagaagcacaaagaaaaaacataccagagataaagtaaacgacacgacctgtccttcggtcacaaagtcctactcgaccaccacctgccccggtctcaccgaaccatatctcgttctctcttccttctgcccacgatgagacgattgtaccaacaccacccgttccacctgaaggggggatgactttccagtcagacgtaggttttcgttgggctcgggggtcgtaagatcggatgtgtccggaagacgttccggtagcgataaggggaagagaggaagaagcagaggaagaggtatcgttaaggtaggtcaggcagaggtgggagatggcaggtcggagaccaagattgtcgttttgaatcttatg

SEQ ID NO: 2057 - DNA, 567 bp, Xanthophyllomyces dendrorhous
ctcatgtggcgggcctggcctgtaaggggccgggttacagggttacgcaaggtgactgtagttgactagggatgctcgaggcgtggaggtttaggcttccaggctcagggaagagaggatgaatcgtgattgaatagcactggtagctactaggttatttaacaaggatcctaacttgaagaaccacatcttgaaggagcgcgcacgcgatccttttatgtgttctagctacgatgaagtggccacctggttgccactcgattactaaactacaggattatcaactagagattatcaagcaacagatcactaatcctatcactaatcaagggaacgtagctgagaaggattatcaagcgcataaggtgaggagaaggagcataacgaaatggaaggcatgatgaataatggaatgtgagcatggtcacgctgtcgtgtatatgttacctacctctggttcctgacatggtcggcaaagtatggtcacgtgacggactaggcagtgacttgggcagtgtggccaggcccgccacatgagacgtgacctggatgcggtgtcgttacaca

SEQ ID NO: 2058 - DNA, 11055 bp, Xanthophyllomyces dendrorhous
acgttttttgctcgccaaacctctccgggcaagagagcctctttattagcctttgccttcttcttatttgtctcttcggtcgcctttcgtttcttggagtcgactccatccaccacgggtttttctgtgaacgccctttcggtatcccaaagactgacgtcgacttccttacccgcgtacgcaaagtgctggccggatgctgtcggcctgagtgccttgaggttggcgggcagccgacgagtctgaacggcagcagacaggtcggaggtatcaaagagggaaaggtatccttgtgtggtcgagtgaagaaggttgttggatctgataggttcaaacccaggacgcgcgagttcggatttcaggagcgagcccatacaaagacgaaacgaggtttagacaatgaaccggtcgcatggcgacgcgaaagtaacagcgtgcttacgtgggcaagaaatcaagagaaagatgtttgttagcgggcttgatggctgatgttgtatcgtagatcttgacgacctcaagcgaattccgtttcgatgcaggagcggatgagggtgagggcaggtcgacgagggatatgcatgatgtagaatgggccaaggcgagctaggatgacggaaccggaagaagctaaacgagatgagcacgtagagccgagaagagataagaagaagagaaagaaacaacaatcaccaattcgccatcctgcctgcctcgagagacggccaacgtctggacgactcctctgatggaagatttcttgggttcttcctgcttttgaacaagatccaaccgacggacgacgggattgaaatcaccgtgtttgagcttcctgtggttcatcgacttgtagggcaaactgacggcaatcagcgagccgggaaactctatcgagccggacagaaaactggaagccatggaacctgtttgctttggattgtgagtgttgagcgcaaggacggtaagaaaacagcgtccaaagttgatcggggaggatggttggggctttggaaatttcctggctgttgccatgacgaccggccgtggttacaacccatcacgccgcccgactacagaccgggactagagaatatctcgaggcaactagggaaagttgtagttgacgaacgaatagagaacgcgcgtagtatgtattacaggcagactacaaaaaacgtgaatcgtcagaaacactacagatcagagtgcatctttaatagagactctcgagaaaataatagggaaaaagaaaacgcaaaaaacactacaaactcatcccactcgcactacaacttcaactacaactttctctaatcgtttttcccaccacgcctcatcccgccctcttgttccggctcggaacttcatctcccttctctaccccaaacaacatcgacctaacaaacagcatacacatcgctttcaacccattctgttctgttctcttgcatccggatacacatactcgattcaatcccgatgagccgttaccaatctacaaagcaagacactgatctcctcgtggccctccaggatacggtcattcggacgccatctccttcaggcgaccgtggttttcaagagtcccagacctcgcccagggatgccaagtaagtgagctgttctgcgttctttccgtcttgttctttcgtctttgcgagtggctctctgccttcatcatccatccttcgtgctcttccttctcttcctgcttttcctgttcttcctgctcttcttgctcttgtttcttctcgcttgccaagagaaataaaccgtttgtcgaatctgtcggaaaagaataacaaacatggtggcatcccactcacacacgcgtcacacaaatgtcaaaccactcaccctcgaccgaccgaccaaccaaccaaccaaccatgtcctttctgatacgaacctcatcgattcgaaacgttggaactttctagaggctgtcccttcctaccaacagagacatcatgtcttctatccctgtatcccgcacttacaagaatatgagctgggctacatctctgtcctgtcaaaaatctatggcaaataaacacaacctttttcaagttactgacccagccgtcttctcatgtcttttggtgtcatctttccttcgcctttgttgtcacttccttttcatccttctgcccgaaacacatcgtccaacgcccatgtcagctctcggcgaactcagcatgatcaggcttcttctcagcctgtctcgaccaccaagacgtcgtccaaacaggcaggttccggccgatcaaaggatgatccgtttgcagatcgaccgagcgaaaagacgaaaaccagcaagcccaaagctccggtgcccccaagaaagagtcgacatgcagacgtgatcgatcgactggatcccagttccctgtggggtggaagtaggtccctacttttgacttctggcttcttcaaaagtgataactaatcccaccttcccatctcctgtcccgtccttgtatagcaatccatcacgagtccgcatatgatgccgccgctccatctcggaacaaggctacctcggctacggctccgatgcgggctttcgactcggctggtcaaccaacaaagtcgccaagcgggaatgcaaacgcaaacccaaatctatccacccttgcttcccacactctcgctcgtatgggatccgtcaagttcaacgagaacgagaagcctgactcggccaccacgcccacaggtgtcctcaataataacgatgacacgtactttgtctccgccctaggcgtttctggctcggagcccgcaactccttcggcggaagacaaggataggggtggtgtcgtaggtagaggcctcagactcatcaggtctaggtctcggtccagagaaggaaaaggtcttgtcggaggcgaacgacctggagcgattccgggtatcggcagcatgcccgctgaggaagattactacaacgctcgagcaaagcatcagaaaaatgcgttggcgaacgcatggggagtcgctgatccagagccatttgaggatttcggtcatatcgtacgtctttcagtccttctagataaaaataaacttggagtttggagaacttggtcgtgttgacagtgaatgtaccgctttctcgatccaaaggcaccgggagagccaccgaaaggagagactggacttgcctccgcttcgtcctccatctggaacgggatggaatcccactctgctagaacgaacgccggtggttcaagtggactttctcagaccgtcaagcaggacgtcgattctgacgaacaagaaacgcttgatcacgtcccaactgccggaagttacaatgcaaggaagaccaacggacatcagttcactcagtctacaggtgccggtgtgacgaggacaaagagtcttattaagcgcttcaaagctatggtctgtcctatgacatttttgagctgatttctttcctcttttccttcgtcgatccagcctctgaccgtcttatccttattgttttgttgctactcagagagagaacccaaacgtaccggtcgactcgaattcgtcgtcccctcgatcggaacatggtcctccgtctcctacggccggagttttttccacctctctacctacctctgccggactttcttcttcctcaaccgcccaacagtcgacaaaccaggcgcctgcattccagaggaaaccaagcttcatgaacagaatcggtcgatctcattcaaactcgtctcctaacgggtctggctcctgggcggggtcgggatcgggatcagggtcaggagagtcgccaaacggagttagcattcctttaggcaaagaagtcaacattggcactattgataactcttcgactgcacactccccgatccctccaaacaccatcaccactactactaccactaccacaggttcagaccgtttgacaaaagacaaatctcttcctcagactcctcgatctgatggtctgaataattctacaggcaacccattctcagacccgaaagagaacagacgacagccatcgtacagcaatacctcgagaaggaagcaagaaagctcggcgacctctcatacgagatccgctccgcctccaccggcgccgatcaaccttcctggatctggatctgatgatcactgggatctcccttctgcttcttcgcagggaggtgtttcaggtggggaagtaaagggtgctgggttgggccgaaaggcgagtttgatgaagagagttttgggtagaggttaacgagttttgaaccatctcctttgttgggttgagaattattactgtctatcgctgttttagaactgaactttgaaccgtatgcttttcctatgcccctcgttcatccctccttctttctctgttcttatccgtccatcaactcttgttcatttacatcattgtgaagttccacaaatgtttgtttccaatccaattttctcttccctttgtcctcaatcctacctacgcatcctaccggatccctccaacatcatcaaacttgggatggccatcctgtcctgtctcttatcctctccttctcatcgaacactttgttttatcattttattttgaaatcgaaatgtgactttcagcctatgtagcgtcttttttcttttcttttcttttctttttcctccatcttttcgttgactccgtcatcagtattaacggtgtgaattatcgttagggtgcggtgtgtatataataaactcaagatccaatccgttttctggcttccttctgcgtaatcttaaattttcattcgattcattgggaaaaactctagcgaaacacacagatgacaggctatcagaaggaaaaaaagaagatgggaaaaaatgatttagttcgtctcgttccgagatttggtccccctcccccccgtttgtctacttgaacgcattccgcaccgaaaacacagaagaaagttagaggacgcttggataagaaagaagtgagagaaaggactatcgatacatgacgcagaaattgttcgaggattggctataaaagtagattaaaacgtataacaacataagagattaaaacgataaaaaaacatcaagtcctcgggactgatgtttacatggtggagatgagttgatcgatcagtcacgagtggtcagcggcgcgcccagaggcaactcggtgttctcgtatccgactgcatctcgggatacaacggcatcggtgttggcgttggtaggagcagaggtggggccgggataagtggtcgtggggtacgttccactctgagcgtacccgttttgaacgaacccatactcgtatccctgaggttgggtcacaggaacgacttgtttcatctgagggctttcctggaaccgaggggcgacgacgccgttggtgacctgatgaccctccaccggggttcccattcctgttctcgtttcggtagtaggagcgtacgaagttcgggaatccatgccggcggctacacccatcttctcaagggatgattgttcccatcgctccaatcgccgcaggtatcgaggggaagtcttcgaggcgggccagagatcgaggagaagagtgaagaggtatgcatcaaagattaaactaatcggggtgcgacatcaagaaacgagtaacgagaggtcagtacgagggaacaggagaacgatgattcctaagataacgaccgtacgcgaccgtccattcacagatcgcagcagcgccagtgattctgttgcatctggtgatggctgaaggagaggcgctatagtccacaccacccgaactatcgacaacaagtaaagaggaagaattgttaacatgaaaagcataagacaggcatgtgatatggaagcgacctaccagatcgaatagagcacaccgaaagtgatggcgacgctgatagctgcgatcacaacaagcatcttcaacaccgagtttctacaaaagcccatgttcaccaatttctaatcagcactcagagatatagtacacgagaagaaaccggcgagaggtttgaacagacctcatgagatggggcctatcgggatggccttttttgaggtaaaagatctctaaagattggaagactgcagaaatagcgacacagaggataaagacacaggtggatgtcctgagatgccccattgagaagaaacggaagatgcggtgagtgaaagaaacaagtgacaagatcaaggagaaatgcactcaccaatggacggtagagtagttgtaggtattgaaggccgagaggacaatcaaagctgcagcacccaaaattccaaatatgattgccaagatatctgcaagcaaggagaaccgaaggatgattgattagcttgcgggcatagagcaagataaccagagctgactggacataccaaagatgacgatcaacttgtttcgttgaccatgcccaggaatcctgtccacatgtcgcagccatctttcggcaaacaaactgagaacatagagtgcagcagtgacgacgcagattccaatgaacagcttttggtagactttgaacccgaagcagaggcaaacgcaaaggctaaatatagggatggcaagagacttatgataagatcagaggatgggacttacttccaccgatgtctgaaataaattggctgtggacgtgggttgtagtggagaagatacataaaaggattcgtcagcgtcgacaaccgcgggagaggatggttgggaccggagaggccccgttgcaagacaaacgaacatgtcggcagagtcctcctgatatctgggtgttccactcacggcccctagaaatcataagagaggcgaaggaagattccagcgcatagaccaagattcaatgagtaaaccaggattcacattacggaaatggaaagaagcacacgacttacagagtgacaccaaagcaatcaatccggcgagccagaccaacgcggatagcagcgggaagatccagtattgtccgtaagccgtatgaaagaggaaaggcttcttttctcctgcactattggttggcctagaaagcatgatcttgatgtttcctggattgtaagttgatcggaaaggtcaaagaatggacggagaaggccaaggaaacaggaagccaaatggttaaactgcaagaagaagaagaaaaagtctttaaaggagaaggtcaaccgcggaagcgacgtcactctctggtgcgcagccacatccgcctctccgatcgcccacgtcatagaggtttttccgacgtggtctgtgctcaacattgccagacggtaatcaagtaaccaacgtaaatggttacgtgaatttgtgtgcggtgacctcggtgcaacattgcatgacccagcggaaagcccatcgagaccagaacatcaacttatacggagagataagtaaccacgaaagatagatagaaggactaaggaagtacggacggaaaggaaaaccatcaggcaacagacgagggtataaattagagttgacgatcattgaggactggtttcctataatggatacacgacgaatgatttttttgattttacagattaagaagatttccagagcaagattgcaatctgtccgagatagaagtagacgaagtgtttcgtttctgatgatgatataataagttgagaggagtgagtatatgaatacccccggcgttcttgctcatgacgttcgacacaaacaccacaaaacgtcactagatctcatatttgtgaagaatacataccatgtgtgacgaaggagccgtagctagattgaagtatcaacacaacgatagcaatatcaagaaaggtttgtggtgagtcaatatcaaaatctctcaatacgttaaaattcgatcttccagactacaagaaacaccacgttcttgacggtctgctagagtcttaggaaacaaatttgaggtatcctctctacatattgctggcttttgatttgcagatatacaggtgatcgaatgaacaaagggaaacttacttctttccgaccacacagtgccacgtgctcccataacgcctgtcgaactccttcttcacatgcatcgcaatatccttctcgatgttgtatttctccaaagccgcactggccacatcaacagcttcctgttgcatctcctcagacatgtcaacgtttttgatgatggctttgggtgaagacatggaaggtgcgcccactccaccaccggtgggatttaaaccacctggggaagcagtctctcctgtaggaagagtgagggagccaccaccaccaacttttgatgaaggagaggtcatttgcacgtctaactgagatcaagaagaatagcgaaggagatatcgaatgagttgtttcacaattagaagtgagatgacgaggaaagcgagggcaaatagacaagataggcatcgaaagcgaaaaagagtcttgtcaacaacgcttcggattaatgccctctctggttattgttcaagtcgaaactctaggcgtgtccagtacttacaggtagatgagaataacttgaaaaaacgcccagatgagatgagggcgagaagaagagaagtacctcaaaggattcgatgaaagatggaagatgatcgaatgaaagtaatacttgagatgaaccaaaaggcttttgtcgtgactgcgcgccgaaacctttcatccttttgtctttttcgccattcatttgacactgacgataaagcaattgagaagggcagacgtttacagtataatgctggcgagaatgaacgtagagatattaaagaaaacagaacaaacaatcaattaggagcgtaaccatgctttgaagtaaacaggattctaatcgacgaatattagcaaacaagaaggtattttaagaagagcatggatggggcgtaaatgcaatagacaagatgatagcagagaatcgtgaggaacgagaagtaataaggatgtgaaaagacggaaatatacgtgcacaaagtaatcaattgaggcatccgaatccatgtaagaacgagaaaagatgagagagagaaaaagtatgcataaggagagataaaatataactgagtagtcatcaagttccgtagccaagttctaatcagagaagaatcactcttagtttcatcgattacttgacaacaactgattgatagattttggattgttagaaaaaagaactcactcctaaaaatgttgtctagatctttcattgacacgggcttgacgagactattgttaaaagaaacaatttgatgtcatcaaacagagaaaacagaggatttgacataacttcatcaatgttactcactacccatcaacgccacttgcgaaagctcgttttttatcgtcaggggtagccagtccagtcagagctagaatcttcaacctgttctgatagtcgggttgatttggatcattcgagactgaagatgttgatcggacatgtaacgaccgtcggtcagcttctagctgccttattgctttggtagcgccaattcctacaggcacaaagaatatgagttcagagtaatgttacaagaataaagagccagatgaaagtgatgcacggctgcgaaaacacttaccatccaagacgggcatttggacatccattaagcacacatcgaagaaccgatcgggttgagatcggaacatgttaacaccttcttgaccattgaccgcttccataaatgggtatttctgttttcgtttccgaatatcaaggagagatcagatacaccaacattcagaaactatttgctgacttcaaattatcagactgatagacgaacccgtttttgtaagtatgcagatagcacccgtcggttgataacattgtcctaatagagtataagagtcaactagcaggttctaaacgctagaaagaaaggatctgacaaacctcgacgactaaaactgaaggggctttcttaactcgctcatggttcaactggatatccccttcggaggtagtagccgctttgagcaccgctccacctccccctacgctgatgatcgaacctggactactaggcgtcgactgctcatcttctgaatgttgaggggttcgtctcgagttaggaattgaaggattggaagagaatgcggatgagtgtttgatggcgagtggtaaggcggtatccggctgaaacgttatcgaccgaggagccatcattggccgtcgaatccttcttcgatgatctcgctcctcttccgatcgtcgacgttgaaggaaatgtgcaggggatacttggtgagccgctgccatcatggctccagacgatccaaaagccccagaaaagtacgtcacttcagactcatctaccccactaagcgctgttccaaaagaaactggaggagaagaacagttcgatagacgatccgacccgcttgaactatgcgacgtggctgatgattgattgaaactgcgccgtccccagtgagaagttgtctgagctcccatatgagagctagcgagtgactctgtacatgcctgcaaagcttgagcgaccttggacggaccagcaggcttataaacaatatctagtcaaaatatacatcacgaattgattattagtaatcaatattataaaatagagaatccaaccaaaagagggccttacgagcgaaaccaccagcagcaacataagcattcaccgctcgattttgttcaagtgcgccacgcgaagttgtcaagacaacaacgggcctatagatgtcgttttgagcgaccagctcatcaagtacgataacctcttcattgagcaatatctaaattaacaaaccgaaaaccgaattagctacacaactattcatccagtggagtgagggatgagcttacaatgtcacccaactcaagatcagatgggtctcgaatttcaaatgccaggtcttccaaatagttttcgatgacatctcgagcgagactttgccctctatgttccggagagaatccgataagtgacacgctgtatccatcgccaaattcaaagggtaggttaggcgggccttggtcgcgcatcaactcggcttcgaaagacactttgatctcagtcccaagaccctccgaagacctgattgagatttttacaaaaacaagtcaatgtatatcc

SEQ ID NO: 2059 - DNA, 12589 bp, Xanthophyllomyces dendrorhous
atgtatatcctgaatattaagcacgtgaagtagatgttctaaccagacgtccacttttccatttacggactgaacgtgaacaagtagaatcaatagggaaatacatcaaccctcaatcagatgaagaggcgataacaaaagtgcttactggagaagacacgatggagttaacgattgcgagtccaactgtcaaagtcagcccgaagaattgttagtactctcgaaagagcaatattgatgagttgcaatgttttgatgactaacgtcctgttcccgtatgaagagggttttcttgactgaagggctggaagagttggttctgaaaaccgattgcaaaggcgtataaatcactgacttcatatagagatatcatataatgaagactaaccttcaagaattcagagctgataccttttcctgtatctataacagcaagctcaagagacagaacattgtcctgagcatttggaagctcgcgaagagtgatgaggacatagccatcctgaatttcgatcgctagtttggtcagttctattcttcacgagagcgacgattcatatacaccaacctgagtgaattttagtgagtttcctaatcatcatcaattaaaggcatcgcaaccacggttagcgaacgttatacaccaacgataatgacaatatagaacatgaactgacctataagattcatcaaaactcgccgaattccactcttctcgcacttgaccttccaaccttgaggtcgatgtccgacatcaatgatacactatttgacgaaaatacatcagtttagcatacaaaacatcaaaaggcgataataggagtgaacgtgcctctacatgattcactagcttgtttgctggcttatctacttctaagaaagcagttatagacggcggagaataaacactaccaatcccagattggtccaacataactcgagcagtggccgaaaaccaacatccttcgacagtttcttcgatgagcttaacaaggtcaaccctagtaattacggcaacatgtaagcatatttcgcggttatacattgattgataaacatgacatactcagtgaactgaatattattttccgcattgcttttcgttcgcgcacttccgctcagtttctatgcaaaaccaaagaagagggtatcagacccggttgaggaatcaagtatagagatgaggtggcagctcacagtgaaatcaagcctggtttggttgtagaaggatttagcattcatcagttagttccgtgtatatcaccagtccagccaaaacagctcgatcaacatacacatgattgacttgaaatatttgaggaaagagaaataaccagatcaaaatgtgagctgagatcgttattgacattgatacgattgggatttgaaaattgacaaaccggtttcaataagggaggtaccacatgcttgaaccgtctgacaatgcaagaaaacgggtcaaggctcagattaccagggttgcgcatagaattgagtgaaactcacttgaagataagacgtttgttgtggtgtcaaatctgtgtcggaaagaagttctcctacggatggttgaagtgcgagtgaacatcaataaatcaattttcatcaatcaaaaaatattagacacacaacttacctgacacaagaattccatgtaacggcgtgcgcaactcgtgtgaaatgttctacagtggtataagaggaaggagttaaattcggatgaaaacaaattgttcgtgtatctgataatctgttaagcttaccgagatgaagttggctttggccttgtcagccaacgtaagtcgtcgcttgagaacagccgagagagtgatcagaccaatcgctctaagatatttgagctcataaccctcgagaaattccttggcagcattcttcgtgtatgcgcagactagaccatgaatttgattatcaatagaatctgtgtttagcttttgagataaaacgcagttcagtggcaaggaaatcgagcgggactgaccaaacgtgaaaggattcttgtcgatattgaaaactgggaccagcatagcatattgaattctacaatgccgtttgaccgaatgtgcgggagaacttcagctcgcgaaaacattgctgatgacgtgagggacaaagacaaacccagaaggaagcatgcttctaaaccatgatggaagaaccctctcgaacaccttcccattcggattttccttcaaccaagccgccaatttttgatgttctactgcagacactggtttgcctctgcttggcggaggcaatccgttctctgctaaaccaagaataggcaaacatgggattacctgatcagaggcggtcacgggctcagagtaattttgaggtttctcctctccgggcgtcacgtcgccttcctcgtggtcttgatgagagggaggagcagtctgcatttgataaggatctgcctggaaataaaatgaattcgttccgtctgattggacggtctcaaccagttcgaatgcagacaagtccaaaaccattgcgccatccacatctagggtcttctggatgagtttcgcagcttggtcgtaaacctgcacacaagacaggtcgtaggttgattttcagtatgggtgaaacagatgggcataccgagacaaatgaaaataagttctaccttcgtcaacgctacgtcaacagactctggagagacatccatctctacacattctcgagtaaacctctccattgaatcctgaattttccctcttcttctcaaatgcagcttatccctccaaagctctaattctcgcatactgcgagtcatcgatcacgtgcagttagtagtgcccttgactgaaaagtttcagaagctgagatgacttacacaacagcggcaaactctttaagaacatgcctttggcgaggcgcgaatgaatcatgcggcttgtcatcaatgatacagagagagcctgttgttaaaatcagaagagagtcattagcttgtttgttagatagcatgatgagtatgactgtgatatctgctaaccaatattgaatccatctgatgttcgaagtggggcaccttgatttataaaaaaattatcagattgtgtggccatactcaggatatcaaaaagaatgcaaatccatatatttgttgagaggaaagagaagaacttacctgcatagaatcggatattaggatcaccgatcacaagcgggttccgagcaaacctccagtctttgaacgtgtcaaggatgatgagcggttcgtgcgatctgtcgaggacaaaaatcagaagtcgcgtgaataatagacggtctgagtgagtatgaatgtaattactgtaagttaatacctttgtagaatagtgtgagcgcagatggagataccccgaccggcacgatcgcgtcgcatgccatctgtcaaagataatttaaagcatcagcaaaagtccagaacacagctttcaagatctgagcgaacgaaacactatcacctactttcggatttataccattgctcatctgtgtcgagcagagtaatcagaacgatttttgtgttgaatactagcttgacgagatgagtaatgcggtcaaaattgatgtctgtccagtaaatatccaaccgtggagatcaaagagaatagcaatagtcaggtacatggatcgatggtttcacgtctctcaacatgcttgaaaactcagcaccaaaagtgactgagaaaaagacaaaaagacaaaccttgtccggaatgtaggatatcgtaacggtagagtgctttcctcctctcagcttcatctggtggcttcggtgcacttaaatagcccagctttgtaaatctctcctcctgaggagacaatttctgagccccatcgtttgcgacaaccggcggataattacccagcatgtttttggacgcttgatgaatctttcgatctccatccgacttagcggtaaaaagaggaagcctggtgaatccagacgaaggaacagaggaagatggagcaggcgaaggtacgctcatctcagaaggagtaaatggttgagaaagaaactgtttgagggcttcagaagtatccgaggctttcaatgattcggttgaaccgtccttcggactgagttcgagttgagaaagttgctggtggggtttgtagaacggaaactcccctccggacgctgtcgatcgaagttctcctttcttgctatctcctcccttaccgaatgttccggtgtagctgtatcctctacccaacactgttcttgaactgttcccactccctgtgctatttgggccgtcatcgccgccaacagaagacgcgacactccctctacgacttcccgattcgctacccaggcccgaagtagcattcacccaagctcctacggattctccaaagtaatcgtcttgtcccggatctgaggcctttcggcgttccgatgcaggtagcggggcggttgccatggggagcgggagtgttcctcccactaacgtactcaatggagaaattccctccccaattacacctccattgccaggcccatcctcagtctggggtgttgctgggatggttcccaaattgccaaacgaagccgtcctaccagtgggtaaaagaccacctgaactgacgctccacgagaaacccattttggaagctttcctaggtcgatgaatattggaagatgaatcgctcgcgtaagacgtgctgctcgaagaatctaattcacgaagcggatcgacatgttcgtgttctggagaaggaagcgctaaaggagagagatgagatgaagcgccggctaaacggactgttgctgcgaattcagcgttgtgcataaacggtttcttctttttggacaagaaagccggctcgacatctttgcttctaatggaaccaggaggctgagccatttctatgattcgatccgatccggtttcaaaagtggtgctgctagcgcttggtggcggtttgtaggtcggtgtaaccgacttagaagagcttatgaccggaggagtctttgcttttggaggagctggagagaccgaagatggtggagcggaggatgaagaagctctaaggttggctcgagacgtaggagactgtgcatcttgcatcagatgcgcacaagatagaggtggatttggaatcttgtaggctgaatgtatagaaagtgtagaataaagaggctgtcaaccgaaagcttggaataaccatgaggggaagtaaagaactggcgaaactaaccatcccatctaccgtgccgatatgcctcgttgaatgattcccaatcccaagcatcatagctacctgggttaggcttagatgatgctgatgatgcttggtcaaagaacgatattggttctgctgaccatttttccttcagcatcgcccccgagtcatctgggctaggtctacttccctccgtggtagtttgaccatgtgttggaaaggacagaccttgttgaatagagtcccgaagctcgatctctacacttctatcatcgaccgtccgactgcttcgccgtctgacttcaccaagtccttgatcttcacctttcttcggttcgctcatttcaatgctcacacttcgatctcgatcgtccattgaaaagcttagcaagctttccgtgagatcattcatctccaagtcacttcttagaagactgtttgttcgagcaggcgaatccgtgatttgattcttaaagacagaagactgaggaccgagggattcggcgtctgcctctcccatctggttatcgtagggtgagaatgacctgggttctgagcttggtatcgacagcatatgactcaggatggcatcctgactatcaactccagtatgggcaattgaggcagtatattcagaagaagacggtgacaaccttcgggaagacgacaagagagtcgaaggagtagatgaaggcgattgcacaaggggcgtggctgatcttctgcctgacgctcggacatgagcccgtggcccaggctgagtagctcctccaccaggcgtaacaggtgtcgagtttggcgggtatgttgtggacatcatggatgaagatctggacgagtcctgaagattagttattgacgttcgtggggagagtgaatgattcggatgaattgttgacgaggacgatagagctggcgacagcccggcataggttcctgtcgactgagagggtgaggatgaggatggaacgacctgatgggtcgagtagactcctgtagaaggcagtgagagtgcgaaatctgtcggaggcatcgtcacaccctctgttcctgccggaacaatctctaccggtcttcgcaagctatttccgctcgaagggaagtctgctctgttagtgggtggcgatgacaccgtcagccgagtcgtcgaagcaaacgagcgaagcagggtttgcactcccgataatggtcggctggatggagaacgagatcgatgacttcgatccatgcaggcagaagtcgccggattggaagcagccctcctggatagcaaagttggggacgaagttaccgaatccgccgaattagtagatgatgagctgttggtgatggatataggactgttcgaaattggaagagaacgatctgttgggatgtcatcgggagtcatgctgggctgagtcgtcctatcttgagctttttcccttcctgatgttgatgatatgctatgtagttggtgtcgtctggcttaggaccagctttggatagttttcgcgttgtaaccctaacacggggaaatatttgtggagtcgacagtttgccccgagctcgtgtcaagctcggttaatcagcaactggttcttgatgccgacactataggcttgttgtcaaatgaatgcaacgctgaacatggtatatagagcaaatcatcgatagcaatataccaggagcaaagataggtgcaaagataagagtgacagaagtaatatagtgaatggaaggattgagagcatatagaaacataaaggcacgacgagccgacctatgaaaggttattgaactacgatgatactgagacattctcatgtgtttaccagagctcgcatcgctgggtaggattcatctaaaaaagcacattcgtcaaagtcagtctttcaagatcgatgtggattgaagccattggagaacagatagtgatgcctgttcactagataaaagagcgtacctttgaacccttcttacactggaagacctctgcgaacttttcgaaatttcctgtgataaaaaaatagatgtataagaaactttcagccattgactgcgaataatcaggtcttgcaagaaccgatgcttacgaagagtgccctcaaccctatcataatcaatcagaactcaacattagttcatgagaattcacgtcaaatgtaaactagatatgcgtaccggtataagttaggcgcatgtgggtcacttcgcacttgagccaccaaagatgcaggcgcgacatttgcagcccagattcgaccgaacgcgataaagaacaattgttcggaagtgtagggcaacccaggcagagtaatctccttatcgccctgcttgatcgatgcctgccaagcctcgtatgcaattcgcagaccagaatctcctatcgcctccccgttcgtgttgttccctttgacgtagaccttgtggccttcggcatcaagcacgtaatactcagagtattgtttcgcgatactgtgaagattgcatttgagagagaacccgagtcaattcaggcatctctaaaaagctaaacaagaaaagagaaaccaaattaccactgggctcgctctctgaatgcatcgacggtagaattcgtccacctaagtaccaggatgctcgttcagagcgataacacgtcagttgggtagtcctcatcaagcaagaatatacagctttcctgcgtaccactgtctgtatcgaccttcatagtcatactgagccccactgttgtcgaacgcatggcagagctcatgggcagctaccgctccaaatgctccatagtgaaggtacgaaggcctgtagagggactcaataaagatgctttagcggttgagaacagacattgaagcataaccagatgttaacataccatttggccgaaaagaagggaggctggaggatgccggctgggaagacgatctatggaaaaatcacgacaaaaggctctgttcaacaagacgtagaacacaatacagatgataaatcccaatttgagtgatgtggcgcatacctcattatcagcaggagactcataagcattgacagcttagaaatgtacgaatagcacgcatatttagccacataacttttagtatacatctgtatattcaacgtattgacttactatctgcgttcatcaaccaagagtccctgtttcgcaacactccgaactcaacctgccattgcctgattttatccatctcgtttactcggacaaagttatcgaggaaatcacccttgttcaatactagtcggctgtagtaccgctggagcgacaaaggtgaggtggtgttgggatagagaggatatctatatcacgaacgcaactcagtctttccagtcttctcttgcttctcgacagcatctataggcgagaaagtagatcaaacagagatggatgacatacccgatcttgggagtgataacgtcggcttttctgacagccaaccgagcactctccttgtccatccatggaagtttaacaagcttcctcttgaaggcatcgatgatgttaagaataacatcctccttgaaaagattaagcaatgggatacgtcagcatgtcgtgagagactctgaaattcaagaccttggtggccacgtacagccttgttcttggaatcgcctgtgaacgccttcttgacaaattctgctccagccaagtgaccaacagccgcggaaacgtgattcaagcagactatagaagaaatacgacaagtatgaatacagtacgtcttgcgacggccaatatgagcgagatgctaagaaagataagctcaccttcctctcgctctggccggttgccctgtttgactccggtgagagtgttcttgagcttctcggcatcctgtctgatctggacgttcggtccgagataggaggcgtacgacctggtatgatgacgtggcgaattgattcccaaactatttagaagagaaactaaagatctccctcccgcgcaaaagacttacatagcagttctaatcaagaaatatccttgaagtacgatatcatcttcttcctcgacaattttcactaccttcttcacgtaatcttcagaggtcaatacaatcttctccgggaactttctcggtgcaaaactcgaaacgtaagacctcaaatcgagccattcaagctccttttcgagagtttcaaacttgacgggattgtaagatttggacggatctcccaagtattcaggctccgcttgagctttagcaagcttcttctccaacgcgagaatacgtttagctaagatctgggcattcacaggactggacttgggatcttttgaaggcggtcgttcatcagatggttcatcaggaataaccccaggaaaggggaacgggtgagggacagagggccaaaattgcggcgacaatgatgactcagatacgttgtataccgtagatagaatggatgccatgacctcggtatagatatcagtgtaagtcttctcagcgtagtactcctgaagcatggtggatagatatagtctaggcatcaggtacttgaaatcaagattttgaaaggttcacaatacacaaagcatgaccgtacctttgcaggaaggccgagaccatcttgataaagccaaagaatttgcttttggggatcatctccaatatctccttcctgattcatatacaaagacggtatgtatgtgggtcgatatacatcagttctagtcaactagtgaaccagacagttcctcgacaggagatcgaggtacttacgttttcgaaactgaagagtgagtcgattccctttgagtgcaagtaggacaacactttggtcaatttgtctttccttctcttggcctcttctttgctacccttcttgtggtcgtggtgcttcggatggtgctttggttgatgatcgtgatgatgctttgaatctgtctcgatttcctgggcgtcaaagactgcatcatcctcttcctcgtgatcttcgtcatggcttgtgtaaacaacagggaagagagatttgatgtcctcgataagaggaacgaggggataatacgatagtgcatcaagatgatcctaaaagattcaagagacgaaatctgcatcagctatgttcattgccgacacaactggatatgctttggtctgaaaagtctcttacctcagccatgcagtcatcaaacacagtcttgagttttaacaggttacttcgctcagcttccttctctggattctcaaggtcaatctcttctgaagcctttaagtgcgtcaagacatcaagcaggattttctgttggtttcggcatgagcataatgatttagtttaagaatgttcatcgacgaaaatgatattgacaaggaaagcctcgcttacctgattgttcttagcgacctcgttgaagcttccgtatttacctttgctctttggcaatgggtttttctcgagccatccaccggtgaacgcgccgtaaggatcctcacaagggtcgatcgacgcgtctagagcttgcaggatcgatgaagaaagaagaatgcaatccggagttaaacagggggtctgtgccgacaaagagcgaagaacaacggaccaacatcgaacgatgtcaataaagaatacgacaagatatgcacgatcgttgaacaatcgatcaatagactcacaacaggaggaaggggaacttcagtaggcgtagggacgggagccggtccaacaacagtggtggtcgagatctgggtagttgtagccgtagctgtagcggtagcggttgaggtcccataagaagtcgaatgtctcgtctttgttaccgtcactggcggttgattctggatctcatggagcttatgctgtgacccagagaatagcccaatgaatatagctgagagcaaaaggaactgtgccatgattcggagggattcataaatagatcttgatcagttggatatatttgccgcagacggcttgttgcgagctagaaagatggaagaagactaaggaaccactcacgagcaaaactaacaaagccaacaatttttccaagagagtcaactctctctgagggtcggacaacctcttccaaaaagatctccgaggaggatcgatgtccgatccatcattgaccctcgtgagaagaggagacgattcttgagatgaatcatgagcgatcgttcaagcggttaacaaatgaacctcccgtagagatgaggaacacagacagaaggataaagcttaccaagatcggtagatgggcgagctgtcgcttcggccatgatattttcaagcaattgtataaagctatgagatcaatctgaagagtggagacaaggtggagatgaagaaggacgggatgggttgtcgtcgacgaggaggaaggagatggaaagcaatcagagcgtggccacgcggccaaattgttcaacgctcttctttcggtcttgagcgaagaaacaacaagattgctcattgtgctcatttctcttttcacgcagaattcgaccatcatgcgattgaagattcatcaaaccaagcaacagaaatgaaagataaatccaagtcataaaccccatcattccttgtctccctacagccaacctcgtatttgtagagaaatttatcatcaggtatatctcagacaaccgtcaaagtctctttatcttcctcttcgatgatcgatctctcccacatccttcgcccttcgtgcagcgtcacacttcccagcccaaacgcaagcaccgtaccaaagtcccggagactcaacgcctgcgtctggaagaccccctgcaggaaaggcagatagatcaacccgagctgggcaaggaacgagatcgagcatgtcaagaagagcatcttgttctggacaagtcggcagctcaggcccctgttctggatagcagatgccaggtcaaggaacacaaacgtcgtgaacgtctggagagacagtccgtcgagcacaagatccggatggggtgtgtcagtagataggatcatgatgcacactcagatacactgtcccgccaaccagaccacaaactgaccatagtctgatcccgtcgagatagtcgcccgtcctgggtttcctgaaggaacatgtacagcgtcccgaccacgatgatcgccgccgagaagaacaccctggcaaacagtcgcttgctcagaatcggcgcgttccgaggtcgaggaggtcgcttcatgatcgccgggtccaccgggtcgacgcccagagcctgggccggaggacctagagccagccagccaacaacacagacaccaagacccagcggtaagcagtccgtcagcgctggaagaacaggtgcacgaacaaatgcaagaatagatgcaagtacagatgcaagaatagatgcaagcacagatgcaagaacaagtgcaagcacagatgcaacaacagaatgataaaagccaacgaaccgtccataag

SEQ ID NO: 2060 - DNA, 1864 bp, Xanthophyllomyces dendrorhous
caaacatcaaacatcaatcatcagcacagcgttcatggaagtagcggcatcaggtgtacagagaaagcacgacagaaagacaacaactgaccttcctccacagccggcaggatcgtcgcaaagttgtcgtccaccaggatcacatcggccgcctccttggcgacatccgtgccggacttgcccatcgagatcccgatctcggccatcttgagtgcaggcgcatcgttgacaccgtctccggtcatggcgacgacctcgccattcttctggaacgcggagatgatcatcatcttgtgtttcggggtcacccttgcaaagacactgatcccaccaaccttctcctgaaattgtctttctgacattccatccaggtctctccccgtcagacaacttgcacttcctggctgcatcttcaatcctagtgtcctggcaatgctgatggccgtctgttcggcatccccggtaatcatcactacatggatcctcgctagctggagatgagcgatagcatcggccacaccctttctaggcggatcgagcattgcctggaaaccagcaaacacaagctcaccgccaccaccaggagaagggctctcaaagtcggtggcggaaccaattccgtaagccatagcgacaactctgagtcctttagaggcgatttcggaagctttgttgagtatcgcgctcttgacagtcgcatcaagcgaaggagtagatgagtcggagagatagtagaaccgacatcgatcgagaacagcctcgatggaacccttgaggtaaacgagctcctgtgcgtcagaagatgaggaaagcttcccagagacagccatatacttggcatctgatgagaatgggacctcgaccattcgttcgaatttctacaaaaacattgatgagcaagaccagacgtgttatgatgaagaaaagaatccagaaagagaacaccgaaggagtactccttatgaaattagaagaaagaacgtacacttcgttgatcttcgaaaccaaagacttttagaacgttcaagatagccacgtctgttgcctgtccaacgttaaggccaaattcgttttcgaatgagttgttacacaagttcccgatctgaactgtctttcgaagagcgggtgatacatctcgaggaggatgatggtcgtcgaatacagttgtctcgtcaacagtgtagatggtagtaaccgtcatctcattctttgtcaatgtacctgagagagccagatgaagagcacgatagtcagcatagacaagacgcagtaacgcaatgaaagctcaggagatataaactgaccagtcttgtctgaacaaattacgcttacactgcccaaagcttccacgctaggcaatttcttaacgattgctttcctgttggacatccggagaacccccaaagcaagagttacagtggtgacgataggtaaaccctcgggaattgcagcaaccgcaagagagactaagagaaccattatcgataatatatcaacgaagaatatacgaaacgagtcgcgcaagccaaggcagagagaacttaccaccgatagtgaacatttcaagccatgaccgtttctggaaaactccgatgagaatgattattccaatgataccaaacgagatgattgaaagctttttggccagttcgtccatcgagatctgcaaaggggtccgtttctcctcaacctatacagcacattcatgaaataaagcttcagttgttaaaccacggttgccgaaatatttatgaacatataacatctacttacgtcctgcatcattgagaagatcactccaaactccgtcttgctccctgtagcaacaactacaccagacccatgtccacttttgacaagcgtt

SEQ ID NO: 2061 - DNA, 375 bp, Xanthophyllomyces dendrorhous
acctcacagtgcaacgccgtcggccagacagcgacttcgccatcgccttcgacatcgccatcgccatggactcacctgcgttggcgatgatgacatcgactctgccggcggccttcttgatctcctcggccgccttgtggttgctctccgtatcggctgagacgagctcgacgacgttgatcgcggcctcgctgctctttgcgagctcgtggagggcggtcgcgctggcaggcgtccgaacgccagcaaagatgacgttcttggggctggtggcgagtgctttgacgatgctgaggccgatccctcggttggcgccggtgactgcagaggcgaggcgaggcgaggcaaggtaagataagacaaggcgtcggggat

SEQ ID NO: 2062 - DNA, 51592 bp, Xanthophyllomyces dendrorhous
taagacaaggcgtcggggatggtgtgagcgcggtgcgagaagagaaacccgcagagaggcaaaagagaagcacgcagggaagcacaggactgaccgagatatacggtggtgtcggacatggctgcagaggtatggcttgttggtatgatccgagacttgacgggtgaagggtgatgggtgatgggtgatagaagagaagacaggataaacagcataaaacattcggatggacggtcttcttatatgtgactgagcgtgttgggacgacggcctcatggtcaactgagcatctaattcatcagtcgctatacaaagtcaattccgttcatctcgtaataaattcgtgagaaattcagaatatcttgcgatgatgacaaaatccggattgaacgatttccgggcattgcttacagatcaagcgacgtgccatgtcgaccgggctgattggctgagagacagcgctcgtccgaaacaattagaatctagaaagtggtctgggtggtgctctatcagttctgctcatccagcaggtcagcatgtcctgtgatcaccgagcccgactctgtcgtgatagtctggggacccgatggagcagactgcatagctcagttgactggatgcgacttggtcaaggttgaaaggacgatcggcgatcatgaattgatatataacgtgggacaagggtaaacactgaggctctgtggtggttatctgaagccaaccagactgtcaacaagatacttgatataagaagtctcgacaagaatctcagcttgaggaaaactcttatccaagaaggcgcgagggcgttcccgtttcatatcaggtcctctcgcgcatttggtctgccactatagatatacatatgacgagcctagagagcctcgagatcatgagaactaaagatgatgaggcatgaaccatacaaactagagcatgatggaaaatgggcgaagaggcataggggcttgagggaaggaatagcctgtaggggtaacccacgtatcagatcacgtgatacttaacccgtatccctgacatcccgtccctcacaggttacgcgtaatagcgcacgtttcgaacatctacctctgaccttctctcggctggtctctcctcgctcttcttcgagctggaatgagatttgcgcatttaattcggtacgagtgatgaatgttccgagcttcgtgtggttaaatatctcgactgttttccactgccactgaagagcagtgtacaacccgtgttaccgacggagctgggctagatcccagaattcgcgcgcagtcgccggctgatgtaaccttggttctgataatttgtgccttcgcatttcgaacgaatgctctcggttagccttgaacgaccttggccacaccctctctatcctcaccttcagcatgcctaacaataagagacacaccgccaagcagatgcaagggtcaaggggaaacgatgttcatcccggatcccgacgtggtgagttagcgtttcgtctgaagagttcaactttgaaatcaagtggtggtctgattgttgctgaccttctttctatactggtatatgaatcactttttcttgtccttcttggctgtgctctctctgtcatctagctggtcagatggaccgtatcgtccttcgtaaggcgaaactttccaaagcttctcaggctcgagcaaagtcgacttctcaaagacgttcgttcccgtttgcaaagagtgtgggttatcgatatttgtgctaattccgttcttgtctggccaacatgttgtcttctaatctgtagtcgaacggcctttgtttttccatcactccctttcggaaccgccgttcgagtgccacactcttcaaggtcttcacgatctgatctccgaagtttacctaacccgctgggacgacgagcttgagacactgagaaaggagaggagggctggtagaccgaagagtaaacgtgaggacgatttggaggagattaaaaggagagaggcccaggagtatgagagtggattcggtaagttaacccatttccgagacttttgataccagagggccgttgaagagagcaagctggtagggtcgatcaactcgcgcgcgtgcgcgcttagaggagagacctaataggcgtgatacgtttgcgataccgtttgctcaaccaattcttctctttgtacgcgaaacccgatactatcgaacgcatcctacagaggttccggacttgaccaacccaacgacggtgactcttcttcgatcgtggacgtcttgcgatccctcatttttgccccaacttcgatacatccgagtgtcgaagataaatccagaacatgttgtcgtcagcaagaaaggtctatcgagagagtacaccgatgcagaggccaaggcagcccaggagatgcaagtcgaggcttaaactagtagtttttgtcgctcgtttcctcgatatctgccttgtcttttttttctccagtcatctccgcatcaagatcatatctctagcctcctttctcttcttcctcgatgcccaacagctcttgtcttttcaaatcttatacgaaatcgactgtctttatctatcatatacaggtttaaataaacaagcagcgaaagcgaccatcagttgttactgcatgcatgtccaagctaaagaatgactatatgcgttttgtgctgatcctgactgacaggaattgacatacgattcaaaacccatcacgtctactgacatgcttttctatcttccctcttcccattccggtcacttcactctctcatcttgtttcatcgttgatcttacatcttgagcgtccttcacctgattttgttggtgcagacgcagagaacataaaatgacctactcaagcgcggagcctttcaaagatttgttctattttgccggttcatccagggagtcagcttattcgactttggttggaacctctgtacccagagaaggaacaataggctaacttactactttgtgtcttgtgcttgatctacgagacatgcagtcctcttcttccaccgctcttttggaaaacaaacgaccaggttcccctgacaccttctctccctcctcactttcggcattccaccattccgatcatttcactcagacatctctcgttatactctcttgaagaacaacaaacactggtcgtcaatcttgtgaaagagaaagatgagattgatagactggaaagactcgtttatcccggttcgtcccgttcagtctgacttatgttgtcttctttcctcttcctctctctctctcctctctccacaattcgtgtatgcgctgagcaagaagaacacaggatgcgttatccggttcgactcaaccgacgggagactatcgtacacccaacagtttttgcctcgcgtaaacgagcaaaacgaggaagcagaaggtgtttctccagcaggaagagacatcaaggttgctctgatgagcatggaatctcttgatcctgaaccgtcagttccgctaaaagccattttgaaaaagaagacgaacacaagaaatcatttcaagaaggaaaagaatgaggaatgcatagctaagacgaaagaggtgtttgaggaatatgggataggaagggattcagtcgatcacacggtaaacgttttccggcacctcgtcgaaggtatgtctctgttccctatttttaatgcaaacatgatctttggtttaaactgaacttaatttcatccgcctttcaatccccaccgactgtaacggaatgaactgtagaggaattgtacgcgcttcttgcctcggatcttagtaccgataaccctcttgcaacactgtcctcctctgtttcatcgactggctctgacgatgatgcctggagtgaggaactgtagaaattgggatctggatgaaatgcaaacgttgacgaatcatctcaaataagaccacattgttccgcttggtatgttacaaccgagatagagtaaagtcgacaaagaaacaccgtgtacatccgcaaaacctctttttgaaattttcgatagagttgagcatcgatagagcgggaaaaattacatatccagtttttctttcttgtttggttatatattcctttcggtttaaattcctcgagcggcatatcgaccaccgagcaggttcttgtcgacattcaacccaaccatggcctctccaatgtcctccgagatctctgcgagaattttggggttgttgaagtgggtgacggcctgaacgatggcctttgctcgcttgacgggatctccagagtggaagataccggaaccaacaaagacaccgtcgcaaccgagctgcatcatcaaagcggcatcggcaggagtggcgactccaccggcggcaaagttgacgactggcaatcgcttgagtcgggcggtctccttgagcaagtggtacggagcctgaagctccttggcgaaagagtaaagctcttcatcagtcatcgatgaagctcgtcggatctcggcctggacggctcgagagtgtcggacggcctcaacaacgtttccggttccagcctctcccttcgttcgaatcatggcagctccctcagagattcgtcgaagcgcctctcccaagtttcggcatccacaaacaaagggaacctaggtgaaggaagatgtgcaagattagttaagagttaaaagcgctctcagtaagtgtttacaacaagacaaaccttgtaaacgtgcttgcctaggtggtgctgataagatcaagacacagaagacaaaatagcagatggcggcggcggtgtgttcagcaagatttatgattgaaagcctacattcaaaagaacaacagacatacctggtcatcagcaggagtaagaacttcagattcgtcaatgtaatcgactccgatagcttggaggatctgttgggacagcgaacacaaattacgtaagaatgatataaacctgatcagaggagtcatgttgactcagtttgcgcaagcatcctcaactgacctgggcctcagcgatgtgaccgattcggcactttgccatgaccgggatggagacagcgctaaagaacgaagacagtcagaccatcatgaaagtatggagactcaactccaatggaaaaaagaaggctcacttgatgatctccttgatcatcttaggatcagactatcacatcggaggttcagaggagagggaggttcagtttgagtggatgatcgatgactcgatcggtaagctggacaaaccattcgggcaactccaccctcggctcggatgtcagccggtactcgctcaagagccatgacggcgcacgctccagcctcttcggcgattcgagcctgctcgacactacgtagagataatgaagattcggtaaggaataaagattttggcacgcaaggaccatcgcgacatcggcaatctgccgatcgtaaggaaggcaacctacttgacaacatcgatgattactcctcccttgagctattgacgatcggaaattcaagaagcagaaaggcaccatgatcaagttctcgaacactgtacaaatcaagaaactgagcaagttgagatacataccatctgtgatcgaggacgatcgggccaaagagagaatcgcagatcaatcaaagtgagaagagagaaggtacaggcattagaggggagtcatgtgtgcaaagtcgctgaagataaggtgagaaggagaagaatgagagaatgtctgccaaggctttatggaaagcgctctggctgagaagtattctaccactgagcaagttgggagctgggaaagaggaggaagataaaggggccactctgcattttcatcatccaagagtacgtccatgcaactaaaggttctacctattcgatcggacacacctatccccccggaagagaggaaaccaagaaaagaatgagagaaatcttacctgagcaagtccggtcttgacaccaaaggtaccgacggacgagcccgcaccagacgagccggtcttggggagggcagaggtagaaggagtgacggctcccgaggtggtagattgttggatgatggggttctcggacgacattttgcaagtgtatgagtgtgtgagtgtatgttagacaaagagaagaaaggaggagaagaagaaaaaaaaaggagatgaggggattcttaaaggacgactcatctgtttctcaaacggggattgccaataaattgaagaatcagagtctttcttgggctcgaacctgataaaccccaccaatcttttaattgccttttcccttcgatccgctccgttccgtttcactctgcattgctattttatgctcttagttctccttcgtttgttctatcccagatacttttttcttcgtgtgtatatatatagtttctttcagagagaaacgacaagcagagcgggagacggttgtgtcgtcgaatggctttcattaccgcgcacatctacctctggccaagacgacgagcgcgatcaagagcaacagacgagtatatgatatctaacatgttctgttgagttattctctttctggacgatatcatctcacttttttttttgccctagatgatgactcgaggtaagatcgaggggaatatgataataatagccaagatgaaagaaagaaaaaaagaatagaaggacgaagaaggaaatgccttaagctccaaaaggtcgatcacgttttctcgatcacatcgaaaggaagcaatcgactcttggctcctggctggtcggttggaacgcgaacaccatcgctctgatttcaaaataaaattgaataaaataaaacaaagattgaacgcgacccatgttatgataatattaatgtgattgccttttgattttacagaatattttattcgattcccatctatcgagtcgtttcattatttgcgctcacgtcgatcgatcgctctaaagagtagatgttattctactctcttcttctcccagatcgactgatccctccttctccttgctttgaccttcgtctgaggcgtcgatttgggcatcactttctaaccgagaacatgattccaaccgactgcgctcgtcccgggcttccatcatccgcactccaacagtcaacaacacctgatgtaaagaagcagaagagaatgataagaaagcctaatacaacttgaattcttttcaagaagacataaacggagaacgaacgaatatagggcaaaggacaacgagactgatcattcctcttctccaacgaggagcctcgttcgcggggactgatcatcaacaaatcaaggcagataaatgagcaagatccaagggtccgattgaacacgtagcttttcggagtagacaattgtaacacagaaatacttacaaaacacgatagaccaccaggcattgaatgcgttggaaaacatgttcatgcttccactttcaatatgccaacgaacaagagaacaggtattgagagggaccagtacatcagaccatatctctttagaaccaacagaaacggtatcaagagagagagagagaaacaagacctacaggatgacagatcgctcctgatcgtctcctctcgttaaatcgttcgcccaagcaaagttactcgcttgaccagagtaagataccgcagagagatagaaggcgaagaacttgagaggcgtcggaacgttgtagacaagcaggatcaccgaagataccagcacgcagccggcgattaggaagttgacctggtaacgttttccagtgtagtccgtccagatcgccgttcccagcagactcataacggccaccgccgtcccaccggaagggtaataattgaattccgtcacaccgtacgagttccttcgagcagccgcttccgactttaaccaaagcgccatcagcgaattacttcctatcgagatcaactcgcctccgacgatccagatcaaactcatcccccaccatctccatcggaggagaacccgacggaagactgatcgatcaagcgtcgtcttcttcttgacaggtaatctggagattgcaaccagccgttcttccgctgtcagatatccggccgatgtcttctccggtgtatccggaaacaggaactggtagtttgtggcataaagtttcaatcaacagctgcacaagcacatacgcgaagagagagcattctcaaattggagacgtacatagccatagattgctatcggaagagtgattacaccacctgttcaaattgttcgtgcccgcgagaaaattgttctaatgagtattttccctctctcttttgacaagctgacatggacacgtgaagtaaactcacagatgataaacagccattgaaacccagccaagccgaggtgaccgttcatgttcttatagatcgacgcttgctgaatatccaatttgatagaataaattgtaaattttaaagatgagtccgacgacattgttcactaaacgatagaacactttggacctaccaagacaccggaaaagatggtagccacctgagccgcactactaaagatggcccctctctttcctaattcggtttctttataccaagatcccatgatataatgcgcaccgacgaatgtcgatgactcagcaatcccttggagaaatcggatggcgtataagtggggaactgttttagcagcagccgtgcacatagtgagtgtgccccaaatgactggaaaaagtatatgacaaacaaaaaagaacaagtcagtacaagaagaggataaagaagaaactacaggggcagatgaaggctcacgggtgctaaatattgaagacaaatgcgatgaatcatcacgactgatattcagtatagcgcgcacgcgcacgaagcctcctctttctctattgaaatataaacctcacaatccttactttataggaaacaagatccttggagatatgacatgtagaagaagattttgaggaatcattcctatcgtgtatcctgcggtaaagaaactgtgggccacacagtaaatatcaatatcaaataggcttgtccaggaacagataaaacgacacgagagaagaaaggaagacatgagacaaacctgttgacgttgttaaggtcgtggcctttcatattgagagcctccttgagtcctgatacatatgcattcgctagattggctctgtcaaggtctatccgggatcataattaagcacagaaaaggtgagtctcgtcattcgagctacaaggcgagaaaaacaatgtagagctgacagttcgaaaagaacctatttagacccaaaaaaagttcaagctagtatgaatgagatttctacccatgttccccgggctctgccccaacatacaaaaacaacaccaaaaagacttgaaacaaaaccaacatcaaacaaataaacgaaaggataaaccagtcgattttgaagagcaaacttcgttcgaccttatttgacgggagttctccccatatgatgttccgaagcgacgaccaggccatggcaaatgtatatgtgcagggtcttgacggaggatcaacagaaaccaagaggtcaagccaatgagcaagttatatagatttagggactcgttggacttgattgatgtcgaatacaatcgtacgacaaacagacgatcaaacgagtctccagtcgaaattcgttggggtctggtatatcaaacatagccgccgggaagattgttgagctccgagccgaggccgggcggaagcaagacagacacgtccgcattgttctgcgggttacaaggcggtgcaagttcagatacttggcacagtcgatcagtgccagggatgtgagctggggtttacatgttcgtaaccaatgactggtggaacagaatgagtggtggaagacaagacgagcagagtgatgcatggcggccagatctatggtcttgttatatatggctgagcatgttcgaacgacggccagacctggtagctgattcatcagctgtcgtctggactcgacgtcgcgcatgcagtgttggtttggcgagagattggtcatcgaacgcgatggcgataccgtctggatggaacgacgtccgggcattgcttacagatcaactgacaagagcccgggatcagcacacgacccggccgagacgggtccgcccgagggggatggatgttggcagcatcatccaggacgacagaccaggatgcggtgttgtcgatggtgtgtagcacgctcggttgcttcagcagatcaacatgttctgtcgatatttgtctcagtcttcatcggtcaatcttgggacttcacccaggtggtcgtaagtacttattcagtgcaatgcaagataattggaacagaacgaaacagctcgtcgatcaacagatgatgttgggcgcataagcagttctagtcagcggctaaatcacagagcaggctacgatctgtgcaactcgcaatgatcatgaggattcgtggtgtagacctctgattcttggaccagattagatggaagagaagagaagcctgaaacaagcgaggagtaacaaagcaagggatcaacagaggatctcgaccggagaggccatgctatgggcggcaaagaaggcctgccttgtgtgtgctcctcagactacaggagcactacaagagcactacaagagcactacatgaaatcatgtctcatggagtgtgctaggaatacatgcgctgaattaatatctatcatgattgcgcgcaagaaaggatcataggatataccaggagcacatccactatacgactgcatacttggaattcatgaattgtatgaggagtagctggggcaatagatctgcagtccgtgggttacactcaagtcacatccgtgacatccagcaatcttagcaaacacgtggttcaattctgacccaaaatgcggtgcatgctgtaaccagctagttactctgacgaggcatctctttacgctgtttcatttaatcatctctgttgcctctttctcttcaacatccatactatcagcaagaggatagaatagaacaacatggtactctcgctacgggccgtattactgtggtttgtcccagctcttctggtctccgcacaatcttctaacggatcggccccttcctttgttcgtctacgtcttcagcagctctctgttcatattacattcacctagcctctggatattgattggtattctttcttcgtcgcaacgtgactttcaaactctcaggagcaagacccgggcttgctttggtcaacatattctcctcagctctactttggtatcaaaccaagactgccgaaaagtctgagcgcaggcttgatgtggttcggcctcaacgactgggaaggcataagacgtgagttgtcctttcactcctgaacctcttgattagaatcacctcgtcgttcggtttcttcacgacaatgccgcctaacaaatcgaagaatgatctttttagggatccaccatacatcttcatctgcttctccttcggccgacggattacaatcatatacatacacttcacatatccctcgagttggatctacccaaaaactcatcgattcccgaaacggactcaatattcaaaccggatttgtcaatttaccaacttcgggcaaagcaggtgctaagcttggccaaggatggggtgcgagagtccaggttatcgaggagcatggagatgagaggatcagtgggctctggtacatcgccctggagggcgaaggaagcttgagacttgtggagcaagataatagcgaacatgtgagcattcatgagcttcaaccctcaacaaagtagatgtgccttgcgcctggttctggctctaattcactttcaatcgtagggtttgggatctcctatcgtgcttcttggtcaaacgcctgagcttggacccttcaaaattacgttgactgatcgtaagtcttaatttgatctattcatctctaatctatcatccggcactgaaccgtccgcttttcttatgcaccatctttcccagatgaaagcaatgagcacatcagtgagggcgccaaggccgccgactttgctgaaaagattggaaagactagctgggccggattgagagcacctgcggatgagctatggaaagctaaaggtcagtgcaagtcaatcgtacataagcttaggtgtgccctgctgaccgaccaacaacattctgatacaaacagaaatcgtccagtccctattacacgcatccgctcagaagatcgttcagaaatacggaaaaagtactccgcctaacgcggctgatttacccgatgtagcctacacgttcgggatgaatcttcctaacgagcaccaaggtccatttggtagcaacttttacgtcttccagaagacctggggaggagagggtggttgggatgtcctctatgaggagggcgacttctctccattttccggctcggatgacgaacagcctgttgaggaaggcaagcgacaggtaatctcaaatgctttggacgccttggcagtcgcatttgatgagcatttcgagaacaccctgccactctcctcaccctataactctccggcccatacatcgttcgctcaagaggtcacttccaaccttctaggcggcgttggatacttccatggccgatcgttggtcgatcgatcgtttgcgcacgagtacgatgaacagccagagtatgaagaaggtgaggagggggtgagagaaacagatgagagggagctattgacggccactcccagtcgaagcttcttccctcgaggtttctattgggacgaagggtttcatcttgcgttgattggagagtgggatcaggatcttagcttggagatcttgaagagctgggtggatttgattgatgaggatggttgggtgggtagagagcagatccttggagaggaagcccgaagcaaagtgcgtgttccgaaaacctgatcgctctattcctactcatgaaggaggatagttcagctgagcaaacttcctactcacatcacacgataaaacaggtccctgccgagttcagagttcagtacccaacatatgctaacccgcctacactcaccatggccctcacatctttcatttcccgattacaagccgccgagtcgtctgctctgctttcatctcagctcggccttgacacaaccgctcctttacctctggcatatattcgttccaaataccttcaatccccagagaaagcccgggcttatcttctctcagtttaccctgcgcttagacggcattacctttggttccgacagactcaaaaaggtcagctcaaggagtggggtcgaaggcccccttcgagagcggaggcataccgatggcgaggtcgcacggataagcacgtgttgacaagtgggttggatgattatccacgagcggtcccgcctagtgtaggtgagcttcatgtggatttgatgagctggatggggttctttgcgaggactatgaaagagattgctgggtacttgggcgaggaagacgacgaagaggagtatgcgaggaacgagaaaaacatcttggccaacctggacggtgagttcaatcgtgcttctcgagttttttttttttgagtattgctcaagccgtgccgttaaatcgatagctctgcactggagtgaggaagaccagatgtactgcgacgttacagtcgacgacgatggtttgttattccctatctctcataaataccttctttcatccgaacagtctagactcatactttggtattctgtctcgttcaacagatgactctgttcccgtttgtcacgcgggttacgtctctctttttcctttcttcctcggactcttgcctccctcgtcgcctcatctaggaccggtgctcgctttgctaaggaatccagccaagctctggtctccttatggaattcgaagtttgagcaaagaccatccattgtttggaaccgatgaggattattggagatctccagtttggatgccgtttcaattcttggcgttgcagtctctttacaaggtacggatcaggttcaatcacggtgtaattccatcggaaaaattgaaggagaacttacgagcttttttggggtgaggggcatgaacagatatacatgcctcagccaggtcctcatcaggaaacggccagaaaaatctacactgagcttcgatcgaacctgatcgataacatcttcaaagtacgctttctcatcatttttcttcgttttgtttcattcaagtatcaccgttccatatttgatagctttcagtccattgaccaagtgtttgcctcccctgaacttttggaattcaggagtaccaacgtacgggttacatttgggagcagtacaactcgctcacgggtgagggcgcacgaaggtatatttttcgtcctctgttcgttcgatccgcgctttctctagctaattagtctgttttccgtgattgtttgaacactttcagtcatccgttcacaggctggacggctttgattgcaaacataatggcagagaagtactagttgaaaatgatctagaatagaagcagatagataaatgaattttgaatttgatgttttgcagaacgaggttatgtgtgttagagaggactgtatagatttgagttcaaatttacccctttcacctcaatcttgtgttggatagatagacgctggacacaaggcctgatacacatcttgcgacaccaacaccaagttattttgttcaaagactagaaacttatatctttcccttcgttgatgctgaccggagagaaatcgggtgtttgatagagaggaatctgcgctattgatatgcgaatctaaccctaacaatcctccaacttgcctcaaccgctcagcgttggaactcatacccatcatcatcatcatcatcatcatcatcatcagcagcatagttgtcgccttgaatatgtcttccccaccgcgaccatcggcccctaaagcgcctgtttcaaacttagcaaaccctcctcgagctcctccaggtcgacgaacaccaaacccaattttgttcttagggattggcttactctcgtggttcgcattcactacggtcgtcaataaacgggtggaggagaacgcgttggctggagggtcgagacctcaggctttcaacccgttaggtgcgtcaactctttttcatcaagcttgttgactcaacgtgtgtacagcgaacggcagggagagatataatccttgatatacagatcggagagattctttgagctgaagacaataaacgggagttgactgttcaaactttgtatttgctcttctctcttatcttaaccaaccattagtgtatagtgagaacatggagcgagatccgacctttgtacctggggccaagagacatcatgaatgagcatgttacctctcaaatgtgattttcataagatcaacaaggatttatcacagggtgttggggtgaacgttttgaatcgatcggatgtgaggacagtgagagcagtcaagctcgaacgtcgacatcatctcttctcttgtgtaaatatgtgctaatcagctgagaacaacgttgggaggattcactgttattgatatagagaataacggacaatcaccaaatctttttacagtcttatttcattctgtatgtgcatctggcgggggtatgagagagagacgttctttcgactttttccgaagtcttgcgccaggctgtctatctcttctctttttctctggctttctatcgactgctaacatactattcgcctaactgaaagaaggacgagaaacaacactgacagtcgctggtggctggttaaagcgaagaaatcttgcgaatttcttcgctttatgccttgcaccttctcaagtgtcgtcgctttctcaagtataccatattctagaactgttaaatcaccatccatacatgaataaagctatacaaatacatcctttcaagcattccgaatgaggccgtatgtcttccaaccgaaccaaccagctgagactactgtcgaccctacgaagaagactgaaacggcgatcatttctaccaaaagagatatatagtccttgccctatttgtatcattgcattcgaaatcattgaagaaagggccctcggtttcgtatcagctcggaactttcaaatagaaaagagtcacaaaagaagtaaagactgacgagttgcttagccccggcttcatccttcccgatccattcctccttaaatgctttctcatccaaatcctttgagccatctgttctaggtcgatacacactctttctcgctccaagactcatcttgaccagccggccaagtccctcttgggagacgcggatccgcttagcggaccatcgggtggaggggtataccgattggaaatatgagggatatgctagagcgaagagtgtcatgtgctatattgaggtgacacataaggaaaagagtaaccgttcgacatataagatcctctactcatcctgaagtagagagagcgcaaaggtccggcacagaacggaacaaaggaaagacgaaccagtttgatctgaccaagccatcctccaaccgcgttgactccaagccgatcacacaactttggaccgaccaagaacctagtcaagtttgagtgataacccaacgttgttcttatcggcggactgtcgctcatggcaatcaagatcggcatggtcggtggaggcaacattctctcattgaatggacatccagagagcgttgtgtttgtgtcactaataacagtatccgttacacattttaatcccgaattagtggcagtcgtagtggttgtagtatcatgggagtataaggcagagggcgcattgggtgaagggaatatatgacagacgacggaggcgaggaatttgcaagagggtacgacctcggtgaaatgtgacttgagcaagtctggtgcgattcctagataaaacccgatgtgtcttgagattaatcaaaataaaaacaagtccggaaaccaacggtcaactttcgctttgtcttgatgaacagtgtatatcgagaggatggactaacctccatagacggatataatctctttccgccggatcttggccatctcgatttgtcatacgcatctttcttaagcaccagacgggtacgaccgcaaagcctgctaacgtgcctgccatatcttccgcattcaatggcacgtcgtcatactgctctgtgctactcactggtccagtctcgtcctgttccttgttctgggcgcttaaccgagacctctttgcccaaagacgttgacggaccgttccatgcaagagtcggactcggacagaggatttccaaccttcaccagcgagaggaagggaatcgaccctggaggaggaagcgcacagtttgggaggcagaagagatggaagtccgcgccaggttctctgcacattgtgtttcttgagatcatcggatgcatcggacgggatagctatgctgttttgattcgagtattcgttcaattttattttggtatgagtataacgtcttcgtagactaaaggcgggagcaattgggactaacgggcacgacatgacgtccaagacaaactgagcagtctcactcaaccgttcacgtatcttggctgatgcttcttgagtgattggcaagtagtccaacccatcgtgtgtggtaggtgggatcaaataagatgctcgatgtagttgagcagtgattcgggggctgagcatatgtgaaagaaattagcagaagtcaaagtcagcaagtaagaacgagatagaactcggatagaaaacatccaagcgactaacgcagagaacccagatgccaaagagaaatgaagtagagacgcaaagattccacccgctgtgttggagccattagggaacaggaagaagagtgagatttccgatttcgtgactatcagccagttcaccagagatagaaaggaaaggactcacaattgtgccagaagaaattctgacctcgttcgagctcgtcttccgtgacaaccagctcatcgggaggtggccttgagacctcgttccatagctttatagctaacccggggtttccttcccgctgctcctcatccgctttggtagccaagaagaggaggaggtcttgatttgccaaatttgaggaggaaagtgagctgagaaagtcgtcgaccggaggatcggccatgcgtgaatatctgtttaaaagacagaatctggttctaatcaaggcttctggaacggaatgaacatcatggttggatcggtcaatagaaagaaacgaaccgatcgagctgggaagcagacagacaatcatcgtcccactcaaacaaatgatcccaaaactcgatatgatctccagctttaaagtgatctgaatcctggtttgattgcagatggatcactttcgaggggtccaccgggcgcgagaatggaggaacttggaacggcatgtgtggatgttggggtcgatgtggatggctaatgtggaagagggctagtccgatcattttctaagcagatcatcgaaaaatgttaagataagataaaggattcaatcctccacttgatcgggatgacgttggtcgtctcccttctttgccagccatttcgtaacaaccatcttgtctaccctacacatacacacacacatacacacccactaacaaaatcatcatggtaaagcctgaatcagatgtcatcaaagaattcaacgagctcgtcaatatgacgcctcaagaactagaggattggctcaaaaccgaggactctcaaggcgccggctggcacaaccgtttgttcttcttttacttcttttccttgttcgtctacgcgtcataatcttaacccatctctttggcttggtgatctcgaccttctttgcacgccatccatccgtgtgtgggacctgtttagccgactcggctgtaggagaagggaaaggaggagaagccgtaggacacgaatctggtcgacagatcatccagatcttgaagtctaatcctgagaagaaaccagatgggtacggaaaagacgatgtggagcatatgagacgggttgtctcttactggtaagaattttctctgtttatcttccatagccaaaatagagcgtgtacacgatcagatggatgggtggatggactgacttccagttgatcgaaacttttgattcacagtaaacgacacaaagcaggggaatcaagcgggaatagctccaaatcagaggaagaactgaggcagacgaaatcctacaagtctctcaagaactggtttgtccttcttctttaattcaaacattgtcgctcttattggttattgtatctcgtctctcttgagaccctgtcgactcaacatccgccttttctccctttcttcgaactctgtttccttggcgaactacgtcgtcgaacaatgcctcttcaataaaggggacacgatctcttgaaatctcaagggaagaagaaaccggctcattcctcgtcgtctccggccaaatctcctcccaagaccaaacccaagtcccagaaaggaagtccttcgaagccgtcttcgaaacagaacaaacctccgtcgaaatcaaagacacccaccaaagcttctggttccggctctggatccagcaagaccgaggagaagccgaagacgccaaagaagagtcctcagaagcaacaacagaaaacgccaggttcgagtaaaaagcctgccgggaaagagaaagcgactccggagaaatctcctctcaaacagaagtccgagaaatcgccctccgtcagacaaacccggtcatctgataaaacaaagggcgacgagaaacggcaggccgaagaaggacctacgaacgagcggtcacccaagaagaccaggaaggagtgaagtgccgaaccgtcaaagagaggttttctcttgtccggtggtcgcttcgtgatgcgaggatatgcggtgcgaggataattttagctagcgtgtttatcattgtattgtatcgatctcgatgtctgttcacaaggagccttggtctatttctgaaaagagtctaaagtatgaattgaccatataggtcgtttgaatatggggtatatctagaacgaatagtacgtagaaatgaattcctgaaagtagaattacatgcacggccaccaactgaacaatgatgggaaggaggaagggatacgaaagacttgatgcagaatacgaagagcatacaactgattgaatgatgatgatgatgatgattgtgttttcgagatgaccgtcgtgggagtacaagatagagatgatgacgacgagaaaaagataaaagaggcaaagaaagcaagcttggacttttatcatgctccaaagttccatattcgctttgaaaaaggagaagcaagaaagaaacaaaaccctcggtcaactcccagctcatgaagaaggatgttatcatggaaggaactcacaacttctccatcttcactaccactcagaatctgagtatccgtcaaactcaaacaggtcactgcctcccgatggccgacgagggtttgcgagcactttccgtcttccctagaccaaactgagagaaacgcatgcgataagcaagtcagatgtgacggccggagaataccagggagatgaccggggataggacaagagctatataacatacctttgatggttcggtcatgagatgaagaaaccactcgaagagggtccgcatcgactgaccagacaccttcgactatcgcagtccgtgcacaaggaatcaatcgaaaatcagctacagaaactttacagttttcgtgaaaacgaaaacgaaagaccttcaaagaagaaaggagactgactgtgtccgaaaagcgtctttttcgtcttgccagtctcgacatcccatactcgaacggtgttgtccaagctggccgacatcaacaatgcctgtttttcatccaccctcgacctagctggtttcgtgggtttcgggctattcgaagggttagatatcgagaagtcgcccagaggaggtgtcgacattctggggtctgttgggtttatactcgggtgatgagccatcaaatgcggtccggccggcagggagtgactcggcgttccatacacccccaacgggtttggctcgtagtgcccacttcctctttctcttgaatctgccgactgtttcgctcgcgcagcagtttcttcctcctcttcctcctcgtccctatcacggtcaacgatgcacaacctaagactttggacttgaccgacatgtccttcaaatattctgacgcagtccttggtgttgagatcccaaagtcggatggttccgtcatccgagccagaaaagagcatcttgccaggatcgattcctgtggacgtgacaggtggaggggtaggggcggctgtagaagtcgaaggccaatcgtgggaaaacgaagaagcagaggacgaagtcgagccgtcccaaaggacgacggagtttacccagtctcgatggcctcgaagggtaaaacagtcgcctgttcggaaattccagatctgggggccgaaagaaacagttagtatgtgtgactatgaagagataagacaggtcggtcggacaagaaaaataagacataccttgatggtggagtccgcacttccactggcaagaacgttcttgtcataatttaaagagaccactccgtcggtgtgtccacccaacgtccggatacagacacctgtgcgccaattccagattttcatcgtgtggtccatgctaccggtgataaggatggcctcatcaaactgaagcgccctaatgcctctggcatgacctctcatacagagaacctcctttccactctcaagatcccaaactctggccgttcggtcgtaactaccggtgatcataattcctttgccaacacctccgctagcaaactttgatcttgatttggatgcatccaatttgaatcgttcgccgctgaggacctggaggcacatgacgccatcggtgtggcctttgagcacattcacggtataccggcctttccgccagtttcgttcgatcgtcaggcgttcggtgtagacttctttccacggtctagtcaacgttctacatggaccgaacggccgctttggtaggctggcgctctgggaacgcccaccagatgatggcggaggcgaggtagagaggccgcgggaaaaggatcggtctgaaggggtagctcgtttgtgagaagaagacgagtcgttagcctcgtcttccgagccgggagagtcccgcttggctcctcggggagagaccgggccggattcgatctggtgaaggttggaaggtgacggtggttggagagtggagggggtggtgatacatgaagaggaagaggatgagttctcgggaccagcgagttctagggggatatgtggttggtctagatgatgatgatggtggtggtggtggtgatgttgatgtgaaaggtgatgcgagtggttgtcttctagcgaagtcgcctcaagagcgtgaatggtaggagaactgggagcagagtcttcgtagtgaccgtctatttctaaacgaagccttcgcctttccagcaatggcaatccccagccgcctgttaagagaagaagtaaaggcagaggcagaggtcgcgtcagcgagaacaacgaggcaacgagatgtttataaagagcgaccgatcgattgacatacactttgtgcatttccgttctatgtgttgggcacacatgcctctccaaagaaagtcgtcgtcggccaaacttcgccaatgtttgctgacctgaacggcttttccaagcgaaaatgcgtcgaggtaggagagaaccttgagggagacttctctaggaaacaaatcgaacgggtccagacggatgagatcttgaacctgggtagatagaagggagagctataggcgaagtgaaccgcataagagaaagtaagaaagaacgggacactcggaagtcagcacggaccgaggtacaaaagtgaagaggatcgagaaaaggaaacggacctggctgaaacaacacatggtcaagagccctttaagaatgatctctcttcttgagtgattcgagctggagaaagtggaccagacggcgttgatggcttgacggtctgcgagcggcaaggcgtcgagggactaagaacaaagaaaacgacaagcaaagatagagttagaaccaagagatctcgatcagcatccaattggacagagttgaaacagagaagagataaagttaaaactcaccgcctgtaggttagcgttgataccctcgtctgccattttctcgtgtctgatgaaagacagagagagagagagcgagaggagaagtggaggacatagcagtttcggttgtcagtcaacgattcgactttctttcccagcctcaaccaacaaaggtgaacgagagtaggaagaagggaacagggaaaagtatgaagaaggatgagaaggaggggtgggccagggaagagaaagttgggtgaacaggaacgagagatgccgaaggattatggaatccgagaataactccccacaaacgacgacgaccagcgaccagcgaccagcatacatccactgaacctgcccaagccagcgtacacacacacacacacactctctttctctctctctctctcaaacatacttgcagtcaaccacacatatggaagtgggagagcaaagaagatgacccacctaacacatagcttctttcctttacgaaacaaggcaaggtccggtgcctggtcgtcattttcggcgtgggccggtgggcgttcacacaccgagtcccgaagcgagggcacgatggacattgctaaaggatatgaatgtgtcgatgggtgtgttgatggcaactctatataaggggaagtggtggcgttggtggtggtagttgagatgatggagggatccatgatgttaaaaccggcagtggggcatatgtcgtcctcaacggcaaggagaacgaaggagggaaagaaaaaaggtgaaagaataacgcaaacacgcaagaagacgcgatagagattcaacggagtaattgttactattgaatatgaaagtcttggttgaatctgtaatggaagtgtagtgtccggtatcgagattccaaaattaacggaggaaagctcgtcatctgtcgctcatcccatcagccttgcgccatcgagcttgactgtttggccattccgccatgtgctcaccttgtgttagtgtatatcgtaccctctgtgcgtcagcacgtgtatccttctccttatgcatcagtctgtgtgagtgtgtgagtgtgtgagtgtgtgagtgtgtgagtgtgtgagtgtgtgagtgtgtgagtgtgtgggtttgagtgtgtgtatgtttatgtttatgtgtggttctcatcttttcagtgtgactcatatctgcttggttgtatatctctgcatgcaactccttctctgtggagattatgggaatgatgtacaatctttcccaagaccagtccgacgcagtgtatctcacttcaactgatctaatcttctcttctttttcttgtctcttaatcatcacattgagaatttatctagttccgcaaaacccacccacggcttaggaagcctggatgccatccacagcctgactaaatgagttcaatcacctgtctacgtcttgccacattaacgagcacagcagtggtaacatgtgaccgtcttaccctcctctaccctctatccaccttcagagtcacaccagtcacacttggcttttttttttctgcctttttttttggtcaacattttaaatctctcacctttttacaattcccaaagcccaaactttcatcccaactcatccctcactctcgacctcacccctctccccttctttgctcaccatcagggtcaactgattgacaggatgtgagtgtgcttgctgtcatcgcggtcttgtccacttccgagccgtctcgttacagaccggaagggtcgactgatcgactgaccaaactcgttcctggccgcctcttacgtttcttttcactaccacatgaaacctactcgatctcctttcttcttcctcatctctctcttcatctaggttgacattcgaaggctgttccgctatttcgtcggctaagctcgctaggctggtcgcaacgttgcaaaccgttgagccaaagatcaccggtgcttcctcgacattcattcacctcatcgatgtctcgtccacacaggcacaggccacccttgcggacgaggcctccaccgaacgacacattctcgatgctctcctcagatacggtgataccctcgactctacccttgatccctcccatcaactcactcagatttggatcgtccctcgaatcggcacgctctctccctggtcgtccaaggcgacagatatcgcacggatgtgcaacctggcctcccatgttaaccggatcgagcgaggtgttctcttcaccatcgcctctgacggtccaatcgatgtggcctcgtttacatctaaagcaagcaatctccttcacgacaggatgactcagtcccttctcctagagtccccacagagcgaacagatcttcagccgctccgcccccggctcgctcaaatttgtggacattctctcagactctcagcagcactcatccgctgaggacggtcacacctcccaggtgctctcccctatggatcttctcctaaaggcaaacgtcaccctcgggcttgcactctccccgacagagctctcatatttgctcaaagcatacacgtcacttgacccgccgaggaacccgactgatgtcgagctctttatgtttgcccaggtcaactcggagcactgccggcacaagatttttaacgcacagtggaccgttgacggaactgtcaaggagaactcgctctttagcatgatccgaaacaccgaaaaggcctcgaccgttgacggaaagtccacaactatctcggcttattctgacaatgcggccgtgatcgagagtgcgtccgaaactatccggatgtttgctccttacggatcggatgtcgatccggccacctccctctctactccttacagtcttcgaccggccgacgcctacccaatcctcatcaaggtcgagactcacaaccaccccaccgcggtttctccgttctccggagcatccaccggatctggaggagagatccgagatgaaggcgctaccggtagaggttcgaaaccaaagatgggtctcgctggtttcatgacgagtgatctcaacctagacggttggcgaatgccttgggaggaacaggaggatgtcagtgaagatgacaaggttggcaagcctgcccacgtctcttctgccaaggagatcatgacttccggccctctcggatccagtgctttcaacaacgagtttggtcgacccggacttaccgggtaagtccttcaaagctcgttgcgttcatgtcttattccccgtgcgcgctaaatcccatcgtcttctatcttcttcctagtttctggcgaacgttctcccttcccgttccttctgccaccaacacctcagtcgacgctgtcgagatcagaggataccacaagccaatcatgctcgctggtgggttgggtaacgtccaagctgcgttcgccctcaagaagcacatccccgccaactcccacatcatcgtcctcggtggacccggtatgctcatcgggcttggtggaggagccgcgtcttctatgacgtctggcgcgtcttctgccgatttagactttgccagtgttcagcgagagaacccagagatgcaacgtcgatgtcaaatggtcatcgacgcctgtaccgggcttggcaaggacaagaacccgatcgagagtatccatgatgtcggagccggaggattaagtaatgcgctccccgaattagtccatgactctgaccttggtggtcggttcgagatcaggaacgtccttgttgatgatcccgggatgagtccgatggagatctggtgtaacgaaaggtgagtctattgtgtgcctgttcatatgtatcatgtttttccagactgatagattcgtatgtttcgcgttatttctactccctcttagtcaagagcgatacgttcttgccatcgctcccgatggacctaacctcgctacgtttgaggctatctgcaagcgagagcgatgtccgttctccgttgttggtgtggccaccgaggagcaaaagttgatcgtgacggaccgactgctcggctccgagcccatcaacctcgatatgcccatccttttcggaaagccccccaagcttgagctcgaagctcacactgtccagcccaagcgaattgaatttgattcttctctcaagtcctacttgccctcccttgattcgggagccatcctcaaagaggctatcgatcgggtcctccaccttccggccgtcggttcaaaatcgtacttgattaccatcggagatcgatctatcaccggtctggtcatgagggatcagatggtcggcccgtggcaggtccccgtggctgacgtggctgtcaccagggcttcctacggtttcgatgacgttctcgagggagaggctatggcgcttggagaacgaacgccgttggctttgctcgacgccgccgcttcggctcgaatggccgtgggtgaggcaattacgaacatcgccgcttcctcgatcgagtctctgacgaagttgaagttgagtgccaactggatgtcgccggcctctcatgctggagaaggtgcaaacttgtacgcggcggttcaggctatcggtatggatctctgcccagccctcggagtgggtatcccagtcggtaaggactcaatgtctatgaagatgaagtggacaaacgaacaaggatcttctagggaggtcacctctccgatgtctgtcatcatcactgctttcgcgcctgttaaggatgtctctgccacttggacccctcagcttcagaccgactccggagagaccgtgttggtgttcattgatcttgctaagggcaagcagcgactgggtggatctgccttggcacagacgttcaagacgattggatcgactcctccggatgtggaggacgccgaggtaatcaagtcgttctttgccgccgttcagacccttaaagaggatcacccagagattgtgctggcctaccatgaccgatcggatggtggtttgttcgcgagcgtagtcgaaatgtgtttcgccggtcgagttggagcaaagatcgacctggacgagattgacagcggctctggtgaaacccctcttgaggctctcttcaacgaggagcttggtgcggtcttccaggtctcgaaagacaaattcttcgaattcaccgaggtctttgactctgctggattccctcacaaggatattcacttgatcggacgacccaacatcgagcatgccgaccagtccatcaagatcatccaccacggctctcagatcttctcctccaccagaggagaacttcaacagaagtgggccgagacgtcttaccgaatgcagtctgagcgagacgatccggtcggagcgaagcaagagtttgatgccatccttgccggacccgaagagtctggtattcgatacaatgttaccgctccgttcttgcctctgatcgacacgccgtcgtgcccttcgccttcgccctacgcgaattcgccgaagccaaaggtggccattcttagagagcagggtgtcaacggttatcccgaaatggcctgggcgttcgccgctgccgggtttgaatccgttgacgttcacatgtcagacatcatctctggcaatgtctcgctaaagaccttcagaggacttgccgcttgcggaggattttcctacggtgatgtccttggtgccggtaacggttgggcccaatccgttcttcttcactcgactgctcgaaacgagttttcggcgttcttcaaccgggaagacaccttcgcactcggtgtttgcaacggatgtcagttcttctctcagctccgagatatcattcctggagcagagaactggcctttgttcaagccgaaccagagtgaacgattcgaaggacgggtatgcaccctcaagattgagtcggtgtccgaaacctcagtgttcttcaaagagatggaagattccgtcctccctatcgccgtcgcccacggagaaggtcgagcggtcttcccgtctaccgcttcctcctcttcctgcatcgtacctgctcgttacgtagactctaccggatcgccgactcaagtctaccctttgaaccccaacggttcacctgaggggatcgccgctgttcagaccccgaacggaagagtgttggcaatcatgcctcaccctgagcgagttgttgctcgggatagcaacagttggttccctagggagatgaagaatgaaggccggaacggaatgggtccctggttcaggatgttccagaacgcaagggactggtgcgcttaagcctgttcttttctgactttggttgcttctcttccatttttttcccctttccgttttacttgttgttctacccgatggcggaaacgcgaaaaacgtttttttcttccctccaccaagaaaaagaagtctacaacatgcaaaaaaaagccgacaatagactcaatattctctcataattctcattttttttgacctcggttctgtttctcttaactttattctctcttggcttttctatttcctatcatttgcctcttctgtttattcggatgtccttcgttccattttgtgaacatctgagtcgtcataaagagacaggaaagaagaacaaactaaaacaataaagaatatataggaaaaaagggggaaagaaagcctagttataagatgaaagggcttgatctgtaaagcaaaacaaatcacacgaaacaagaagataataattgagggtggagtaggggtttggtgtgggtgtaagagatagtgaatgagtcaacggaagaaccacaacaaagagatccaaccactcttttgtaaaggattttgattttctttgaatctagatcgggctaggtagggagagtgcagtgcgacgagagaaagagaaggggagcgagggaaaagtaactctaagcggtgattgccggggcggaaccttcgggcactacgcaaacaaaaaaacgaagaaagatatgaagcgcaaaacgcgtggttagttagagagcaaaaaggcttgggcagggcagtctatgagatgccagcgcgtgggtcgtctaatcttctgatcattctctgtctttggtcctctttgttctccctctgattttcttgtccccaattctccaatcgatgcggttgatttaaatgtgacaaaaataaagagaaagtgaaaaaagacctactttgcggcatctgaggtcggttcatatcagtgaagaacatcttggagaccacatatccagcgccttctatcacacccagcaagataccacaggtcactgctcccacagccgctcgtttcggtccctctagtttgcgttcgaagcaggtcgatagatttatcgataggaaagcggttgaagacacacaattttgagacattcgtgccatgacatgaacgatgttaagccaatgtcagtttcgttatttttctctacttattcttcttcttcaggactgagaaatgaataaagaaaacgaagaacgcaccccgacaggcgagggttcctcctaccaagaatccagagatgatagcgttccaagcatcttcctttccacgatagtgttttacactgcagtcatatgtcgagaagagacctatggagaggaagcacacgccacgaacagatgagtgtgtgcttctgaaatacaatccacatgaagaagagaacgacggatcagaaatcattgagactaacctccccagataccaaagtttcctggtaaagaaagagtcaaatcgaatcaaggttaattatagcgggcctaaggtctaagcagaactagagggatcatgatatcactccgaagaagagaacagacctccaagaaccggagcacgggccttgacggccgaaagcgaaccaactagtcgggatccctagagtgaaaggacaagtcgaatcggcacatcaaacgcaatatagaagataagaaagacggatacgagaccagaacaagcaaagtttcgcggtggattcttaaaaagacgatgaaataagacgtacacgaggagagtttcgagctcccttgattgagtgccagatagctcctccggtaagacccatggcgctgattgaaagagacggaatgaaagagtgtacgtgtgaatatgaatgtggatgtgaatatgaatctagaccaaaatacattctacactcacaaggctcctccaaaatcattgagaatgacccaagggctagattgtttagtcggatcgagagaatgagacaagacaagcgtgaaatgacaaaaaaggaatacagagaggaagagaaaaaaaaggagaaagaggaatgtcggcaaaaaagaatcagtcccgtctatcagatgaataaaaggcatcatggaaggacacgaaccatggatctcgagaacgatcactgtgagacatgataagaggatgtgaacttgaagttgtgagtgtggtgttgaggatcaaaggtcggtggaagtgtcgaggtgaaggagagtggaaggacgagtcggtgaacctgaagagaggtgagtgatctgtaacctgcggttacacgattgttcgaaaattgatcgtgccttttttgtcagggacgtcatctgggagataaacccctgtaaccttctccttctcctccttctttgttgcacgtgcccctccattgcatcaatgtgcaggtatatagtcttccagcacggacgcttctagcatatctttattttattttattttattctacctttcttcttgtgtgtaatcgtatggatctgaggacgatttacaggacgggatacctctgccacccctatcaaagtctttcaagcttggattctctgttaccttttgtatacttgtatcttgatctatataaattctgttctttcagcctcttcgccttgtgtcctcgtcacaaccgcctcagcaaatgatcctgagcttcctccttaccaggcacatttcccgtctggctacgatcctcgtaacctccccgctactatctccactctggatcgaaacactttcatcgtcatgatcacgtgcataactgttaaagagcgttatctgctagggatataaaactcagtgatttggagagtaatcgagtatactggcttgagacaagggtggacactgagactcctcggcgcagattttggagatgtaagtgaagccgaccagaccgtcagcgcgccactgtcgattagcctagagactcaagagttatatgtcgattgcgcaaagcaactgtccatgcccaaggagaggagtagagtagagtgtgtaagctgacctcttatcttcttaaagttgtttttcgactattcgatgctggtttcatcttgaaatgatcataaaacttcttgcttaacgttgatgctcaacgacttgtccatgatccactttccctcgtcaccttcgacgtctcctttgtagcatctctttctgtggacttttctattatgggttactcgatggctcaagagtttgatattggactactctttggggcttcactgcacttcttcttccgaaaagtacgtctggcgtctgtttcggtcacatttaggttctgtggctctcgttcaatccttgcgactgactcgtttgcatattgatgtagcttatgtatcactacatcaacatccatctcgcaccccgcatgccagaacgtccgtagatatgatcgtccaagctttgcagaacttgtcttgcagtggaggttctttccaagagcttagcagtgaatttttctttcgtgatctagcttcaatacttggtatattccggttcacaagtatacgatgtccttttcatccttagagctcaacggaaagtttgtcaaccgtgttacgagtacaatgcttgcacgcaagaagagatcgtgggatatgtcaggagcgcatgtgccatacagctacatgcaactacatacagctatttctgatctaattcatacactcataaacctccgtcttcttttttattccctttttgacagctatcgactatagtctacgtagagatatcgtcaagactctccgtttcacaagatcataagataactggtctagcgcgttgcgctcaattgaagccgtcattgataaatgtgacgagcttggccgtccgatgttatctggtgagctagagatcgacattgtgttttgttttgtgcttctgactcagtaggtttggtttggtttggtttggtttggtttgtagggttggtaaacttttatacggctaggtggttgcataaaatgaattgtgtccggcctatgctaggtaagcgcgttgttctttgccctttttctgttttgtgaaacagtgggttgaatttgagttctcttgatctctaatctaggttatgcacatacgagccggcaagcttattcacaggccaatgcccttgcattgtcgaggctggtcacctccgagtttgcagtctctcttgcgcccctcaataaagatatcaacggcatcaagttcctagtgacttggtcgcttcatgcatggctcgaccaccttcaacctttccggatctcgcgccgctgttatcttctctcggttcatccgtaaaacatccgctgggcgaagagaatgggagcgaaatttatagtgaacagttttcaccctcagagattgagaacctgacctttgttcgatcgagtctagtcttggcccgtgaaaaggtatccaattgagccttatcttcccaatttctatgttcgatcctcaccgatatatgtatacacatcaatcatgctacaagaacctgatgcgataagtgtgtattatctttgatccggtatttgtttggactgtgcgctgatatatatttgacaacaaagtggttaaactacttcgaattctcctccaagtaagtgcacttattcttcttcggtcagactcgctacctcagtcgttccaagtcccatattcctggcaaaggttctgtgtcatgtgattgcgactttcgaaagctcactgactggtcgacacggaagatatgcacatcatcgaccagcagttgagggtttgagatgagtttcttcaagtctatgaattttgctcaatattgtttgtctcagtagctaagatattcatagatgagatgaagacatgagatgaagacaaaggaaagataacatggtacgaaggacgatgtcatatgggagagctctcgggcgcacagatgagccaggagcagacgatgagcatcgacaggaattagcgttgacaggaaagaaacaggaacagcggtcgacaagtgttcagccgtcaaagggaatttcgcaggcacagccggttgatttcagggcagaacacgagcaggcacacaagcgatcgacatctcgccctgatgacgttctctcaaggcatctccagccgccacgtttgtgttcgacatgaagcgcaggaggacggctcaggccttggcaaagtctcgcctcgcagctgacactactgccactgctactactactactactactgccacatgctcagcctgctgtcaggttgggaactcaaggcgatctaaccacctctgcccgttttacatccctcgtcagagggtagagattcgcgccaagtcagcggtccctatggtgtcacggacggtgaaaataggctttggttctttacttgcctttgggccactggctggcccgatcgagtcggccgttgcccggctaggaaagataacattcgacgcgtctcgccttctcaatatccacatgtcgaaggtctgtgcggatggaggggagataccgaatctccccaatacaatacggctctatcttcaggctgttggtttcaacacgcgcgaaggtaatctgcaccaaggagcgccaacactgaacgaagggatcaaccacatccgggacgcctctttccctgctgagcaccagttcacagactcgaagtgagtgatctctttggtgatgacagtgatgcagctggctgtgaacagggactgactgatttgcttttgtcatagataaatgagcaaaatgatcgacttcaaagctcagtcgtggaccacggcctgccagaaccatgtcgtcctgaagatgcctcgtcgggctcctcggctcgtctcttaatggccggagacaaacgtcggagaagtgatccagagccggatcagtatcagtcaggtaaggaagacgagtcatctgaggagatatctgaataaaggctgcagcaataactaacctatcttatccatttgttgattctcggcgaactgtcctcccgcattagctctggaagcagcagtcccgtcctgtccgagagggagaagagagagaagaaagagaagatgatacagaggaggaatcactacaagctgccgcatccttggcccccgagatgcggctgcaagacggactactcgtcgccgggggcatgacctacgcctgttctcgctcctgccgctctcgtaccaccggtcgtcctatgtctttgtagacaccatggctctctacaatctctgggcccagctcaaatcggaggacgcggatgtgggatatatgcgcggggtgactcaggagtctttccgggatgactctgatatgtggtggaggctgtcattccatatatccaaggtcgagaccgatcggcgacagtttgcccggtcgctcagtacagacggcattggagtatctgccggaatgctgagacccatgtcgtcttcatctggcattgacaactacggatggagatgggaggtcgaaggcaaggatcgtcaccgagcagagtatgttccgtgaggtgtgcggccagaggacgaggtcgtggggctggacccaggccgtcggacgctgctctcgacgaccacaggagggctcaacatgtctctggacaacggcggtctggccgagcacggcacgcagtggtctctctccctcaagtcatggaagcaccttgcggggatggaccgagacgctcggaaacagcggctgtggatgaagaaccatccgaaagtgtcaaccactctccgtggtgagtgcctctcacgttcacactaacgttcaagctgactgtatagacagccttactgaccttgcagactgccttgcgcatatcggtgtcttgattcggcttctttctccgatgtctttctccagatcttccttcgttcagatttgccagtctcgatgatctccgcgctgctctcacttcgcactctcagtcctactcctggctcgcgacattcttcgctgctcgacggtggagacgtcttcgctagggcgcacacatcagccgcgagcaagcgtaccaccaggtggcactccgtctgttagctggacgtccacgcaccttcctggcctttggcgacggcgccttctcatcgacatctcgtgggcacgatcctagtcctgtgacgatgatgtatgtcaagctgagggcctctccgctgctccaggtccgcaaagtgcgagagtattggacgtcgaggttgttctcgaagtgtcatggcgagttctctggaaggaacaaagcgtgggcgatcaaggagtgtcgaagcgtctgtcgagtaagtgacctgtgttacaaacttatgatagtgtctcgatgactgatcgttctctgtgcttgctcattgttctctctgcttgctctctgctctctctcagacttggtggaacagagatgtaaacgcatcgtgcaacatgctgcacctagccctgcaccaagagaagaacgagggggcaagaatgccgggctttgacgctgtcgctagtgaggctggcacagactaaacccatgacccatggggatcttggcggtctgtggtctgaggacacccaagtccaaaagggccatgtatttaccaccgtcggttgagataactctcaccgtgtcttagggcagctccagatcccgacataacatggtttcaaattcgtgtaacatcagactcaatctagtcaatcagcccggctgtcggatacccattgggctccacaaccattgaataatataaaccatcgatcgatctagaattgaactgaattctggtgaagatcgggagctaatagctgtggcgtctgcctatgcacgtgttgtgtgtacatatacacgtggccgtatagtgcgcagtcttcgggatataactaagcgccacaactgatcttattcggttcctctcgtttatcatttcggcgacttccgtgaacatactttggagcgcgggaaaagcgacggaaggaacaaacccaaaaatgacatccagagcgacagggctacaccaacgggagaacgtagccaattcaagcacataaacacacaaacacacaaacacacaaacaaacggcgaaatgttctcggcccggcaaatagactgacaacgcaaggattcttcatagtttgtatatccgacgataggctctggattttttgctggtggtctttgctttcccgaaccattgaccggatacaatacaagagacatacgtagtaatttgccgtttgcttccagttccttgtgtattttataagttattttggtgtacgcgtaagtaaatatatttgtgtgtatacgtttgctaacattgaatccagaaacgccttcgtttcgggtccgtccaacaaaggaagagtagtccaaacgagacgatacggtttatgtacaactcctgcctctctaaccctttgctctctcctcccctcttgtgagttaccttctatctcggctccgatgtttgtgtgattgaaaggaaacagttcaaaagaggagaggggagaagaagataaagaagaagaaggaaagagaaaaaaaaaaacgaaaaaggggatatttcatcgaccaaaccagctttgccgggcctgagatttctttgaaaaactggccggattgacgtatgttgcatcgatcaagatcgggagatgtatcttgcagcaagagaataccttgcttatccgttctttccttccctttgcttatctctttctccccttctgactgatccgtctctttctttccttcttctgcccttccctcgacgaacccctatttcaatcctggcgctcatctacctcgtgtgtgtgtttgtgtgtgcgtgtgtgtgtttatgggcgaacgcgtgcatatgtatctgtgtgacgtctgcattgaacaataaaccctcagcctctgatcgaacataaagaaagcatatgtgatcatttctccttcttttctatgctcgggctacacgctaacaaatcgttgctcctcttcgttatctgtactcgttcttttcgctttttatttttgttgatcagcattctgcggttgattcgcaattgcatcgtacttcaacctgtatcgtacacaactgtaacgttcggtacaattttatcgtcggctcgcagctcttccttgctgcttccggtctcggttctacttcgcttttggttttctcaaggcgttaaattcgttgatcaaacacatctctaacaagattgatcgtcctcgggaactcccctcttgacaacatttcttactccgataccctcccgaccgacttcttttctttcttctctcctactatttcgccctcccccttttcctcttgatagttcattcgttggtcttgaaacaaatagcacacgatcgaggaacggaacaaggtaaaggagacactgtgtcatgtatcctcaagacaagtcgggagcggacaatgatcagttttctaccaacggtcaatcacaagcgactcatcattatcctccatggcagccgcatcaacaacagcagcagcagcagcaggaacaatcgtcttaccaacaattgcaacatcaatatcccgttgatacttcattcgcttcatcctcccgagatacccccgctccatccttccagcccatcgtccgcccttcctcgagagcaattcgtacagaaaagtcaaatatggcttcagcaaacgcgaacgcttcagtcctcagcaaacggaacaggcaatcatgtagtggctcgagacctacatcttctaccgttccagcttcaacatcgaccagctccagtgccgccggcagggttcaacattcagcctgtggagcttgcaggctccgaagagttaaatgtaatcttcaggaggagaaacaggcctgtagagagctgtttgagccctaccggaccagacgttcccagagatctgccgtcgtcgtcgggacaggcgtgaatgacgcagatggcttcacgctcgtaaatggagaaactatccgttttgatggggagaaaatccaatgtctgaattgtaaacaacgagggctgaaatgcttgagttcatttcacggccaaatcatcaattctcatgcatccgccttgccatcctcctcctcctctacctctttagtttcctctttcaacgcatctaccgcccaagaaggagcattactcgctgagcaatataccccacaaaatcctacatttaattcccaagtatctgcctcatcatcccggccatcgtcttccactttcaacccggtgtcagctacggtcgtcgacttggtgacaggcaagactaagaccctccgaagaggaaaacgtatcgctcagctgcaagatcaattcagcgcgatcctcaaaactacacaatctgaacctccttctacaaccgtttctcttcctataaatatggcttcgatttctgcccctgctcctgcctctgctgctggccgtccttcatcttcggacaaatcatttatatcttatagccatagggacacctcctttgaatctattcctgactggaacactgacgggcgtccttctaatactggttccagtcagtatcgtcgatcaggggaggacgacccaatggaagatctgacgagagagtttttgcaaagcgcgtttttcgttcggttgcatgtccaacgtcagtagattctaattctcttacctatccttgtttcttctttttatcttgttcatcaaggcctgtcacttttatttgattgacacatttccttcgtgtacgttttcttttatctttcaggtccgatggtacatcccgaagagttccatcgcaagttcctgtcaacagatccaccacgcgcagaaaacctcggtcctgttgttcgtcctctccccgtcagcgagccatctcattaagtttattgacataccattaatttttctttaaacgacttggttgagcgttttattagggcgcaatcttggctcgaactatgttggcatgggcgtactcatacggcgtggaccgatttggaaatgaagaatcctctcctacaacaaacgacgacaggcagagacggcgcagacggtgtaaccgagtcgctaaatactgtcttgaagatatcgatcatttagggtacagtccagcctacctctcgctagagattgtgttcaattctttctgacaaatctcttaacttctcgtcatttcactcgttaacaccagtgtgatgagaaaacctagttacgatggagtccaggtgttattattgatcctgcctctcactgagggtgcgccatatgctttggtcctcatgagcgatgtcaatcatcaaccacgatactgattttttctcgttcattcgtttctgttctatgctttctggctttctccttccatccatctgccgagtaaagatgtggccacaccattagagagactgacgatttatgaagctgtagtgaatcaagtgtactctctatgctcactctcgacggcaacgtacgagatcttcgaagaccgagatgctgtgaaaagagatggtcaccatgatgaagagttcatagtgaaagtccgaatatactggtactgctttggtgagcttctccttcttcactttcttcaccttaagaacttcggtgtatccttatagtagttctaggagattgacttaacaaacattctctctctacttttattctcttctttatctagttcatgaagcaataaaaactggcttgaagggagggaaactcatgttgttcgttcttttaccaaatacgtcggtgtctgtcatagtttgtctgatgtttattcttgctcaacagagatgaagaggacttatacgaatttcagaactcggtaccaaacggaatgtctctagtctcgacacctcaacactaccagctgattgctcaatacgctacggtgtgttctcatttgtctacttgagagcgatttatagtccaagcagagatgttctaattataaggaaatatgtatgtttttgaggtctacaaggccccaatccgactagctctcgcttgtcgaaagattcactctgctctgacgggtcccaaggctcgtaggaagagagacgtagacatgggacagatgaagcaggcttgggaagttctagaggcctgctctgaagagtttgatagcttgttggcggacggagtcatgttaccgaatcttcggagagaagacctagaaagatattgtgacggctggaaggttttctcgttctctttctcttcattcatccagtcactgaaagattttgcatcgctgacgttcactttctgcgatgtctttagatcttcatgttcgaatgtacgaggtcatatagtctatgtacacccttggtagatgcatctcacatctcgctgcttcgtgtttcgaacctattttgtaattttgtcttgttttgttttacaggccactcagttgtcagagaagcacttctagaccggatgcgtatcctagaagactcacagggtcgtgtgattgacgtatcggatccacaggctcatatcaatcaagcggaatgtctcaaaaacattcaaagaatccatatgattgccgaacgtgaacaactaatatatccctcttccttcagacgcagctcagtaactgaatctttcttgtgattttatgtagaaaaatgttcgacgcttgccagaacgatcgtgatgatcgcgaaacgacatctaggtactcagttctttgcatatgacgcaagtcttgttcgtggtcagtctcaatttttttatatttccagtctagtgaagagcatgtgcgcacatttggtaaagacctttgctaacacacaattttttctcatttcctccgaactatcttccccaccattctctactttttcgttacatccgctccttccctcaaagatggaatctactacgcggctactttcctcgcgtccgacggtggatccgccgatgaaatcaacacttgccttgccgcgctggacgagatgcgatgggcattcagcaagacatccgaacgaaccgcgaagatcaggtcgatatgggcgacaatgatgactcaaaaccgagaggacgcgtatgatgacgattatcaacaggtcaactcaactcttgaccatcttcaattcggtcctgcaccgacatcaacaaactccccaccacagcaacggcaaacaacgcgttccgcgtctcatccgatgccgtttagtgaatctaatcaggccccagcgttcagatttccctcgacggattcttcctccttgactgccttggaaaaacaagcggcacggtcctacatgcaagtacgaaatcagtctacattgcaaccttcgtttcaagtcccgagtggacctgaacgacggcagtatgaatctcagcttcagcagcaaccggtatcgcctcgatcccgagcagagccaacagaaaggccagctcgaccgatgggccctgttccttcaatcgcccttgctttgggcatgccgctacatctcaaagacaatgctccggtcggaggcgtctggataagcgagaattacggagaaagctcggtggggtccagcctcgatgggggtcatagctctcttcaatcttctatacactcgtccagagagagcacagtgtcatctgccccagctttttttacacagcagccttcatacttaaatcttgtagagtaccaagacgaagggccgcgccaacaattctacgtcgaagatactcaatacagtgtacagcacccttcccgtcagaaccgagcagctgtagagagagaccgacaatctacgttcttgtttcaacatcaatcttatgagcaacttcagttgtctgatccttcttcgcatcctcccaccgcctacggtgcacttgccaaccctggcacaggagcggaatctgaaagtggactactggtccaagtaatgcatcctacgccgtatcagcctcatattcctcctcctttcgacccaccaccttcatcttcacctcctctgataggttcatctgaccagatgaatcatactctgtatgcttcccatacatcgacttatgtcagctccacttcttacgccacctacccggccacgacgaccggttacccgatggacgctacgggcacaaccgttcatcaacaacagcaactgcggcatatttattctcatcctcagcctcaaggacatgtgcagcctcagtctcaaccttatccggagtctatcagtcctcgctctcagcattgtccagatcaacacagttctcatcagtgatcaagaggacatcgtctgttcgcgcactgatctccgctcgtttacacaacttctttggtgtaaacattccttcaattttcgatcaaggagcttgttcatgggactttccccttgtgctttttcatccgtctctgttcagaaatggaatcaatggaaaaaagaaaagtccatcatattttttagctgtttttgcatatcctcacttttctggtgaactatctattgtatcgataatccctttatctactccgatcaactgaccaacttgggacgagtttgcacctttaatggctttttttaccctcggatacgctacgtgggtttcatggtcttgtgtatttcaataattttaaattcctcgatgctctcgcgcattgtatcggcaaaattgcactgtttagtcgatcaatgatgatatccggttagtcaaatcctgagcacataacaaaggcgaactcaaggcacgacatatcatctattcagagaaggcttttaaaatctcatgagatctccgtcggtaaacgctcgaagtcacatactttcaattctccataaccttacttctttgtcaacgagctaaatatgcgtaaaacaagtgaggtaaaagagaggaaaccagtagtacgaagagaacccccacattctcgcgacaatcatgacctatccgcgctagtaaacgaatgtttcatgttacttctgcagcaaaccatgacaccttttggccccttgagttttggtgtcgagtggaagacctctgatctatctttcagaacatttgttcgagaacttcatcagcataaaccctttttcaccctgatctgcgctctttatactgatatatgagacaaaataaatcaacaccaaaacggatacggattcgctttctttctctcggttggtcaaatttttagataaatgaagaaacatgacgagccgattcaaacaaatgatactggaactgtgttgaatttgtgtgcgcccaagacaactcagaaaagagtgtttgtgaactgccccggagaaaccgtagaatattggggcatgaatgacttactgcccagactgtcgtacactcgtggttcgatctagcattaaagattcgatgcttttagctagttacatcctgtaatccaagggccatctgccgtgcagcggtatgggatggcccgactcttctatatacacgtagacccatgctctgaatgttgtctgagagcgctgccagtcacgtgacttgaacatatagcagagtcgtttaaaacgtcacttcctgagcttcttacttcttcatcaatcatgtccagctggaagagtgagggtgatttcgggcaatggattcttaaacaatccgaagacgatttgcaccaagaacggtcctcttctgaaaagtcagtcaatcctagggatcttctgtctgtcttcctatgaatcgccgctgattcggcttgcttctcctctactttgagcagaacaccgttcgttctatgactttcttatgaatgtctaatgacatttcttctgagctcgaacaactcttgacgattctcttataacattccgtcttgattctagggcatgtaagcttctgctaatatctgccatcgatctgggattgtgttggctcatcttgttctttccccataccctctgacaactcaagtccagaatcttcaaactctcttgaggactgaaaatgagcataataaacgagaactccatcgcttgcacaaatctcaaaagtcggggaaacctccaatacgaacgctgcttgcatatggcgataaacactactcaacgcgccctctgaatgagctagaacggattgagctatgcgaaatgaactggcacaagatccattatgtaggcctgcatacttcttgcctatcagtaaagtacagatggatgactgaaacgcttgttctattttttaactaaaattggtcgatgtaagggtcggtatctacttatcaaaataatatctcttccaacccggacgacttccattcgttttatcggtcaagacccatcgggccaagccgaggtcatcgagctccagacgactgtagatatgctcgtccatacaggcccagagcttgatacactatatcctattggcacgatgctagctattcgcgagccttactatgtctgttgccccgatgaggtcgctcttgatgatcttggtgccaagatggtgtctaggatcagagttgagtcacccacggatgtgatctgtcttggtgcagacgatcgactagtcattgggcttacatggacggattcgccaacggctcttgggaccggattggttcctgcaaaattgtctcctgagcaggcaaagttaatcggaaacgaacggttgaagaaaggatggctcatatcagcagagcgagcgtatacccagggtctgacagtcgatagcaagcacaccgtgcttagacttaatcgagcgcactgccgaataaaactttcatggttcagaggcgcttttgtggatagtcagcatgctctacgtagtcttcttgatatcgcgcccactgataagtccgaatggactgagtcaacccatttgagttggctacagaaggcatatcatcgggctgtgcttgctttgatcggtttacgcgactggtcagttgcacatgagcactgcattgcattcgctgagcagttccctggatttcttcctgcctcagaccttctggcgttcacaaaggctagagtggatgaagctcaaacaggaatctatgattgggcgtcaatatatcgcggtgaccgacagccaggagggatgactaatgtggtcgccgactgggtttcaccttccttcaagatgggctacagtcctacgtcaggtggtgtccgaggcgtcgtcgctgaccgaacgatcgaacccggtgagcttctcgtagtgtgcaagccgttcgcatcggtcgacccaaaagaattgaaagacgaggcaaacacggtggtgacaaacttgccgactaaacagttggaaagcgtggcgcaggcgtatttaacacgcgcaatggtagacaaagtcaaagacgaaccggaagcctgggatgttttgaagaagctgtacgctgggccggcatattcggatccggggttggtcgacctaagcgcatttcgactgcctggcgcaccaagcgacgccgagaaggaggatgagttgccgaatgtggatgtgtcgaggttggaagggatcagaacatacaattcgttcgcgatcaagtctgtcgccatcaaggagaccgggccctctacgatcagcctagccagcgaagaaacgccatccggtttgtttttttttctttgttgatcttttctctcttatggcatctcgttcaatccgctttatgaaatgacgctgagaatatcaacttatctaggtatctacctcgtcccatcactgttcaatcatgcctgctttgggaacgtcagctggaacttttggggtgacctcatggttctccgctctcgccagatcatcttgccaggtgaggaactgacgatcagctattatgccgatcattcgtttgacgagcggacccgttcactcctcaagtacggggtagatcattgtgactgcatcctttgcacggacgaaaggcttgatacccctgctcaacgggcctcccgagcaaacagccttgctgatctgtttacctatagagatcgactgtcggatgctcgcgcaaccgcccaggagggagtgtacagacaacagagagggaccacagcaaagttcataagtctcgttcgatcaattgaatcgacttatgctcccggtcgatcgaagagtatgatgttcgagctttttgcgcctttcagtatcttgtcagacgtccatgtgaacgaggtgatgagcggtatgaaagaccctcgagaagtgtcgctcttgatggatcttgcgatcgaatgggagagacgtgcgcttgagtcttgtgggtttagaggggtagattctgatgggaagggtacagttacgtctggtccgttcgtacacgagatggtctgtgtgagcgcagggttgtcgatcgtttcgctgctcgatgggttgggaagaaaagaggatgcgcagagatgggccagtgtcgtattagatattcacaagattatctttggaggcggaaaggaacttatgatggtcttgtggagaggtttattagactcgatggacctgatttcgttcttcagatgatttacggcttgctttgcatcaaacaggaatacatgaatctcaagaaaaggtatttttagggataaggaaagaacattgatagacaagaacagaatctggtcaactgaatacaaagcaaatgcgtatagtgtacaagaagggacggtggagacatcggaagacaaatgaaacgctatattgtatttctttattcatgtcgttctataattagggtgtcttcactttttgtgctctgccacaaggttgattaccttgccggtctcgagtgcagacttgacgttatcgatcacctgaatctccatgatcttctgagtatctcgagttctggtcgcgtacattagtattttgaggaaaagagaaagaaattgtcagaacaacgttggctctcccaagaaacctgttacagaagaggtactgactctgtgcccatgtgaggaagaagaatgacgttctccatcgagaaaaattcggggttgacgttgggctctatatattttcagttagaagaagaaggtgttagctaacaaacataagaggggaaaacagattaagaacgaaccatcagggaagacatcgagtcccgccgagtagagttttccagacttcaaggctgcgagcaaggccggctcgtccacaacaccacctctgtgtagatcacaacaatgagcgagaggtcagcaagagcatcaaagacgcacggacacaaaaaagaagaagtgattagtggacgaaccgggcggtgttgacgaggacggagccgtctttcatccaagcaaactgcttttcaccgaacgacttggccgtgtttgcgttcagaggcaagttcaagctgacaacatcggccttgcccaacatctcctccaagcttgagcagtactcgtactcgcttcccggctggccgtccttgatctggtttcggttatggtacagaatcttcattccccatccgagcgccattcgcttggcgacgaccgaaccgatacctcccataccgacgataccgagcgtcttgttttcggggtcaaaagcgggggcaaggccctgcttgaacttgccggctcggacgttcacttcggctttccagtattgtctcaaagcagagagaatgagatagcaggcggtagtggcggtggcattatcgaccgagccaggggtgtgagagacctggatgcctttggcgagggcggcgtggacgtcgactggatcgtaaccagctccgtctgttttgaatgatgtacagagggtagccaagagtcagtgggaaacccatacgataaatcagagactagaagcaaccgcactgtgagcaatccacttgacggacgagggcaggagttcgataaactctttgtcaaactgagacgaagatgttcgatagatcgatattaggtgccgtatcattcaggacgattcgcacgatacacccgtttgatagatttaaacgagaaaataataggctctaatacttacaggtccgacggtagataacgactggttcgatcggaagataccaataacgttggtgaacttggattcaagatcctgcttgaactcgtctcgagtcttagactcgacgtactgaagggttacggaatcaatttgtttgttagatgggatctgggcgtgattcggaagatagacatataaggagaaaacaagaacggtgctcacgatgacatcggctagagatccgaccttctcagccatttcttccttggcccagatgatttcacctgttgttgatgatcgagatttacattagcgtcaaggcagagagactcgagataaagatttagaaaccaagtcagagggatagagtgaaacaatttgtgacgaaccaactacgagaacttgctgtttggaggacatgatgattgagttgttgttactgaggaaacgtgaggtgatcgaggtatatgtagattgtatagaaaagaaaagatatgtagtatgtagaaaggaaagagaagaaaaaagacagaagaggagcagccgatgtctcgataagagttcttatacgattgaaaacaaaaggttgaaaagaaccgcgaggcctgggatgaccggtccgatgtgccgtgaaatgtaccgccggttcacccggttctggggtaactctcgcgatggcttctgctctctcggaggagccccggacgggagggaaactagattggagagttgaacagcaatcatggtatcggaattcaaacgaaagatagtggaacggggatggaaaatagggacagcagatgtatagaggtttgatatgatgggtgatcgagggagtacagagttatcggatggatggtgtagacaaaacggtggacgtaagagtttacaagatatcagcatgagaagtatcacccttccaacgacctttccgatgttcatagagaacccagagtgtatgttgatagcacttgggacgtcttgagagaatacatgtaaacaacgtgctcaattatgaagggagatgaaagtgatggccgtatgagccgttcagccgacaagacctctatttcttctcctgctttatcatgccaatgatgggagtatatctagaacatcactcacgcccacagaaacgcgcatccgctcctccgccgtttcgatgttctctctccgttcttcagtctccctttcggtaaatgatgcgacctgaatccaatgtatttcctccaacggtgcttatcgagaaactctgtcttcatcattagacgatataaagctaagaatatacgcacatgtcagggatgtgacctgagtgttacatgcttatattcgatgacttgatgaccgtttgccacaactcgtctgacttttcggacgcaccatctgttgatcgtcttgttactgttcaccgtcatctttgtctcttctgcgctctcaaccattccttgctcgtccttcctagttctcaattcaatttctattcctcgatttgttctcgttctcatcaaatgttcacgagaaccagattttctacttctacttctacgctggcccttccaccagttgcccacatcgtgcttcctcatcgccagcatagcccatgctcctagcgtgctctttgccataaccaggtgagcggcaggtagcgaccttgaccgtccagagctttgatagcgccgcatgcttgtcgagtcgcatcgcatgtcacacgtctcacatcccactacacgtttcacatctcacttctcacttctcacttctcacttctcacttctcacttctcacttctcacttctcacttctcacttctcacatgtatagacaacggaacgcatatagacaatctcccagcctccgcaagaacatagacccgaccgtcatcagtatcagtagggcaagaccgagccatcatagttaagcagcttccctccatgagactccctggtagcctcgctgacgaccttgaggactgcttccgcgctttgctccgggctgatcgctagatgcgcgtacgggctcttctcgccatctccagacagatccttggtggccatcgagttcatgtcggttgctacgaagcctgatgaagagaagagcaagcgaggagggtgtgtcgagtcagccagtcagtcagtcagtcactcggtcactcggtcacccagtccctcgtgtcacccggtcgctcagtgactcgtctcactcagtcacccagccatgttcttctcttcccatcagatcacagaaacgcaggcacgcatgacaaaagagaccgacctggatgcagagggaacgcgatcagcccaaagtcttcgctctccagatggatcttgacggtcgcatagttcgccgccgctttcgatgtgccgtacactccattgggtatgttgaactgagcggccagcgccaaggagcctgctcctgaggagatgacgacgaacttggcggcgacggctgaggcctggagaagggggc

SEQ ID NO: 2063 - DNA, 8691 bp, Xanthophyllomyces dendrorhous
gctggtactcgatcacctacggagaacgtgacaatatccccggggagcagggtgtttgcaagaagcgtctgtgaatgagaatctctacagagtcggacaaaagaggagatagtcagaattgaaaaagcggaaggcgagagttgatcaaacaaatgttcttgcgaaccgaataagatgacaatagtgaggaacaagcttggatagtgcctggagagacttttcggatcgctgctcttgtacgaatccgactatgaagaaacaaacgtgctcacatcagtatctcagcacaatggctataacgagaaacaatagcgaaagatagaaccctacctgtcaaaacaatcatgaccgcgatcgcgatactaacggcgtcgtctctgttgccaaccagcagactgacgccagcgctgccaagaagcaacaggatcaacggattttcatagatctgttttgcaaacttgattgcgatgtgttctgtctcagacacttggaactcattgagtccatggattgaacgaaggtgatctagcaacgagcttggtaatccagtggtgggtgaagttggatgatgaaacttcagggtttcttcgaccgataaggccgcgaaggtttcacttggcgtcgtggaatctccaggcttgtgagatccttctcggtcttccaaagggatgtatcgctctgggctcgagcttgctcctatacccattcttcgaccaaatgctcgaagtttcctaccaaacccatctgactctctacccgtgttttgaccagcgatgatgtctgagccaggtcgatgaaagtcgaagcttgaattagagaccgttcgtctaagggtagtcgagtaggcaaacgtgctgcccgactgaagtggaggtgatgcagatagatcggtcatcttggttgcacctgggtgagctgaggaagaacgaggatatgacgatggaccggcgtgggaggtaaatgcgcttgaggaagaggcgttggcagtgtttgggctgagggatctaggatgaacgagtttagaaggagccatgacggctggggtgggtctgacgaatatgacaacaaagaggaagagaaagaacctcctgtaatgacaagattcgatccacctgtatttctcctctgatcgatgtcaaggacgttttgtttgcgtcgggaagaaagagaaagggaggatgagaaagaggattggcgaataaaaaaaagttggcggtcgccagttcggaactataagtgatttggtcctacagatgagcaaatcagaacgataaaggcacaaagaatctatttgggagcaaacccaacactgtacgagctgaacaggatcgacaacggatgaaggcgaggatgagggaatggaagatgcctgatagatcgtctgttgatggtagatgttcaaggagaacgaaagatgggaatcaccgcggcgggggagcgtaacaggcgagtgtaaccttctcggagaaaaagatggaggacaaacatcaagcatacataaaatggaatcgtcccaaagttgagtagtcgtttctgttgttcgaccggttggtagaagggtatgtttggatatgtgcgcgtttgaagtcagatgcgctcagtctcgctcagttttgctaccagacttttaaatgtcttgtgggcaaactgatcggtggatcactgatcgaggatatgaggcgaggtgatacagtgtttaaaatgctgcctgatgatcagctgcaactagaagagatacgacctatccgtggtgtgatttctgtcgcttcatatggtctcacgatacagtgatcgcatagcatagatgggtgatggcgaaacttgcgccgacttcagggagaggttatggcacttgcgtcgatggacacaaagaacaatatcaagagcaaagaacacgatttctcgagtatttgaagtggaatcacaaagaacacaaagcgcacaacattgtacgacatcagcttgttcatcgccgactcctttgtgatgagcagaggagactcaaataggtcaagctagtaagcgtggtttgagcgcgatccgaaaggtttgaaaatatccacgttgcattttatccatcaccattatcctgatcactttccttgcccgttttccgaatcgaaatggctgttcagcaagcatatgctcggctaccatatatcaacgtacagccagattaccctgctgtcatcaggttagtgcagcaacggcaatcttttttatactcccgttggaggtcacaaactcggctctagaatccctcgctcatctccggatctcacgttcttcccttgccctcttgattcgtctagagacgtagcccagtcggtggtcaaggcagagtctttttgggcatcggcttacctagagaacgaaaccagtgtacatggcaaggttggctcctatttcctccagatatataatcatcaactacctcatcaataaccagtgcttgcgatttaatagatcagttgtgaacgagaccaagacggcgatcttgtgactcgggcaagagaaggagttaagatccatcgcataggagaggatgaggtgagtcaacctcgatgcttttgctcttgtatgtattctcaagagtttcgagttctgaccaaccttcatccatccctggctagacctctttcaaactctcgttcccgagtctgggaataccacctacactcataacgaagccacgtcaacagattctctcttcgctgtcaaacgtttgtctcactctttcgattgtcatctcgagcgccacaagtttgccgagcttaccgctgaatctttatcatatcaatcttgaacctgaaatcttttagtttcctcaacagttgaactcgtttgacgtctctgcaacattaccattacttgtccttggcggtgacgacggcgagctcaccgtgatagactacaagaatcacgagacgaagcctctgatactgaaaggatgtgtaggagacatcctggagaccaaattcttcccttctggagaggtatgtttagtcaatcgttaaattccaacgaagaattttgatctcaaacggagccgatgtgatactttctgcttctgctcctgaaatataggtcatcttgagcgctgctctctctggtgcgctctacgtccattctgctgttcgttcaagtaccaatatgagtacacccgcccggacgctcctcgcgcacgtccgaccagtgacaagcgtatcgatcctgggtcgagggagacagattctctctggctcaaaggacggaacactgaaacgttgggatgtgggaaaaggcgtcgttgtcgggaatctttccgttccgggtggaagagacgagatttggtcagtcgatgttgccgtcaaacctggggctgaaggtggtaatgaaggcgaaatggaggaaggttgggtggggttagctagcggaaaggtcatgggtttcaggttggtgtccgatggttcgttggagtggtctggcaaggttatcgaaggtcgacaaggggacggggtgaccgcattagcttgctgtgtacgcttttcttttttgtgtcctctttgaactcttttagtcataccttcttccaagcaagaactgatctgacgtgaatccacctttcttctccctgactatcagcctacggatccctcacttctcttgaccggtacatctcagggatttatcaatctctaccaaagctcttcctctttgatcaccaccaccggcaataactccgttgggtcacttacatcactaacgacactgcgtcgatcatccgcggctacgacctccatcgcttggatgactgactctgatacgtcctttgtcataggcagtgaagacggaatgcccttcatctgtcactgctctcatccttctcaacaagcgaccataggatctaaagatatctcccaggaaccagtcacaataccgaaggagtcggtggaggaggaggtcaaggggtatatgagcagtgaatggaaagtccgtgaagaattgaccggatttgaggatccagtaaggagagtcaggatcgttggaaaccacatttgggcaggcggaaagacaggtgtcttcaggtattgatgatggcaactttagtttttctcttctatctttctcttgccatatttcgctcgagtgtttgcgtgaacacttgaaatagtttgtgttgttgagaacatatagtaaactcaaaattaagcagttagaatggaagagagaaagacgattgaaacctatgaccctaaatgaaagatacgaagaaatatatatatgtgtgttatgaaacatgatgaaatgatcaaaatagacggaagaagtgtgcaaagatagggataggggtttctgatttaaatcttagaaaagacttagtggtggaagagtcgaagacctatcagtgtagagattgagaacaacgagaacataagctttagtcgtaagttcttaaacacagaacagcaagtgaaagaaagcttaccggtgtgggcaaagaccatgccgtactcatcagccaccttgatgcactccttgtccatgatgcttcctccaggagcaccgatgaaggagactccggatcgcttcaatcggtgaacgttgtccgggaaggggaagaacgcatccgatccacaagacacaccagtcaacttggccatgtgctccgatcgctcctcggcggtcaaaggagtagggacctcggtgaagagcgacgcccactgatcgtgctcagagggggacgagttgaaagcggtaccagtgacgaaaaggtcaatggcgttggctacgaataggagccgcaacaagaagagcgatttgtcagcctcgttgacttgagattggcaagagatacgtttaaaagaaaaaagaccaacccttatccgctcgcttggttccctgcttgaagggcaagttaagaaccctgtcgtggtgtctcaaccaccagttgtcggccttctcaccagccaatcgggtgcagtggattcgggactgctgaccggcaccaagaccgatgacagttccgttgagagcgtagcaaaccgagttggactgagtgtacttgagcgcgatagtggcgacaagaagatcgagcttggcctgggtggtcagctgttggaaatagacattgagcgacaagtcagctgcaagcctaccatgcgcataaaaacaggacagaataatcggatagtgcgaattacaaacctccttcttctcggtgacgatgttcttaaacaaggactcgtcaatctggatatcgtttcgcctctgctggagggagataccgtagacctgtcgagtctcaatttcagagggaacgtaggtaggatcgatctagaagaaaacaagacgaacacaacagcacagaaagataagcgaccggattgaaggttagataagtgccacgaggactttttgacgtacttggaggacacagtactttccacccttcttcttctgaagaatctcgagagcctcgggctcgtatccaggggcgatgactccgtcagagacctctcggttgatgatcttggcagtgggcacatccacaatgtgggaaagtccgatgaagtctccgaaggaagacattcggtcggcacctgtgagactcacgtgtttagaaagacgttaataacataattcctcatagcgagaacgtgtttgaggagcacgaaaacgaacctcgggctcgagcgtaggcgttggccaaaggcgagagagcgtccttagcaaagagatcctcgacaccgaacaccttggcctcgatctcgctcagtggaagaccaagcgcggctccggccggggaaacgtgcttgaaagaggccgcggcggggaggatagggttcgaagtagcagcggaaagctccttgacaagagcataagagttgagagcatcgaggtagttgatgtatccgggagatccggagaggactgaagaatatattgaaatgataagttcgaaagagtaaagattaggtcagacgacaaaatcgcatggtatgttcatacaattctccatcatgaactacgcacccttgatgggaagctctccctcagtgacgaaagcttgtgcaggggcctggtggggattagctccatatcgaagctgcatcctctgaacaccggcggagctggaagcttctcctccaagagtagcgtactgcttcctgaagtaatcggagatggccgaatcgtactcggcggtcgactcgaaagccttgagggcaagacccttcctagtggactcactaaccttgccgtccttctgaagctcggcaatgatggtctcgtaatcggccggggcagacacaatagagaccctgccgtggttcttggcggcagctcggagaagggtaacacctccaatatcgatctcctcgatggcgccggcgatagtgcagttaggagcgttgatggtaaggacgaaggggtacagattgcaagcgacgatggtgatgggctcaatcgagttagcagccaagtcggccaaatcggattcgatctctcgggagagaatacctatgaagttgatataaagacaaagtgcaaatgatgatacattaaaaaaacctcatcagtgaccatatgaagtaatgaagcgacaagaagatgacgatcacgcacctccgtgaacggcagggtgaagggtcttgactcggccgccgagcatttctggggccttggtgatggaggaaacatccctgtgtagcaccaagagtgctgatgtgattgagtttcctagacggattttgttgaccgagacaggaattttttgttctgtcgggcgacttactcaatctccataccagcctctcggatcatcttcgcagttcctccagatccgaggagtctgaaaccaagcttggtgagcgactgggcgaaaggcaaaaggccagtcttgtcgtacaccgagagaagggctggttaagaagtgaaatttgattgtgagtcatggaccatcaaacaggggtctcgcaccagattcttccaaccatttgcgttcagcttggtaaaacttaccaataggcttctgttgagatgaggacatgatgggcttgatagagaaaacaaaggagatctagagggttctgtgggtggttgtgaggaagaaaaaaagaaagaaaaaagaaaaaagaaaagaattttaaaaaaagttgatggcattttcggaaatatcgtccatgatcgcacgtgatctggccttggttactttcaaaaatgtcacatgggctacgctctttgtcagagatactgtaagggacgggagctggactggtaacggaagggttgtaaagtagtaaccacacaatactcttaggttttaggggagaagttcaggctcctggaactgggaaacaggattgatagggtcactaggacaaggacaaggacaaggagtagatgtcacgaagcattcaagactgggatttttatctacgagcggttgggagagtcagtgttatatatggttttcataccctagaagcacgatacggattgtgaagaagacacgaagatgcgcttaatcatcagggatgcgcaccagcacgttctttgtgctggagcgagaaatggagaagaaggagaggattgggaatcttcgcgccacagcttacgaacatgtgtggctcatgctggcttcctgacatatatcccctgagggaatatgcgcggaatacatggcttgtagaccgttcgctttgtgaaagcttgaggtgctgcccctgcgctcacctctctaccggttgtacaccttgtgttcttctaccataatcacagttcctttttccaacatgctcgttccttaaactatgagagaattagttagcggcgctattcattcatagtatcgatgacagcgagtatatatatgagttcataaatcatcacagatacatacaactcaggttctgtagatgaattctcccagggtccgcgcaagaaagaaatccatacctcatcaggttcaatagggcaagaccgagccatcatagttcagcagcttccctccatgagactccctggtagcctcgctgacgaccttgaggactgcttccgcgctttgctccgggctgatcgctagatgcgcgtacgggctcttctcgccatctccagacagatccttggtggccatcggattcatgtctgttgcgacgtatcctacggagaataagataagcgagaaagatttgtcaagactgtgcgtcactcagtcagtcacccagccatgttcttctcttcccatcagatcacagaaacgcaggcacgcatgacaaaagagaccgacctggatgcagagggaacgcgatcagcccaaagtcttcgctctccagatggatcttgacggtcgcatagttcgccgccgctttcgatgtgccgtagacgactgcaggtgtgttgaattgcagagacagtgtcaaagatcccaatgctgaggagatgatgacgaacttggcggcgacggctgaggcctggagaagggggcggaacgccttgtatagcacgacaggtccgaccacgttgacctcgtagtgggccgtccactgggcagggtctgactcgtgcaagagacctatagactcgggtgtagcgatgcctggacgtgctcggcagatcagacacagcatcgcgtgaaggagcatcgtgtgagtcagcatcgcgcaagttaccagactcagccaacgtagctacctcacagtgcaacgccgt

SEQ ID NO: 2064 - DNA, 13978 bp, Xanthophyllomyces dendrorhous
tatacggtggtgtcggacatggctgcagaggtatagcttgttggtgtgatccgagacttgatgggtgatgggtgatggacagtgggtgatggacagtgggtgatggacagtgggtgatggacagtgggtgatggacagtgggtgatggacagtgagtgatggaacaggatgagtgatggaagacaagacgagcagagtgatgcatggcggccagatctatggtcttgttatatatggctgagcatgttcgaacgacggccagacctggtagctgattcatcagctgtcgtctggactcgacgtcgcgcatgcagtgttggtttggcgagagattggtcatcgaacgcgatggcgataccgtctggatggaacgacgtccgggcattgcttacagatcaactgacaagagcccgggatcagcacacgacccggccgagacgggtccgcccgagggggatggatgttggcagcatcatccaggacgacagaccaggatgcggtgttgtcgatggtgtgtagcacgctcggttgcttcagcagatcaacatattccgtgaacgaatgtccacaaccgggcggaacatttggtcattcaagagttgatgttaggggcgtgagctgtgctggaagccgggaagatcacgaactgcataccccgcaataatttcgagaatcgaaagtgagaatttcaggttatctgacggtgatttgtaagtacagaggcgcaggaaaatactatagataggtcacaacagtgggatatcaggacggctagcaaagactgggactgaggtcaaggacagcagggaagaacaacggggggaaagttgacaaagagaccaggcttaggaggctatactatgggtagcaaaggaagtctatcttacacatcattctcagactcctacaacgctgtatagaggagtattccataggatgtatcagatacacatgtgctggacgactccatgcttgcaagccggtgcctcgcaagagatagaggagatgagaaggcgatacggtctacaagtcctgtattctgacctggaaacctaagtcacacctggttggtcatctgtgagccatagaccctctagtttaacacttctccttcttcaatttctcgcttattctgcttcccacgcattctatacagtgcttctagggcctgaggtccatgtgcgagaagggtgttctcgactactcgcaggtaagaacctcaaacttggattctttgtgactttccttgttatctttgtcttcccttcctgttgtccttgtccccggtccttgcaatccctgctgccggtcctgtccacccgttccatcaccttgcgtctctgtcctccacagtcctcgtatgagagcccggatttctacatctgcgcactctccagtagcggttacaccatctgtagccaccgagctacaggcacggctcacgcccgaaatgctgagccgttgcctccacgtgaggatatctcggtcgcaatagatgacgtcagccaatagccgacagggcaaaaaatcgatggcgaagctcagggagactaaaacctgtggaacatcgacaacatgttgaggacatgctgagcaaacgagcgcacacacgcgtacatgtatagcaccagctctcactctatagacgagcctttcggtacttcttgctagatagaaaatgaaaggataagggaggaagataaagaaaggaaaggaaaggaaaggaaacaaggtagataagaaatcgttcaatcagatgttcaccttgtctgatggactcgttcagagatccatgctgatccagtgacgttggcgatgtgtcccgtgattcgatcggcgtacactcgtcctctcctccacacatacctacattccatgaatcctataaaggaagggatagcttcttgaatctcgttcttgaacctttatctttctcccatcgtttcacatcgcttcacttactaactcacgggataactcgttcagtccatataatcacttaatctaccatgcaaagtctgtccttcgtcatctcgctgattcatgaacactgatgttgatactaatagacattcatccaattaaacatcaatcgatgtagctgctgccaactttcttcaggacaagatactcgtaggtcttcaggattatactcagtgtatttgtttatttcacttcaagcccttacccgatttgctcacttttctctgcagggaggtcccgaaccagtcgatccccgagcggtgccagagtacaaacatcgaaagaacccggatggaactccgcagatgatgaaggtacgtctcatatcattttgattgctgatcgtgaccgactcttgtaattaacacatttcgtccgtactctccttcaggctctcgcctggtaagttcaacttctgttacaggttcacatctctcgtcggaacccacacatacatctcagtcttacaacgagccgtcgcgcaactctttccaggttcggatccgagaaggtggaggtcgtcgatgctccaatcccagacatcaccactgagcgagacgtcatccttaaagttaccggaacgaccgtctgcggctcagaccttcacttgtatcactccgaaatcgtcactatgcagagcggcgacattctcggacacgagtttatgggcgtcgtcgacaagatgggctcggaagtgaaaggtctcaagattggccagcgagtcgttgcctctttccaggtcgcctgcggttactgccgatattgcaagcacaaggaatcgtccttctgcgaaaacactaataactcatctttgatgggtttcatgtatggagccaaggtttgctcagtctctgaatcttttggatttggattgagttttatcaaacattaacgaaattcttctctggttaacctacaaatacaggacgccggcttctttggatacagtcacttcaccggaggttttccaggaggacaggccggttagtttgtcaactcttgtgtctcccacatggttcgaccaataacaccttcttttctcattccctagaatatgtccgagttcccttcggagacgtcaatctggtgagttagcctcaagtcagcctttcggcctcaatcaagattgtatatcaactgatccctctccttttcttagctccctattcctgacaacgtcaccgacgaacaggccatttatctgtctgatgttctcccaacaagttatcatagtgtggtcgataccgaggtcggagagggtgacgtcgtcggaatctggggtttggggcccatcggtctttgcgcagcgaagtaagtcgctcgagatagctcatctttatatctctgttggctaatggtgtgctgtgcaacccatcgcagatgggctctcctgaaaggagccaagagagtcattggaatcgaccttgtccaggatcgactcgcctatgctaaggagcacgtcggaatcgaagtcattgatgcgtcaggtggagctgatgtcgtcaagacagtcttggagatggtccctggtgggctagacgtcgcgctcgactgtggaacattccacgagcctaagggcatcttccacaaggtccagaaggcgttgatgttggagactgataactgtgaaaccatcaagtgagtgatgctgtcccgccaaacctcaaacgacttcctcgatgctcacgcaggtctacattgacaaattttcttatctctagcgagtgcatcgtcgccgtcagaaagagaggacgggttggactgattgccgcctattctgcttttagtgcgtaatcaatttgatagtctgttgcctatccggtctctttctaaagacattaattcacctgtcactacagccaacggattaaacataggagccttgatggaaaagggtgtccggctccaagggtaagtgatcttttcacctgatcaatgaagggtttgatgtgcgcttatgttggtttgaatctctttgtccatagcaatggacaagccccagttcacaaacattgtatgtagcgctttctagtgctgagactatggttgtatacggattcctaactttccatatttctcggtatacaggggagactatcttgaatgattacatcattcctggaaagtttgatccgacgttcatgattgtgtgtaccacatattcacagtctacaattagcatccgttgaatctcaaccttgagcctctttcactttgtctcgtccatttagacccaccgagtgcctttggaagatttcaaaactctttatgataagtgtatgtcgttgacctagacagttgcttctgtgtatgtccactcgatgctgaccatgtccttgttcttctcttttcctagtcgacaaacgagtaggaaacatcgaaaaggtgtttgtggaaaccaagttcagcaaccgtatgtatccactttgcaggcttttccaattgaggtggaaaggtttctgaccttaacttcaatgctgcgatatccatagctccctctgccaattgccccaagaccacccgggctgccgacattggaaattaagcgacaagcagaacggacgtctctaactgatcagagtgatcgaggatgtctctttgctatagttatatgtaatccgtagcttcatctgtatccatatctacctgagttgtttctctcgatgcaatgtgctgtactttggaccatttgtgtgatactttattcggcaagctcgtatgttagggttaatgcactgacaaggctacaaaacaatatgaattttgtgacactttgattaggaaagatgaaagctctctattaacttttcaagctgatcaccaacgatcaattcaacattgacccaacatctctgcccaaaagtatctccgcaactccctcaacatgtcttttccaagctcattgaggtctgcgttgtcctctcgggcacctttctctcatctctctcctatcttcctggcatcacaccgattatatgcaaccgtcccttcgtcaccgaaaagcacaaccactaaaggtattatcaaccaggcagctgccgagcgagtcgaatcagccagactcaaggcagaggaactccgggctcaggctgcaaagctagcggatgatgttgatattgctctgcagacaaaagaaggaagaagaaggttaaacgagatgcctattgttatcagtggtcggtctttccttttgtgatctagtcgggctgatggtcctctcttttcttcttggtccaggtcaagaaagactggtccaagtggagaaagagagaaagaagcgaggcagatcgtctgatcgagggtcatatagagatcggctcttgggaagatctcgaaaacgttcccgtttcgtttggtctgacatactgtttcttctcttttcctcgcctcattctctccccttgaaatcggcgtccttggatgtcaccacctccattcgctcgtggcttgggcttttccttgtgtttcaatggaatcatttgataaatacgattccttcgtatgaaatatcatgaattaagtgtacgacaacccggtgccgtataggagcaagaataaggatgatacgttgatcgaatacatccagcatcgattcggagcattctaccagtctcgagacgcgttcgttctttctcactcttgcttttcccccttatctctctttcaacttcagtgtcaggatattctgagaatattcatgactcatacgtttctgaatctctttcgttttatcatgccatgggattgaaaacgattaggatgacagaatacttcaagacgcctaaatggtcaaaagccgaattgatgtacaggcttggctttggtgaaggcgtggagaggcggtcaagtcttttgaaggaacttgaaggtcggttcgaagccttcaagaaggctgaggtcatgtacgtctctctgtcttctccgagcccaacattgtgttcttcgttcacctatgtagcctcactctgtcctttgcagtggagaccgacgaacggtcgaaaccgtatcctgtcccccaatccgacaatctgtcatgacgaaactaaactcacccactcgaaactctcgattacgtcaagccacatggacaaagacccgatcagtttctaaaccgaaactcatcagtttcttcagaatgccaatccatccgaagcttgtgatgtggcaggctttggttaggttccataccgagcaggtatgttccgccctctgaatatgcgcgtcgttactcttgtgcctgtacaacttttaaagaaaaatctttctacgttgggttttaatacgatcaattttgggttcggcaacctcttcgacgctacgtgtctcctcttttagacgattcaaattccggcgacaaaaccaacggaacaagagatcgtcaaaactcagactctggttgaggacgtcctgttcgaacgccgagattggctcgagccaaagcccgattggaggatcagggatttcgtgcctacgcatggaatcaaggaggattacactaaagagcttccaattgagaggtttcagtgataattcagtggtatcaaggaaagacaggatagagcgaggcgttgatattaaccaaaacatgatcaatgcaaaaccaaaatcccgtaggatcttgaaggggcgaaggaagagggggggggagtaggctgatcttatgaaagatttaatctccgtaatcttcttcacccggcttttttttcgcacggttaacgagacggaagtgcacgtatataatatctaagagtcacatcaagaataatacagacgttaggcaagaaggattagatccatattcgattctgatcgaccgattggtgacatcacgcgctctccccctccaatcgtttttggtctgacttatttgcttgtcgttctaagtgctcattttcttcgacctcgggtacagctttgtttgcgctactgttcgaactcttttgatcttcccaccattcaacaccatatctatcattcatgaaagtaacattcgaaaattgaggcggcttaagcgatcgtctgcttgatgagacagagagagcagggaaaaaacaaaaggatggtcttgacgaactctatcgcgatgctttgaatctcgttcctgactcgaacaccttcggccgtgatctctttgaatcgttcaagatcgaatctgatgatcaggttttttaactcaacacgcacgttagtggtttagaacgactcttcacattccaaataccgaatgaagacgtatgtaacagaaacgtacccatgtgagttgtacagtgttgcctggcgatggctgatggtttttgctgcatccgtcccaatcagtcagatgccaaccgtacatatacatgtcagttatcgcagaatctttgtagaaattgagttgacttcgaaactgactcaaaatagctccatagccaggttcgcctgagagaacccggtgaaatatacgacataaagaacgaatatcagcactggatgtcatgagtattcagctatgagtgagagagtacaacgaacgagagtgtataagccaataaacgtatccagacacgaggacaccatggccgatgaggtaagtcacaggtctaaaaccgagagggattatagaaccacaaagtcaatggagaacgtggcggattgaaatcattgacattcaactcactccactgaaccgacccaagtcggaaaacaacatgtaaacaacagttttgaacgagtcgcatcaggatgactatcaagaaagaagaacgatacttactgacgtcccaacctaagctcgtctgaaacgtcaaccaataaactactccccaatatcctatcaaaccaaccagtccactaaaggccactcttttcgctcctttctttgcctccttatcacaaagcgtcttgagctcacccatctggatcagagacttattgatttggcgaagtctctctctcaaataaacagtccgatcctgaaatgtcggtaccgatacctccagcgtgttgatagggccttctttgaatgcttcggaattagccgacgaaactgaagagggatagagcgagatggtgaatgaccggacatgagcagcttgcttgatgaaatcgccttattcacaagaagacccaagtatcaaactgtaagcccttgtctcgatgtagtcaatacgggtcaaattagaactaagggcgaaccgacctatgtctgtcgaatccgaccatctgacttgactgttggttccaaatcctttgaattcaactcttccaacttgaccatctggtagctctgcagcaatcagcctgcctagataagataacggctgagaaggatggagcacaaaagcgcaaggatgagagggcgacggtaatggtagagttaacctacaagttgaacatagtaagatcagcactcaaagctgatatctataatgaggcataagcggactcgacgtaatactcacctcagcagatgagaactcgtactcgatagttgacctggtttcgttgtataaaatttgactgtgagtaggaaacaaattagtatagataatccgaatcttctcgcctttgagttttccatccgaagcaacaagcaggtctgtccagtcgtcctccgtctccattgcgctgtttggatcaacagtagatctctttcgcccagacggtctatttggtctaggtacatggtcgccttgctcggcaattgtctgtccttcaatcgtgacttgagcttgactaatgctatttgcttcagggatgggagtaatagaaaatgctcgagaaatgactggatggaaggctgttggttgacctaatggattgctagaacgatgacatgtccgcgtgactgacggtcgggcacggttcataatatgcagtttggggatagatccccaaaaaagacgaaggataggatatgacatcgaactccctttggaacacaaagagaaagagggtgatagatgaacagaaatgaaaggagaagaggagcggtttactcatattctcaatcttagctgaggcgatgacgacagagtacgcagttggtagtcaacgtttatctgctctgatctgatctaactagatcaaaagcacatggcacatatttctcaaaattaagcaaatcgagaaaatgattgaaactataaaaggcggagatataacaagatatgaaaggaagcaaacgaagagatctatatgtacaagcacaggagattaaggccaatataagagtaaagatcaaatctatctaaaggggtcggccgagtcttaagagcttgtaccactttctcgcaattggtttagcgtttcgttccttggccatcttctcctccttatcctgctctctaacaattgctccctcccctcgtttccagacgactccagtctcgaagtcggcctcgagcgcgggaacgaagagcggcagacctcggaagttgatgaggtggtaaatccagtacgcgatgaagaatccaccaaacaaaacaactccgatatacacaccgacgatgtcctgttcgatcgaaaaacgaagatcagaacaacatgcaaacttgaagctagaagcttgtcagagatatggagagaagtagatgagacgatcgaacctgggcaagagtatccgaatcatatgtagttgcagcccatccttgtccagcgaagatcagggcgccaaggatgacggcaacccaagcaagataaggagaaaatggagctttgaaaggaagatcgaggaaatctcggccttggatcttccacgcccgtcggaatcgcaagttgataaaagcgatagaaatccaggtcaacaaagaggacgttccggtcaaattaatgaacctgtaaagattgaagatgaggataaaccagatcagcaaaagtaacattgattgtgtttactgtaacaaaaagatcataggcgtaccatctaaaagcaacaccttctccccagatagtagccaggaatgaaagacaggacacagccagtacaaccctatggagttgaaaaggcaaaatatgtcagcgagggagaaaagacagagaatttgatagtgggcacagaatctacatacaacaatgcaggaacaggaactccctggctagtgacataacctaggaccttcggagcatggcctcgcctaacagatcatacgcaaacgcgtgaaagattatcaaagatgagcaaagtacggtgcagaaacaaataagaatagacttagacatactgggcaagagacatgagcattcgactactagcatagaaacaagagttggtggccgatagaacggcggtaagaagcacggcgttgacaagatgaactccacctccgaaaccggccattttactaaacacaaagcagcgcatgaattgtcagatctttcgctcaaactacaaaaacgatttagaacagaaatatagaacgaacaagacaacggtgataggcgaagcggctacactggaatcgctgtcggcggtgaagagagactcatcattgtggttgatgtttaatccgatgaccaggatcgtcatgatgtagaacagaagagtcctacagagattcaagcgaagcgacggcaagcgttgtcaatacattctgttaggcacatttgcagatcagagacgacacgacatggacaaaccggaagaaggttgccttgatcgcgcgaggcacagatttgtggggctttgatgtctcaccggcggccagcgatacgagctcacaacctccgaaactaaagaacgcataggtgaaggactaaaacaaaacaggattagtcaacaccatgtgcatgtagagtcatacgtgcagagtaaatgcatacttgagcaaatccggcgaaacctccgaagaagggtccatccttgaagttagataacccaggtccaggatgaccgatgactcctccccagttgtagatcaaaccgacgctgagatgtccaaagttgacgcgtttacgcggatgatatcaggtaacgtcagtgctggttgatagtagaattcaaggaagacaagatgcgaagaaggtatgattctcacagaataaagacgatgatcaagagaactttgatggatgagagccatagctcagcctcacctgtgatcatgcaaagttaggtagaatggttatcataactgattgactcgtacaagagcaaaacggagatgtactcaccgaaggctcgaacgttgatcaactggaaggcgaaaacgggaacgataatgacgagagccctgaaagttcaagaaaaatcacgtcatgccagtatgaagtagagacaacttccgtttgcaaatcaacagaccattgccaagcttgaagtgtttgggtccagtagttcaagatgacagaagcagcgatcaactcggatgggatagacaagttccactgtaggtacatatccgcatgaagtcagtgttgagtgtaaagcttgatgagaaaccgtgaacaaaacctcacctgcaaaaagtagttcctgtgagatgtgggatagatcgatcaaggttagcttgaagggagaaaaaagatgccagtgatgaaagactcaccatccgagagtgaatccaagagcaggggaaacgaatcgatcaccataggtagcaaacgctccggagccctacaaatcgggttgatcggcatgatcgtccgactcgctgtcaatatagtaatcgctacttcgggtgtcaaaaagcgctaagacatttaccggaatcaacgcagacatttcgcccaaggtcaagactactccatacacgaagattccaatgagaccgtaggcctaacagaaagtaaagcagtagaactatcagacacgaagcgtcctcttttgttttcttggattgtgaactcacgcaaagagctccgccggcaccggcagtggccacggatgttcctgcagacaaaaagattccagttccaatcgttccacctgtgaggagaaggcatgatttcggagaggaagagtttgacaataattcatccgagacgaatgagacgtttgttgcccgatcgtcaacaaggaaggctcatttcttcactagcataattaaaggagaagaaaagtccggacttaccgatagcaataaacgtcagatgccgactcttcattccacgaatggtcaagtttgagcctgatcccaaaaatcgcttcttcttggacgactggatggtagtctcttcgcctagaaccggagttggaaggatatcctctacttcagaggtatccttcaggtcagaagatttttctccgagttcaatcgactcgctcgcatggggggtttgatacgacattatgctctgcttatcttgagtaaaaggagaagtcaattgagaggccactaatttggatcggtgggcgaactgattccttgaccaggctgaggagatagatccgaatcaggaggaatgtggatgagagaagcggacaacgaagctaagaaagctgatcgagaaacaaccgatatgcctatggcaggctgaataactcgaccggttaatttaccaaggaatggcatctacggaaaaaaatatttggcgttgtcgcccttatctgaaatttctcttcttttctacgggcccctcttgccttgtcccacacgttccttccctatttctttctttttcaagttcgacttttcaacattatcacgactgagtacaaagaaacaagttcatgcgcttaacgctgaccaagtcgagtcgtctctctgaaagaattgttcgctcgcttattcgaatcaacagttgcgcttaggctatcaagtccctccgagatgtccgagtctaccgggtatcgaattcggctaacgactgcgggctcaggtgaaacctgaccatcagcggacgatcgacctcatgcgagaaattaaaacaaaatagcatctaatgtcgacataaaatgataggcaagggagcagaaacaaataggatacgcctcgagtttcaaaaagaagagagaaaagagccgttctagtttctatagggcgtccttgccggtaatcaacaagctgttcgcatgatcctcacgtcggataagtatcctctcccacatccttcgcccttcgtgcagcgtcacacttcccagcccaaacgcaagcaccgtaccaaagtcccggagactcaacgcctgcgtctggaagaccccctgcaggaaaggcagatagatcaacccgagctgggcaaggaacgagatcgagcatgtcaagaagagcatcttgttctggacaagtcggcagctcaggcccctgttctggatagcagatgccaggtcaaggaacacaaacgtcgtgaacgtctggagagacagtccgtcgagcacaagatccggatggggtgtgtcagtagataggatcatgatgcacactcagatacactgtcccgccaaccagaccacaaactgaccatagtctgatcccgtcgagatagtcgcccgtcctgggtttcctgaaggaacatgtacagcgtcccgaccacgatgatcgccgccgagaagaacaccctggcaaacagtcgcttgctcagaatcggcgcgttccgaggtcgaggaggtcgcttcatgatcgccgggtccaccgggtcgacgcccagagcctgggccggaggacctagagccagccagccaacaacacagacaccaagacccagcggtaagcagtccgtcagcgctggaagaacaggtgcacgaacaaatgcaagaatagatgcaagcacagatgcaagaacaagtgcaagcacagatgcaacaacagaatgataaaagccaacgaaccgtccataaggatgttgataaacaggatctgcatcgcgttcagcgggttgctcagcccaaacgccgtcgtgatcgtgatgatcgacaatgcagcgacagcagtcgacagctggaacaccaggaagttctggatgttgtagaagatcgacttgcctgccaggttgagacacagcacagcacgagcacaacatgagcacaacacgagcacagacatccatcaaccgtcacacatcaagcaccaagcaccaagca

SEQ ID NO: 2065 - DNA, 2065 bp, Xanthophyllomyces dendrorhous; identical to SEQ ID NO: 640

SEQ ID NO: 2066 - DNA, 31632 bp, Xanthophyllomyces dendrorhous
  misc_feature (31310)..(31319): n is a, c, g, or t
gctggtactcgatcacctacagaaaagtgaacgatatcacccgggacaagatcattggccaaaagcgtttggggatgagagtctctgtgtaggttgaaggattgaccggattcgttgtcagcgcaagcgagagcatagcaatggcaactgaagaagaaccacataccgaatgagatggcaagaatgaggaaccagcttggacagcgcctgtagagacttttcggatcgctgttcttgaacaaatccaactataaacatggaagcaaacttagcatgatattgtctctgtaaaacccccgaacgacacaaactgttgatgttaactcaccagtcaagacaatcaataccgcaatggcgatactgatcgcatcatccctgtttcctacgagcagactgactccagcacttcccagaagcagcaagactagcgggttctcatagatctgctttgcaaatttgagcagaatatgttcttcttcatctgcctgaaactcgttagggccatgaatcgctcgaagatcttcgagcaacgcgctcggcaatccagtcgagggcgtggtagggtgatgagatttcaaagtatcctccactgattggctggcatacaattcactcggggtcacaacatgattcgacttatccccagacgactcagtgagctcgtctccgaaaggatgctgcgactctacaccattgatgcccaccccgagcttcttactgagggctttgatcttggccgagctctcagcaaatgaaccaagtgcgccaggatgagattcgacgcttgatcgagatcctgttcgtcgatgggtgggcgagtaggcaaaagtatctcctgagtgtaaggtctgaggcgggggagaggcaattttaggagtattgggagatctggatcgagggttagatatacgagggtaaggcgaagggccagtatgagacgcgtacgcgctcgaagaagactcaaccggggacattttcggaggagctcggaaggtcaaagtacacgtagagttgtgataaaccccaggatatgtcgttgtaggttgtacaactgttaggccaatctggttttatatctttacaatcaacgacgacgcaagaaatctatacatcaattatttgcccttgaacgttctttgactcaagcaccagaacgtatacaagaaacatagagaacccaagcctgatctctactcacaggtgtacaaatagtctttaatgccgactttatctatccggaaaggagataggtggcggttgagtagagattttgtttttgggctgaacgatgaagatgtgccagcacaacacgtacccctctgcacgtgactatatgattaggtaatccaaattctcaacaactctttctattcgagtcgagtcagtttctcttcaatataccagaattctttgacggccggcaagggtacaaaaccgcaagattgagaccaaaactaaagcacacgacgaacatctagagtcaccgcctcctctcactatcaattgaatcaagatgtctgaaaaaaagcccaggttgtttttgctcgactatggagcaggcgtatgtcctcttctccatccgttgtcagattgtgtcctcaagatcaaagactaattcaaagcccgttcattgatgattcgcatggtctttagaacgtcagatccttggccaactctatcaagaagcttggttacgagtttgaatggatcaaggacgcgtctgattttgaaaaggctgatgtatgcttatgtctttcgtctttctccttaacttttcgacttgttctatgtttcagcgtctcttatcgttttcgtggcatctttcattccttgttcaaacagaaactcatctttcccggagtcggcgcgttcccccaggcaattaactctctccactccagtaatctctttgagcctcttcgaaattacctccactctggacggccgtactttggaatttgtatcggtatgcaggttctcttcgccggctcggacgaaggagaccccatccctgggcttggtcttatcgacgctcgggttgaacgattcaaggcagtgagtgagacgacaggaaagtcaaagtcgattcctcacatgggatggagtgaggctacgcctttcaaaccccgaacgagctcaaccctggtccctcccgtaaaggaggaggttgaggatttgtactttgttcactcgtatgccgttcctttccgatcaaccccgcttatctcatcgtggacaaacacgaccactcaatatggagacgagatttttgtctcatccatcaagcgaggaaacatcctcgcttgtcaattccacccagagaaatccggagaagctgggctcaaggtgttggacaactggctgaaagctccagtagaggaaattagcggaaactttgacggacaagaacaagctcgagaggtttctgttaaggccaatgacggattcactaagagagtcgtcgcttgtctagatgtgcgatcgaacgatcagggtaagctcgtttgccggtcaatctcaaattcgtgttttttccatatggctaagctctattgaataccattactcaggcgaccttgttgtcactaagggagatcagtacgatgtccgagagaagacgaccgatgctggtgatgtccgtaacctcggtaagcctgtcgagctggctaggaggtactatgagtcaggcgcagacgagtgagtttgcaatttatctcaatactacgtgtcacgactgagtcaaagagtctaaatcatcttgacatccataatcaattcgaaaggatttgtttcttgaacatcacttctttccggcaatccgctttacacgaccaaccaatgttggctgttgtcgaggctgctgctgagacggtatttgtgccgttgactgtaggaggaggaattaaggatactgtcgaccctgatggcacagagagaagtgcactagaggtggccggtgcttatttccgaagtggtgctgacaaggtaatattttgttccattctctccctttcaagttttcaacccaattccttgagccagtgtgctgaaatagattcattgtattcgatattggttctaggtcagtattgggtccgacgccgtgatcgcggttgaggagcttcttgcccggcaggctgccggaacgcaacctgtcttgaccgggaagaccggaatagagaccatctccagagcgtacggtaaccaggccgtggtggtctcgttcgatcccaagcgagtctatgtcgatgctgcaattgatcctgctacgctcggtcctcacgctgcttcgctcgtggttggttccgaggcgaccggaaatgtcacagaggaggaacgttcgaaagcatggtggtatcagtgcaccattaacggcggacgagccgtgagggatatcgacgtagtccagctcgccaagggggttgagatgttgggagccggagagattcttctgaattcggttgacagggacggcagtggaagaggtttcgatttggacctggtgagattggtgaggaacgcagtaaacattccagttgttgcctcgtctggagccggcaaggtcgaagactttgaggaggtgtttgaaaagacggacgtcgaggctgctcttgctgcaggtattttccacaggaacgaagttcctatcgaggtatggttgttctagcttgtcggaatctttcctcacttgtcctgaagtgctaacgacctcctctttcgtcacactcgtacagaacgtcaaagctcatctcttgaaaaagaatatttcggcgagacgagcgaaagatgtggccggtcgggacagcacggtacagaattagagataaccagagttgactgattaaaaatgtagaatgtcaatagaacgtagatttgatcatcagcctatttgttgtgtttgcaaggagagacttgaatagaaaaaaatgagagaaaatgaacatataccggttcgaatataaagcagagggcgctaaagcgccctccgtttttggggtttcatcatatttggtcaacaaacaccaatccttcttcaccatctttgtcttcttctctccggaatccgactcggcaaatacccttggacctgacgttgtgtcctcttgccctctctctgttatttagatagaggtctcgcaaggggtcttcggcacatataatcttttgtcaacagtcgtgcaacggctgccagcacagctaggtttcaaatatattcgtcccttgattgacctgcttggttcccgatcgagaatgatgcttgctagttctatcatcaaaacatccaattctccgacccatcccttatcttcgttgcctcctccaggacctccgcgtaagcacacttcttaatctgatgctcttactgcttcgttttcttgcaggagcaagtattctctggggagttgtttctcctatcctagactccgcctcgttcggaactagactcctttttatatcgtttttactgcctgatggttatgcattaacacatcggaaaggattgccctgcatcgtatttttttacgttgtattcatgttgacttataccttcgttttcgtatcttcctctcactcatctctggcacaaacgctttggtagctaccgacgcccttcctggcctaccaactcaatcactctcctctgctggtcttgatccgccagtttctattccgctcgcaacgaggtcaacaactcgctcttcgtcatcatcgtcttctttctctccagaacagtcttcttctgctccttttcgtccatcgggtcacgatcaatcctacaacgctccctttctcggatcacacgcgtacgacccttcgtcacgtccaaacttacattctcaagggcgttcgttcaatcctcatcggcaacaggccctgccttcagttcagccaagcgtgatacagcccgtaagatcgcaaacgatctcgacgtctccctcccgtaattcccttctgttatccgcccggccttcattctcaacgcaatcccagggtctttccttttttgaccgatcgtctgttgggatgccgagaacaccgtcaagattgctgctacagcaagcattggatttggctcagatagccgttggacttgatcaagctcaagatttccatgaagcagtcgtcaggtaccaggaaacagtgtcgatgctaagaatcgttatagcacggattgagagtcgagggaatcagtcgaaggccggtataggagacggtagagacgatcaaggattgacattgaaaggaattgtgagtggcttggtatttccttaaatgaggagaaaggagagataggaaggatcaagcgaatttgacaactttcctttggctgttcggctgattttcaattttctcagcatgatgcgtacttatctcgcatatccatgcttcaagaacagcttaatcccccggacgtctctttcttgtccgaccccactctagaatcagatcactacagaacccggctggatcgtggttcttctcctgctcctgtccgggctatttcacctaccatgtcgagaacaacctcatcctcgtcagagtcgattatgccccttgtgatgtcttcctttcaccgtccaaggcgcctctcatacacagctacagaagccgaatcgctgcccggaacgagcacaaccgagccttcccacatatcgtatctggatcgatcagcatccaccacttcctcctatcgatcgtcccatcattctcgaactcaacttatacataatacacctgtgtctcctctaaacaaccaactttccaacgctcagatatcatctgatgagtctgctgatcaatcaagaacaattccgaccttgaacgtcaatcctgaattgaacacacagggaaatcttcctccctctcatactcctaattcaagatctttgggcgacgaaccagacaggtctgcgttccagcgtcgacaaagtctgatagaaagtctgggtctgctcagtgatgacaacgcaggcgcaaaagaggcgatggatgtaacagccaaaactcggaagcatgttttggaggacgtccaggaaagcccaaggtcgattgccaaagagctcgagatgggcacagaaggcgagttatcagatattgataccaaacctgcgtcggaacgctcaatcgagcgaagagttgaacagcccctttctcaagaagcacaagccgaagcttcagtagcactctcgataccggatttgtctccttcaagtgaacgagagggatatggcgggtacatatctcacgaggatcgagctctttctcaatcgaaccaacggccgataatggccgagactccttcgtctgaacttttcaactcttccactcctttcccttcttctgtttctttaatcgctcgcaaagaactttctccaccgactcaacttgttacagttcagagccagtcgcctaaccaattactaggctcctctctgaatggacggtctatctcgggtcattcttctctgtacccatcgattcctctatcagtcagcaccatcgagggaagtccgtcgcttttgtcgacttctcctccaaacaatggccatgaccggatgctaaaccatcagagcacggaccagtttgcgatgagccctccactcgcccgtacgacatctacaacaactcctgcgttgcctcttccgagcgctcagacccgagaagaatcgcggacaaccctgctcgaacctgtcccgtctaatgtacttcgtcgcccatttcatataatgcgcgcattaaggttgacaatggtcacatctggaggtagctatctaacacctagacttcatgtaccgtccggagtatggtttcagaccggagtgttccttcaagccgtggataccaaggttcaagtcatccatgtgttggtggactatcttcaggcgatggaaaaaacctcgatgccgcttgtgtcaactatcacgccaactgatatggggtcaaactcaaagttggctgcaattggagtagaattcttgagtttgttggattcttgggagaacgtgatggagactgtgcagacgacgctggcgaagaaaaatgtggtacaacatagtaagaagggcaaaaacggaggagtaagtctttgtgttgcatgttcaatgaccggaacacagaccaccagcatctgatatccgttgttcgttttatgtatacatcgcgtcaatagtctaactggggattcaaaatcagtcgagggttggaccgcttagccaatggaaagaagtaagctgttaatgcccactgtcttgccctcattgtgcaccagttgacagccgcttcaatcaatgttttcaaccttctagtatcgatacccttcaagcttattcaagtagtttaaaaaagctttttgctcaatctcagtttttaggtatgtacttgatccgtttctccaataatctcgttaatcaccaccacatctagacctgatttgatttcgctggttgccttttgctttcttatagttgacattctccaagtatccagcaatagcaagccatcgcttcctaacgcaccgtacttgtgtcttccgctctccatccgagtccagattgaggccaggcttaaacggacatcagaattctttggacaagtcatcgttgcattcgtgctgaaggatctgatgttgcttctggataagtatacaaaaaatgtagaaaaatggatcttggagtagtttgtgaaatattttcggcattcgtcctcagaatgagcattcttgtaattccatcttatctgttgtttatgctttctttcttcttctttttttttgtcaacatcagtgtaccggttctagcttttgatcctttggaattttttatcttctctctttacctgagcttttcatagtcttcgctttccggtcgttctttccttactctcttagtgggttttcggtacactgtaccattggttttgtcttttggttcctttctcatcgtcttctttgatcgtagatcacttattcctcagccataacattcctacaggcttcgcttctgctacgtatcatatatgttatttgtgcgtatcaatatgttttgaactggcgactgccagagataaagatttgtaatcttatctatccaatcctgtgctgggagtttgctgttaccggacacgtaattctacaaacgaacgaccaccatccctcaacctatattgcaagaatgctcaacacatgtccggtgtgtaccgaagaagtagagaccgctacgttgaagatatatcagtaagtctaataaagatttggcttaaatctagtcgagctgttccctctgatcatttcagttttcgctcaccgttccaccgtagaaaccatgtatcagctcatttcgacgatcctattcaatgcgaccaagcagtatcagaactgaatgatggtcaggaattagaagaggtcctctgtcaggacggcagtatgaagtcctcgtcagggtgagagtctaaatttacaacaatccaggatcgttcaagagttgttctgacccacattgcttaacgatgatatatcttgattctgattgctaatgactatctcatgttcaggcaagctatcatatgtccagtgtgtgcatgttccatagaagatcttcaagtggaagagagatctgcacatgttgcttctcactttggtacgtcctcctatgcgatttgaccgatatgagctcgcatttcgtcaccgtttatactccctcttcccttgcttgtataaagatgaggaagactatgagtctcctcaagaatcaaattctccagctacccacaaacctaattctatgcgaccgacagtcaaacgggataggcgtgatatctcgtggtcttctgttcattctccgttaagctctcttccgcctaattatagtccgaaccttatcccgctcttgtatcaggtcctcagcagttccgaccaaacacgttctgctgttctttgttctccccatggtacaacacatatcagatctcgtcgtggatgggacttcacatggggatgtgggttccgaaactttcagatgtgcttctcagcactcggtcatcctctctgccccggaggtggggttgacgacggagaaggggtatcagtctggactttacagagttggatcgaagacgcttggcgagaaggatttgatgaggtcggtaaatcgcagttcaaaggaaagatgagaggagtcaggaggtggatcggagcagccgacatttgggtgggactcatgtgcgctggaatacagtacgtgcttgattgtcatgttttcaccttagcgtttgtgctgaacagtcattttgtctcgaatttactaattcaatgagaatcataggtgtcatttgtgtacgtttgttgaatcaattcgtcatatgtactaaacactgagttggctcctgcatcatcttagatgactttccgaaagctggctcgacagaagatcagcctcctcatgtcgttcttcaacgatgggttatcaattattttgtaaattcccctgttggtgtgtcgagacaggattaatgagctgaaagttttcgcctccctttgtgctgttgcccatagaattcaggtaactttgctgttgaaaccacgaaaggaggatctgcgtttgacatgatgatgaaatctcgaggccagagtgtcaagatcagtaataaattgccactaatcttacaggtcggttcaacggactgcctatatatcaaatgatttcgtcactgatgtacactgccctttatagcaccaaggccattcccgaactattgttggttacgaaacgctttcttcaggggagactagtacgtacaaacgcttgatgcaatagataaagttttcaagcgctctccttgagaatgtttcccgttatcgccttaccgtgacgacgtcatccgacgacagacctcctcctatttgatccagccaaaacggtgccggatcatctccggaagcttgccatagaagagttgaagaacagtcgggaacaagctccgtcatcgtccggaccttcttcggttgagaagaggacagattgcgacccttcaccggccgacaatacgaatgataggtcaatatccgggtttgagcctcagtcgcccgcacatttggacgacaacggaggttcagaggtcgaaagagtcaaagcaaatacgaaggaggaggattggggtcataggagtagatcaaaattatcttcaactatgttaggggatgaacatatggaaatcggtgtgagcaggaagaagaggcgggccaaagtatcaattgagaacggaagagaaaagagatggcggaaggacgttggggccgcactaagctgttttagagtcaagtgcgttatcgttcaaatgcgatttgtttagtcctgcatgctgctccctgacttggaattattttcacttccgtttttcttctctagtcttaaaacgctcaagtaagatatagattgtccgactatttgatatgagtccacgttcaaaagcttactctatggttgtcgttgctgatgaccaggcgcaactcagaataccaaattttggccttttctggcggtccgatacttcctcagaaggaaagagacaagcacagggtggttgtcagtacaaaagtatccaaatgatatgcctgttatcggaagggtcagacgtcagcatatgcatagcatattgacaacattaggacttcctggaggatcgatattctttcttcaataatgtggagtcgccgaggtcgacaacccaagcatttgcccgagttcaatgtgaagagttctgagaactaggtcattgatatgagagtttgtgatacgttatgattatttaggaggcactggttgataacatcagtattcgtcttctgtcggcgcctggttatgttgagaaaccccgagaaggtagggcccatcatgtggagaaagatgtatgtcagaaagctgttcaagagatccaatagacagtatatacatacaaacacgcctgaaaagacaaggatggttccgtagacaagcgctccgccagtcatactcatccagcaggcggccggagcaatcagcccggtatgggccatgataagaggcagagagaaggccgaaacgacgatcatggaagtgaggaaatggccaaagtccttatatgctctgaacaagatcgaacacatcgccaggaaacgcgatgtcgagattaaaattaagtccagcaggtttgtaaaatagtctgcatctttatgtatgaaagctgaagagcagtcatgaacgaacgagttgtattctgtcgaaaagtcatccgctcctgcacatcgcgtgcagatcgagtttggtactggtgcaagcaagaacgtcaccgcttgatgttcgatgtcgtcgacgaatagcatccatcgtttgtattctataggttaagttgcattctgatagaactggtttcttcaaagtatcaagaaactgaccaacgacaaggggaagccaattggaccaaagggcacacgatagaatgacgaggaggaaccctatagccaggatgaaagccaagaagacgacctggaaagaagaacgtcaaaagtgatttcaagcaagttgttaaacgagttcacgcgcgtagaacggttccaagcgaataccgatggatgagtgacgaacggctatgaacagaatgtgatgatgtatgaaagaatcgccaggtgaatagattagtggaccggcactaaacgtccaatctatcacttgcagaaaccccttcagatgagacgaagactgctacatagcaaaagtgacttacttttgagccctgcggtcatactctgaaagctatctagattgaatctttcaagacgaccagaagagatatatacgatgttggatcgggaggagtagaataagtaagaacggagatctctgagacagacgagcgagcgggagatgaagagcactgcaatacgtaaggctcctatctaagcgacacatattcaacagataagtaaaatattcaaatatgaccggactcggcatgctccgcccgggcaccgacatctaatcaccgatgcccgagcgaaccatgccgagaatatctgatatctggatcaactcccagaaactgttaagagctcttcgtctgctgttgcgcattctctcttccctaaatctttcatatgctccggctcagagttctctcctgggcagatagtgcgataagaccacataccattcgacccatctctaatatgatcacaccttcagtcttggccgttcacaaagcggatggggcttcaactcgcgaagggcaaggtcctatagccgataaaccggctcattggggaaacaaacaagggactttgtttgagtgagtttcaaagacttcaggatctgatcttccaaacccatccatccgaactgatctctattcctcgtgtgtttttagcaatccatgggattcgtggcgagatgcttcagcaggggatattttcggcgtgagtaatttcacgcaaactataaacgaccccttgattcttgtcataagatctcatctcatcgaggtctacctctttgtcttcatcagatgttcgctcactcgttccgggagatgaaatctcctcctagtagcgaggttgtgcgacattttccaattcgtgttcccgactttggtgcctcctttcaagactctcaccctgccgagatcaaggctacatggttggggtaagctaccgagatagatctctacgctctcaatcattctagcgctgatgatttcgggttgtttgtattctctttggaacaacagacatgcttgctttctcatcgagtttccaagggagccagaccaagatcgagggatacgaattctggtagacccagtattctccaacagatgcagcccgttctcgttcatgggtccatctagattcactcgtaggttcacttagtagaccatcgccaggctgctcatatgcgacaaacttatggaatcactaaaccgattggtctcttcagccgcaccctgtcaagcggcagatataccagagattgatgtcttggtgctaagtcataatcattatgatcagttcgttctgcttgttcaactgatgttgcgatcggttactagcttgctaactctccaacccatcattcctctcatcttttttcctagtatggatcttccaacactgaaggcactggcctctaagcccgaatcttctcacgttcgcatcgtcgtacctcttaacaacgctcatcatctggcctcgacaggattcgcaagtaaacaaattactgaactcgattggtgggagtcagccgatgtagatatcggttcaggaaaaggggttattcgaatcggagctaagcctgctcaacacatgactgccagaggaatttctgataggtgtgtttatcgttcaactttggcctctgacagtatatattcttacggcgggcatcatatcgacttcttttggtccgtatagaaaaaaatctctctgggcttcctttctttttgagactcgtccatcgctcgagccgtcttcccctagcggggtcaaggtctatttcaccggagacaccggttactcagccctttccccttcggcagatcctgactcacatctcacaactgatactcccgtctgccctgcgttccgagagatcggcgagaagcatgggcctatcgacttggcgctggtacccgtgggtgcatatcgccctagagcattcatgagtccgttgcattgtgacccatgggatgctgtccgactgtttaaagatatcgtatgtcaacctgcactttctacttttgtacctttgactccacaggtcggtctctgatacagctgttttcgccgtttcaaattggggcgaatagaaagcaaagcgtgcgatcgcgatgcactacggtgtatggcagttaaccaccgaaactatcgatgaaccgttcgttcccttttgtttggtctgttttcctctcttactccagtgacttcatctgatctaccatctgtttttatcacatcatacagagttcgactattggctgaatcgagagatcgacttggtgtgactgaggaagagtttggaacattagagattggtcagacaggtgtctatccggttggaaagtaactgagtgtgtttgttaattctttcttcaataatcaaagatgagcctatgtccttgctccgtgggtacggccagtcaatgatcacatcatcctcaggacgttaatgcaaactttgcctatgggaccctgtgattgaagaattgagtaaactgaagagtttggagcaacgctctatcacagatcatcggggatggtcatgatattggcgaagtatccaatctgagtgatgtttgaaacaacagctttgaaagataaatgtatcagctccaagccagatgtgtgtactcaaatgttgctcttcgtgaagaaaaggagaaagctctagtctttccaaatgatagaccaagtattgattttgaaataaaaataaaaataaaaatgaggtcaacaaatatactaagcagtaacaagatgtcaatcgtcatcggcctcctaacctgtgcattcaaatcgagcgaactttcctctaaggccgcacacgtataatccccatctcccggttgtaaatcagccctgccctctagtttcaattcccacatctacattgtaaactctcaagatgagcgccaaagaattcaaagtcgttctcgctggtcagtttggttcaggacgaaccgcttttgcctctcggtttacctctgctaagagcgacaaaaagaaaatcgccgcgatcaagacagaggtgttccccgtgtcgctttacacatctggtcagttgataggaatttctctccagacgtatgagaaaaacaagctgatctatcgaatctaaattctttcatctcgacatcttcagccggctctgccacgctcaagttgtacgataccctcgtccatgccaagggtggtcttccagagcacaatttcttccaggcagatgcttgtttgctgtttttcgatacaaccaaggaggcaaggttcgttgtgtatcattattcagcttgttcaacttgttcaactgatgagctgaattcatgtcaatcttctcggcatcctttttctacgacgtgttaagctatgaagcgctgactgagtggtacgatgtgagtttacgttcaagtatttgtccatagaaacactggtctggcaccttacgcttacttggtggtaatattccttcggtaggccattgtcaaggctaatggtcgaaaggggtctgaacctttgcctatcatcattgtcggaactaaggtggacgacgtcaaggttggttctacagtcatttaacaacgaactttttcgtcgcatccctgacactcttatatgacatccttagaatcgggccgtgaagccaaaggacattgactttgccaaaaagaaaggattgccgtacatggaaatttcttccaaggtagatatctcttccagcgtatatatggtcgcatcagctactgaattctacccctgttcatcataccacttgcaggccaacttcaacgtgaaggagctcatcttagaaactgtcaaggcactacttgggtacggtcatccctctcattatcgcttgaactggattgtgaattgagctcaccttcaagagaatcgttcctgtttttgtctcacagaactggaactcagctcactgatgagattgcgctagagaaagcaaccaccgaggttgatgaggccactctaagcggattcaagaaggagtatgaagaagcgtcaaattaattcgactggaaatagtcatttttcatcccagtccagaatatttcagtagtcagacatagagtatacagaggcgtagaattatcaagtaagggcgagaggttggcagaaaaaaagagcaaatatatatgcaatatagcgcaaatcaagcaacacctggaaaatttgttgtacatcaaataccccttcgatctcactgaaccacagtttcgttgtattccttcaaaagtgcttgaacatctctgcgaacatctgatgcatgggtatcatcagagtttccttccagagcaactccaacagatgctgatctatgatacccggaagggtctggatgggtcaacctctcgtcaagagaatggacagccggattgaggtaaggtgctccaccttggacaagtgccggtggtgcgctcgttgaatgaagcgatggttgtggagatggcactaaaacagagaagtctggtccagcctggggcatatgaattggctcaattcgatgaggtgaaggtatggtagaaggaggagagtcggagtagttggtatgaacaaacgtcggcggcgaaaaagaggcttgcttgtaagtgtttccaatttcgttgtgtctagcaagaggcattgtgggtaaatgggatccaacaggcgagctgatggatgtcggctgggatgaatggctgacaaaagaagtcggcgaggagtatcttacgggctgaagaagagggctaagagctctatgcgactgcaatgtaggcatgttgtgcgatatcggagacacaggaagagtgtgcgatctagtgttgggggtatggttgatctcaagatgagcggagggctgattcaaagaagggatagacgtaacggaaggagagggagaggggactgaagtgatgatatctaataaacttcgtccagcttggaaagaaggtacaggaataggctgatgaaagtgatataacgtgaacaagttcaatctcaagcccttgaaaggacgaaagagatgcatcgtaaactcacaaagaattgcgattgagtgcctctgatgctatgagcagcttgtaaaacttcaaccgctgagggtctatcagtaggcttggcttgtaacatggagcctgtttgatatatatatacgttcagaattgacgtttctacaagatcaagagtgaaaatacacgaaccaatgagaagatttatctctggaggataaacggggaaggatgggatcacataagacacattgaccacggcctccgaacctcgtgtttcgctatcatcatgtgcgaacaaacattgtgagactgcggctctaacagatagagactggtcgagagctcgttcttacaaaggagtggtaaaataacaaattttatagaggaagacgccgagagcccagatgtctgataatacaggaaacgcaaaatcagccgagatagccagagagatccgtgtcatgaaagactaatacactcaccagctttttcatcgatttcttttgcttgagagaaatccactaactccggagcacgatactgttgagtagtgcttgatccgacatccaattctaatgccttgagctcagtccagcttcctggggcttttcttggtgtcctcacgcttccaaagtcacacaatttgaaactcgatccagattgaagaacattttccaccttaagatccatatgtattagaggtggagataacgagtgcatccgactcagcccttcgcacacgtcgatgaagatttgtaggatctcgaccgtagtgaaccgattttgaagccgggtgttcatcaggctgatgataccaccatctagacaactttccatcaaaatcagaacctcatggttcccatcaggtagatggaaagcgtctgcatcgactaaactgacgatattcggatgatctcgaaggagtttctagaggaaatggatgaaaaaacacaagttgagctgatgggtactgtctacagacagctgtgtgactcaccatgacctcgacttcccgacgaatctcatcaagcatatgcttctcaggtactatgacccttttgagaatgaatgtatcggtcccaccaataggcgttggagttcttacctgataaacatgtgcgaaggcgcctgatatgaagatgatatgagcgagaatatgatcagttctgactggcgctttgtgtgatcgtgcaagacatctgaatcctataaagctgacctgatgaaagatatttttcgatgacgacattatgctgtcctaccagtctctgactcccagggagcagttcttgtgccgaagagcgcggaggttgagcagccgatcgtgctggaacggagattgggactgaggtcgggatcataagaggtagtggagtaacccggctaggatacacttgggttgggtacgagacagggtcctgagggagagctgatgggtcaatctgtagcatgaccgacactaatggctcaacaaagagtagagatgaatgttagatctgaaatagggatcttttccatctcaacgatgaccacgctcaacggatttagacaagtggagaggacccaaaggaatgacgacggggcgagttgagatggatgaatcggataaatcggatgtaaccgatgtaaccgatgtgatcgacgtgatcgacgtacttactggcttttcttattctatttgatttctgttgtccgggagagattcaccaactctggagcacgattttattgaatagtacttgcctgctcatgtctttgcgtctttgtctgtgaactgtagagcctttatcaggtcgtttagaataaaccacagccagtcgatccgattaggaggatcttctgcaaatgaggaagcatcgatctcaacagctcataagacacaaagaggtcgaggtgatgagaaaacgtttccacatcagaacgctcatcagtaatgctgaggtatgacatggttgcctcggctactccagctgctgaaattgataggcttttggtgattcgtggtctaagagctctcaatttcacaaaggccacgtatcgacaaccatcggttaaggtcactctcaccaagcctaattcttggtaagcagaacggacagtcgttgacctctacttagggaaggaagaagcgatcgaaagacttgggtgcaacaacgaatgaccaacacttgaggacgatattgacatgttgagagaacataaagcagaacaaggatgtgaagatggaatgacatggaaaggcgcgtaatctgagcatccaccttcatgctcatatgacgtacgtttgacattaacctgcgacatgtgtcagttggtcctacagctatagtgaaagggttatcatacgagtttcccaataccagtctactcgtggtccgggttcgagtcccggtggctgtatgtctcttagcttcatgtttctttttgtactttgttgtctcttcggtctgatgacaattgtctaagcaaaaaaatcgcattggttattgatcacacactgatttcggcatcctgcatcctcgcctcggcatccagctcttcctgctcagcctggcctcgaagctccagatgagctattaccacgccgttcctcacgccatcctccctctttagcttcatccatcgaccgagacgcggctcttgtcccacgcatgccaccaataagatcgaggactccggttgagcacccttcgaaacagtagccgtcgtttttgtcgtttcgtgttcttccgaaggcgagagtgaagatacagatgaagacgcagatttattctgagatcgccagttggtgaagtcgagaatcgatgaggatggcgtgatcaactggagtgagttgacaaagcccttagcggggatggtgaataacagtgagaaagacttgagatttgaggcgagggaccagatacggacggagccgtcccaagaacctacacgagcgaaagatcaagcattagaggagaggaaatggatgatgagaaaacagtaacttgagagagaaaaggcatgatgcttgacccaccagatgcaaaggtgtctccgtagggcagacaagcaagcgaggtgatccatcgggcttgtccaatgattccttccgactctgagacatgctcatttactccgtgcgcaagatgttggatgaagactggcttctttttagtgatagtccaaagggcaatagcactaagaaatccgttgccaaaacaagaagaaacgaggcgagataagtcagtgttgaagttgcatggttagacacgcacgaacaagagaatgaaaaaagactcacccgctgtctcctccactgaggaaattttgctcgtcgatcattgcgacgcaatcgatccgtccttctctgtatgcgtcctttcctttggcccctctcctcttcctcctttccagcttggctcgtttttcaccttctcttccgtggagaactttgaagcgctccagctcttcttcgatatcgtcatcctcctcccagactcccttactgcctcctcctcctcggaacacaagctgagactcttctgggatcttccaaaatcggaccgttcgatctctggacccagccgatataacggattccgctcggagggttgagagcgcggtggggacatcttgatgtccaaacagagtttccaggtgagacaacgtcgagagagaaaagatagaaattgttcgatcaagggaagtcgtgtagagagtgagtgttggcgaacggaacgccagggactggaagagacgatgtattttcagtgacaacattctggaaaccggacgagagaaagaatacaaacgtacagtgactgagtctcgatgaccctttagaccacggacccatctgccagtctcaccatccacatcccaacaacctacaactccgtccttcccggccgaagccatccattttccgtcatcgctgatcgccagatcgagcacttcgtccgagtgaccttctggtgcacctggcgcaccagatgaggaagctttgccttttcctttagcatcctttccttttgccgcacgttttgctcttgggaagtgagccaagagtttaccggtttgaagggagaatttggtgattgctccggccttggtggaggtgtaaatgtaaggagtcgagggagacactcgggctgccgttggtgggtgattagggagaggaagaaagaactgccgaggcctctttgaaagcgattgagagataaagacgtgaatcttgggtgagtgagcgaggacgtcggcctgcagtctagccgccatgatttctctatcgatctcggcggcatcgaatgtcccgtcatctgtggatatcaagattgtagaggatatacccgatttgaaaagtcaatatcagtcataggttacgcggagcgatacagcagcagacagtgacgaggagccagaatacaggtaaggagacggatagaaacaagacaatatctgaccttgctcctcttcgacattcttcaggtattctcgtgctagtctgagcctcttttcgtttccggtctctctttttgctcgctcagcctcttcctcgtcactcgagccaccacgagtgtctctcctaaagtccatgtcgtcgacaccgacgtccgacccatcgtcctccgagagttcctcatcccgcttgctcttcttggtcaaagccggtgtcggacgggtcttgccattagtggcagagctggagctgttgttgggctttcccggccgttttctcttggaggaagacggtttagagaagaaggcgtcaggcatgagagtatcgatcaggtctagtttgtcttgaggaagaaagggaaaaaagggaagaaggaaacgagagaaaaagaacaactaggacgaaaagaaggaggacgaagcaaaggaaaagggctgaggcagggtttgagtgagaatctcaaaaaattcgaacacggagggcagaggcaagaggatgagcagaggatgtaactaaaaagactcgtgatcacgtgatttttgtaaccacgcaccttacgagagaacaagcgaggtaatccagcgaacaatatatattcagagcagcgcgctgaccggaaagagatcttcctgatttccaacaccaggagaagcggcagcaacgctctaggaataacagagtgaataaaagaggagctgggaagaaaagatcgaatcccagagcaagcaacgccggaaagaaagaatgctcgggaagattctctgtatagattctactgtataagcccggaggattttctcttgctagggttaaattcaggcacgcggtttctcccactccccttcaggattccacccacgccctggcgttcatactgtcctttcggcttttctatcctttccagtttgttacttctcccatctcatctctcttgatgagtcctccgacagtcaaacaagtcatctacctcaaaacaaagtggcttatcgaagactacagctcatatctgatcaacgtatgtcctaagtgttcttcattcgaaccatccattttcacccttctttgtccctcctatgattgggggcagcttcgagtcttatctcatcatcgattgtttcaccccatttgtttccatctttcttgacatccagacttaccgatccattcttcgcacttgggacactgctcctctcgacgccctgggtcatctcgctaaagctcttcttccggttgctctggtctttgtcggttacgccgttttcaacaacaattcttcttccacgactacttccgctacccctgcccaacctcgtcttgctccccgaccaggctcacaagctagcatcctccagggtaaaactattcaagccgaacgagagcgagccgccgccgaaggaaaaaaggaaacaccttctatcgctgtaagtgtcttgatacctgcctggtccgatgagtttctatcgtacagcccctcagtttgcagactggctctgaagacttagctcacccccgttgttgtcgtccaaccacagaagactacaagtatgatgtccgcgcctgctgtcagcttaaatgccccactgtctactcctatttctcctgccgagcttgcgaaacacgatggaaactcccctgacggcaaaatctacgtcgccatcaagggctccgtgtttgacgtgagcgcaaagagagagatgtatggtcctggagcgagctacaacgtgtttgccgggaaggatggcagtaaaggattgggcatgagtagtttgaagcccgaggtgcgttctttgctctcttacccatatgcttgactttggtcttggaagtccggccgtgattgtcccttgtgtatcatgttgctcacctgtgtatacatcatcctcacacaggacgctgtctcggactactccggtctcggggataaggagatggcgactctagatcaatggtacagcttttttgagaagcggtacaacatcgttggcaaggtggccgaatagagcactcgtccatcactcaaaatcttagtagtgtattgccctcgtttcctccttaatctctctcttctccttctcaagtaggtccttgtcttctgtgtctgcagacagatctgattcttctcatccatactttgcttcgagaatttgctctgctatgtatcctttttcagctcagcatgcgttgctcgtttttgtcgattggactgagtgatatgattgaatgagaatagatggtgtactcaggtctctcgacaaaccgcattttcgctcgttcacgatgtcctctggcctttttgacgtctttctccattcatcagcccctgtctttcctcggccatctcctattgcaacagtttattttcctatcgattctttgcaacaccgttttgcttgagaaagacaaactaccttcttaacgtatcaaagcacatctcatcttacaaaacaactcagaacccgtctaagaaaaagtcattccaagcatcccaagaaaaaagaaaacccatcgtattagttttcggaaatttggttgaaaagcctggaccgttgagacactcgactgcttattccttctttgccctcgaatgtatatatcaaagttagtaaaacgcacctagtgagcggaaggcgactctgggatatcctgcttcaactcctcaaagaattcgtcaaggctctgggtctcagcggagccagcactgtcggtggacttgggcttggcggccaaatcgacggtggtggcatcataggtctcgagatcggcagccaaatcggtagtcaacgaagcgggggcagatggggcggcgggaggagtgaaagacttgacggcttggagctgggcagccttgtcctacagatcaatcagacatataacgaaaccaatcttaacctcagtaagacgttccaaatgaagagaaagaaaagttcaaggacaagcttgacagagtatgtcattcagaaagactcacaacctcaggggtcttgtaggccttaagctctttgatgtagagatcctggatgaggtctatcaggagtgagattgatcgacaaggagtatgggttgttggcgagacggatgaagaaaggttgaaaccgtgaaggaaagatgagtcgattgtcgcatatacgaatcgtcaagtgaaaagtcgtagttcaaggaaagtcaagatgaagatccagtcggatgggtttgagagaagagagatcaaagaatgacccaaacatggggatttatcgaaacacacagtcagatctgatctaatctctgcggtccaaactgataggagaaacgaagaagaggagcataccctttcggacaacagaggaagagatggacctccgggcgaaagcaggagcggaggcagcgactcgtcgaaccttttttcattgatgaaaaaacaaaaaaaagtggcatatatcagaacaagagaggccaatgagtgacatcctcgcaacaagacacaaaagcatatcactcacggcaaacatgtttatgggaagagaaagaaaaggtaagaaaatgaggtgagggtccgaaaagagaagctagtcgggagaaaacaggcgaaaacgaggatgggcaaatcaacgggggccattcattcggatcctttttgtactataaattttgcctccgactgtaatcatcgaactacacaagtttctaattcatgtccttttcccttctttcctcgctgtctcactctctgttggccccgccttgttccgttgaagtagccagtgctcacatctcaacattgttttaatcttctcttccatcacacctctccctctccctctcatcagctttatcgttctatatcatgcgaccaactctatacaaccttgtcaagacaaccactaagatcactgggcttgtggttcatcccaatcctctaccagctcttgcgcatacctaccaagccaccttgaaggttctcagccaccttcctccctcattcgcctatcgacaaggaactgaggctttgacgaacagccgtttaaatgtagtcaaccaggcgatcaaccagtacaaagttgaggagggaaaaaccatgaagactgatggttctggcgatcgagcagttgaatcggtcgagaaagccctcgctctcggagagatcgaggaggtcttggagatcgcaaagagcgaggaacaactggcagcgaagatgcttgaatggaaagcgtcagtttatctcttttattgttcttccgtcctgaaacctgcagtcacactgtttaaaggtttcgtgacgttgtgatccgatgacatatcgatcaccaagccatcgctggaatggctgggatcttattctcctctctctttttcgatgttcaaccctaccatatacaaatatctgacctggtgttttcttatatctatatcaacttgatcggaaaaacctttgacgctcctatgcgttcgtctactcaccgtgttgctttcaacatcgtccctatatacaccacccatcctggactctctgttgcctgctcgatcaccgaacatatgcatctgcataaccactcacaactttggacccttaatctagctgggagcccttacggacgcctactcctcccggccaatggacagggttcaagcaggacgactaaacggtctgatcagaggtcaagggaagggtttcgtgttgtatctacgttgtatggaagggaagaaacgagaatgtaacagttgtattctgtcagatatcctatgctccttattatcgtgtcgatcgagtcgggtttttttaaatctcgagcggggctcagtgtgatggagagggttttatgggcaacctttggcttctctaatgtttaatacctaacaaacctgaaccggtcaagcagtacccgttataaacccatgggaatctctcggcctgattgaatacggggatagactttgaagcctgtcggccattcagaatgaagttcaatcatcgacgtgaaacatggttacgcctcgttggttacggcaccatccccatcgctcacgtcccagtcccgttcctaatagattcgggcccaccagtcagcgctatctcgccttcttcaccattcgtacatcggatagcaccagggatactcaccctctcctcttgcctcttccacatatacttctttcacatcctgtgagcgaacgctacattcttttgggtttcgacacctagcctgaacgggttcatatcacaccgttcgtcctcttttgaaagtgagcacctcagggtctttctcctctgacaccttgttcatacacccccactttgcatattcatagtatcgctccacattggaggcatccctatcagcttgtcttgagccttctggtttatttctttctgagtccagaactacaaatactccacacgttggctttgtgactatcgcttcctcaacgcgtccgtcttatcgttcttagaaatcatgtctaccaactccgcccccctaccaattgctcggccggccgcctcgaccgtgccgtcttccaatcaaaaccaaggccatcaccatcagcatgtcccttctcaaatatccttttcaccttcatcctttcccctccgaaacgggatgctttctccttcaagaaacttgacatccaaccccattcccttacctgttccttctggcgggttcaaccgtgggggaacttttcctagtgggtcttacaacaactcaggctcccttgccagaagttttcgaatgggaagcatgatgaacagctttgaggatcgaatgcaacgtatgggaagttggaagggcaaattcgtcggaagcggagatatcggagggccatggctagctggcggaatagagtaagtctttggggttccacccttatgtggctgagcacatcgtcatctaattcgcttttggagaacatgtctctatgtactctcgattcttcttctaatggctcatcatctgaaattattcatcctatctagcgcccatgatttttcaacccatttctctacgtctatggagtcggtcggaggatcctccatgaagatggccaggagagaggctgactatgtaagccactcttcactcatacaattagtttggtatgggtttcttacagtcaactctattctttttaatcccgagcaaagtgccaaaactacaattgctgtggactagaattatcttctatgcatgatctcctcgaacacgtacgtaaaaagtcccaatgtgtctcttgcattcgacattgtgatgagttatctgtggtgactaataccaccgtcacattctcgtaacagtatgaggacgttcacgtcatcatcctatcaccctctacaaatgcttctcagctcccgtctcacgatattgaatcaatggatctagaggcagatggtccatcgtcatcatctcaatcatccggatcctctgcttccacagcctctgcgattccgtcgtctgtactacctcaacagctcaaacctcaatccagtccactcaatcgtgcacaccccatacccttgggcttctcatctcccaggacatcttcaaacctaaactcgccgtccaacatccttcatcgaacttctcagccgtccaacccggctcctcttcaactgtcagatgttttggcccctccatcaaattcggcgttcgaaacatcggtactgacgtcttttcctccaagcggttcagacaagaagaccaagcaagcccttgcgggccgagccgcctttgttcattccggtagtggtgttcaaatcaaggacgagggatggaatgcgttggcggacggagctaagacgcctacgaccgtgtgggagggtgagtatcgatatccctctcctgggcaaggttctaacttgagctcagcgggtggagttggtggatcaacttctggcttgaatggtccctttggttcgacaagtactatcaacaataatccatcggccatgcctcctacattgctattctcatctcaaccacaaccaaagaactctacggcgccactctctccatcttctgcagcagctcaggctcaagcagctgcagcgatagcagcctcgatgaatattaacgacgatggggaaatgcattcgttgacgatcacccctggcctagctcatcctaatggaattccaccaccggcttcggcgaaccaaaagcttcatcactgtccgacacctggctgcaacaaatcatacagttcgtgatcctaatcttcttttcttcaccttctttctgtgctccgtccaaaaaattgctttgccctgactgaggtcaagcagctgaatgccttccttcgttcacgtccaacaagatgagattactgatgcaatacttgcctactatgtacacgctcacagaacaacaaaacggtttgaagtatcacctcaaagttggacagtgtgatttcaatgttcgagatggagtggagaacggattatcggaggagcaagccgaagagaaaagcaggccctatcaatgtcaagttggtggtggctgcacaaagcgttatcgacagatgaacggcttaagatatcattatttaaattcagctgtgagtgtatggctttcgccggtctttcttcaaatcaggcatgttttttcttgtttcaagatcccaggcttatgttatctatcaatcaggcacacggagccattggattagctctcattcaacaaggtaagcatccgaatcccaaaggaggagaacttccctcttcaatgggagtaggtcctgtctcaggctttaaactcggatcgacatcttctctgtctgctattggaggtaccgctgtgggcggaggaaccaatggtgtcgtgggtggtcttccacgacctgggaactggccactacatcaacttgctccccagttacaacagcagctggctcagcaaagtcaagtcagcgctcaatttgcatcgagtaaatccgacctgagagacgagatgttgttcacggtgaaggaggatgaggacatggacatggacatggattaaagttttgaatatatttatagccttaggcttggtgggagcaatctcaaccgattttggtcgatacatgacctttttggacttgggtgcccacagaccacagatcaccaagatcccataggccatgggtctaattgatccctgtcaatggagtagcgtcagcagcggcggtgtcaaacactagctttgcgctttctggttctcttcttggtgaagggctcagtgcggcatttagcaggacgcattgtcaccccctgttccgccaagtctgagagcaagcagagcgagcagagaaacaatggctactcgacacaccatcctgtggtaaacatgaaaaaataaggaggccatcacacaaagagacagatagagagagatgaagcgacagaaagacaaagctgagatcgttcattcggttgatcgagccgcgcacagctgatctcggcggtgttcatccatagagccggtcactctgctcttcccgctcacacggcgagcacggccgggactcttagcggagagaacacggtctggctttgttgctatatctgcatgtctctcaagggcgtcatctatatcttgccgctatgcgtgtacagcgtcggctttttctacatcattgtgtttaatgaaacatgactcgtcacccgattgtctcatttctcgttatactctcttgtttctacacgtatgaaaacaattttttggccctaggtgtaaattgatatgaactagaggcaaacaaagctttcccaataatgagagccgagagttgacaatagatgttgcaacaaaactagactcaatcagcgacggagatcgaagagctttacgtaagccttgaggtttccttactgcacagggaggaacgactgatacttcaattcgacaggtttttgcatgaccaagatacgtccgcttcctccgaagctgatgtctgtaagctatactcaactttcccttagttttgtcccaagacgcattatctcctaacttccttccaccactgtatcaagtcagacaccttcaagcagaccagtgcgctgaatataatgcagcgttattctggtcatcatactggcctactcacgttggacggaggtacgttcaatattcaagtttgcgcagatagtcaaggtgtcatcgatgctggctacagtgcgttaggttgatcgtttcacttttttctgctgctgtctgtttcttcgaatatatcgtttagagagaggtcgttgagagactgagagtgtagctttgtttgctctgtcatcagctgcctggcaacaaggagatattgcattcaggaacattctccgaatgatcaggaaggagatctcggaaatggtttcttcagactcgaaccaacccggtgactagcttgaagcttgtgcgtccctgtcctcccctctgccgatctgttctgtctccgaagctcatcggctctatatatatcattaacgtacctgtcttgatcgcgtgtacagccaacagatatgttccagaagccggccatcaagctcacactcggtctcaaacattgggctatccagaatgccgaggaacttactgaaggcgatgacggcaaggaagatctgggtgccgaactgatgtggacgcatatgaagtgtgacccgacggacaagtgggcctgagaaggaaataagtttaattgggccacgagaagtgtacatcggttttgtttatcttctccttgcatcattcattgatttatagtttgttagatagtcaccaggatcgaagcaacgtatgaaatgatcggctccctccgggaagggcggcctccgaaagctgtgccgaccggcgtctatctggcttggcatgagactcgtgaactggttcaggccggatgatctcatgtatgaagttgatcaagaagtgtttgttgatgacatccgggtatcatataaagcacgttgaactcttcacaaagctctcaacctcattcaaccgtgttctaatctatcatctacttcttattgatgtctgactcaaaggcgcccaactacgaacaaacgccttcctactctttcttaaacgcttccaacgggcctgatgcacctccctacagaagtgatgtatgacgcttcttgaacctgtggctttcccttttgaatgttgcttacatactattctcnnnnnnnnnnctgtgccgaccggcgtctatctggcttggcatgagactcgtgaactggttcaggccggatgatctcatgtatgaagttgatcaagaagtgtttgttgatgacatccgggtatcatataaagcacgttgaactcttcacaaagctctcaacctcattcaaccatattctaatctatcatctacttcttattgatgtctgactcaaaggcgcccaactacgaacaaacgtcttcctactcttccttaaacgcttccaacgggcctgatgcacctccctacagaagtgatgtatgacgcttcttgaacctgtggct

SEQ ID NO: 2067 - DNA, 1467 bp, Xanthophyllomyces dendrorhous
catcgagtccaacggacccctccacagaacgaccagtgtttccttcccacctccgaaaacgatgtcatgcatctccaacaccactctggcccatcgttgcgcatccttcttcctatccattctgccgagtatcgacacgatcgacaaccctatactcaaacattccatctcgtatgcgaacggactagacgtcagtgtacctcttccatcagactctatccctttgaacccacaacactcaagcgcacgtttcttccagtacaccgcttgctccatcaaccacaacgtttcctcagggtgcttcatgccgcccgtcgcttcgctcatgtgaaggcccgacaggcaattataaagacagcagagctcagacatgaaacccggtgaacggttggagttgtatgtcgattcgatagaacgagtcattttcatgactccctcgagagttcttctcggtggtttatacatctttccattgactatcggtgcaactccggatatgtattcatcatactccaaagcccattcgaggtcatcaaaccatatctcacgtccatccagagggtcaagccgttcttctttgcacaggttacattcgcatcggtcaattccgtactcgccgatcagtgctgttcgccaggctaacgggctgcaagagaagtagttgatcgtcagctcttcgccaggcgagatagtccggcgggaacgaaggaccatgatgtcgtcccagaatacccagctgacgttggcgaagcaggcatggttgaacaacgaggggacaaggtagatgcctacgtagatgacgaatcgataccatttgatgaaacaggatacatcaaaacacaaaaagcaatacaaagaatcgtcaagagagaaaaaaggcaaaaaaacgtagtagacagagagaaaagagattatcttagaggcaaaagtacgagacgtacctgaacacggctcatttctatgtggaccatgcatagtgggcccggtctcggcgatgatgactgacccggtcgcaaaagagctgtaggtcctgactccctccagtctcgacacgtccacatccaccgactttacctcctcctcctcatcctcggtatcgcccggtgcgccaggcggttcgaaggcgcttagatcgaccaactctggatccgaggatcccggtccagcatacagcctcttcaacacgtccaaggccctcggttcgtcttgaatcttgtccaccatcgctcgtactagatatgcatgcgcagaccctgaagcgtattgttgaattggcacgttcaccagctccgtcagcggcccttcctttggctccttcatgtcaaccgatacaaacggcttgcacaccacaagtagctcgcctcgctcgatcgttcggtcagcgatgacgccccggatcccacctaacgtagggctgcggcctatcttgaaggaaggcgacacccagtcagcaactacattcctcgt

SEQ ID NO: 2068 - DNA, 390 bp, Xanthophyllomyces dendrorhous
ccccccggctggagatcaccccgaaagatcgacggccagtcgtacacacccgtccgagcctcgtccactctggcttgtgtgaacgccagcaagtccagcgcaggagcataatcaggaaaccgctcaacaaacacagtgcagtgctcatatgcgaccgaccagtcgcgcagaccgatcgaagctagcacaagccagtggtatgccttctgcagcagatccgactgggccaagtccgcccgtccaggttcctccgcgcgtacagcgtcaagaaggccacgcagtgcatgctcgccatcgacaaacgcgcctctgaaccgcgagagtcggatccggcagtgcgctcggtcaagtctgagcacaatatgcttgctgtcaacggtcagaccctcg

SEQ ID NO: 2069 - DNA, 490 bp, Xanthophyllomyces dendrorhous; identical to SEQ ID NO: 643

SEQ ID NO: 2070 - DNA, 339 bp, Xanthophyllomyces dendrorhous; identical to SEQ ID NO: 644

SEQ ID NO: 2071 - DNA, 557 bp, Xanthophyllomyces dendrorhous
gcacaaaacaatcgaagcccatcatatacaacacgaaaaaaacataatagaaacatacagacagttgatgataacaagatgtcagtcgtgtagcgttctgtccgctgtcgttagtcgaccacatcgttcttatacagttcagcagctattccaatgtgcattcatcaaactgtaaagaagtttactaagatgaaagggtgaaacatagtcttttcgttctggcacttgtttctgttgaagtcctcactggttcctcacacccgtaacacaccacccaggtgttctagtaaagtgagatcgagaaaccaggaaaacaaaagggaaccagctggagagtgcatagctctaggccgagggtcttgggactctgcgcagaaggaagtcggaaggtgatgcgtcaagaagaaataacgaactacagctgaaatagtgtcaagacttctgaaatttcgacaatctatgcgtgcatctcgactgtctaggttgatattgaccgctctcaaaacatcaagatcgtatagtatagtggttagtacttccgcttgtggttcttcaac

SEQ ID NO: 2072 - DNA, 1569 bp, Xanthophyllomyces dendrorhous
tataccggaacgggcatctgtaaaagggcggaagagccgggcgaccgttttgttgcgacttgactaggtggagagttctatcatcacaagttgtctcaaaactcaggctcatggatcctcacaggcgcggcagagatagagacattgcaagaatcaccgatcaaacaacctcgaatgaggatgacaggactcggacttgagagagaagagaaagagaacaatatagaaaaggaaagcgaccaagtgctttgggactcctcgtcgcctgggcatgaatgcaagcaggaaagggcgcgagaccgaaaggtatgaagcagtgtagatacacattggtatcgaccgcgcaagaggtaagagacacatgttgtcgagatgatgtgcagatgaacacaagacctacaactcggtcagatctttgatacgaagcgtacaaagtatgagaagcaaaggaatgtgtgagagagaggcaaactgggcatccgggtcgcatgtggtacagttagcttgtgctccatacagggctcaaaaaggaaaagaataagaatggaaactagaatggtaactagaataaggatgagaatgagaataaggatgagaatgagaataaggatgagaatgagaatggcatcaagaagaaagagagatcaaccaaagtgaagagagaagctacgggagagaagagagtataagaaacgaaaagacggacagagcgagagaaagaaaacatgagaagatgaagagcctcaggacgacggaacaaagtcgatgtggcaattcgtttcgtttgcctttccttcgccgtgtttttctataaagtcgccacatcatatcagactgctcttcttccatcactcactgtctctactctatttagagcttctgttctgatctaccgacctcattccaccgcttgagtgagtcttctcccactggatccagtgcgcgctcataaggctccttcgctgaacgagagctgtcttggctattctgtggcaaagtctccgtccagctgtcgagtatcatgccaaaggtcgagtatcccaacaggaaatataaaccagactacgacgatgagatatacatcaggccaggaaggaaaatcgtatgtgacgataactgcgaatgcagtctgatgcacgcaagcgcgctcgatggggggtggggcgtcaccctgaacgaactcgttgcattgtcaagtggaagggctgagctgagagagctacagccgcgtgggttctggaatgtggtggccgcccacggcgtcaacactgacgacctggtctacagtgtcaccgacatgaagctgtatgtgggagcacacgtgatggaaactcaatggaagcttttcagtgccatgtccgacatgggcaacaatgcagaacatcacccactgatggactacattgttgtacggagctctacagcgtcctctggcataccggttacgagaatgcacgatgatgcttcaatcgtggtaagcaacatactggcagagggctattccaaggtgctgcaactggacgagacaactgaagacctcatagtggacgaggcagccgagggagacac

SEQ ID NO: 2073 - DNA, 416 bp, Xanthophyllomyces dendrorhous
aaaaaaaagaaaaaaaaagaaaaagaaaaaaaaagaaaaaaaaaagaaaggacgggcgtcaacggttagggttacgtgctgcaaattacaccacgcgtaaccattgacaatcgtgactcggtaagaatagcggctctacgtagttcagggggcgcaggttcgaatcctgccaactccaatttgctattttatcagtccatagtcatgtcatagaatccattttactgaaacacctgagtggtgtgtatatggtttgggaaaccagtgaggacttgattgggaacaagtgccagaacgaaaagtccattttcgcccttttatttcagtaataatattcaaaagacgcggggcagacatgtacttgtattccaaatcgacaggcaactacatcaacagcctggctagctcaatggtag

SEQ ID NO: 2074 - DNA, 815 bp, Xanthophyllomyces dendrorhous
aaacaggcggtcagaaggaattgatgagaacgatatgggagaaacagaaggacacaaagaaggaaccacacctacggaggatgaacagtcggaagcgaccgatgaaagtacgcaggatgcagataatctgaaaagattcacggtttgttctgcgagatagaacaaatttattctaactcagcacacaaacagtctttgtgaatactgaggaagggaaaaagaaaaagaaaaagaaaggaaacgaaagtgtcgatcgcagatatatgtgagagaacacaatgtgctgggatgagaagatagataagaagaaagaggctaaaaagacagcaagagaaacagccacgatggaacaagatatctgccaagatggcgatcgagacatcattagttgaagatgaaacagaaggattgtaagaaataagtccgacatactgaattcgaaagcataatcccaacactcccactcatcgttgctctttagacaaagacgtgaaacgaggatgttgaaaagaaaggggaaagaagaacttgaaggagaataaaatgagatgtggaagacaagtggaagatacacatagaagaagaagaatctgacaaaataagataagtcgaagcgaagttgaataaaacaagtcgaatcgatacgatttgaaacgaaattaatcgaagcgagatgaaaaaaccgagcagatcagttgatcgaagaggaaagaggaagaacaaaaatgaagggtagaaaggccgaaaggttggaaagacaaaaacagtcgcgactcaaccaccatcttctacttcttgcttcacctctggggtca

SEQ ID NO: 2075 - DNA, 557 bp, Xanthophyllomyces dendrorhous
tggtctcggtgtgtccgacgtccacaactggagatcaggttgcatcgggatccgacggggaacgatgtgagaagcgtcaaaccggtcgagtacttcctcgatatacgccttctgagagacgctgatcgttttaccttttcgatctctcgcaaactccatccccagtagcgaccctgggtcaagatcgccccggtcgtcgatctcagactcggttccgatctcggagaacacctcgtcgactgccttttctgatccagcgacgacaaagccgtcgacgtacaacatcaagtacactttccggtcgtctcgctcaccggtaaacaaacaactgtcagcttcggttgctgtgagtccgatcgtgttgagaaaacaagcgagacgatcgtaaaacgccttcggtgactgacgaaggccatagatcgctttggatacgtagcatagcttgtcccccgatgatacataggccggaggcggcaccatccaaaccggctgatcaagagtagcatacaaaaacgcagtcttgacgtcgccctgtcagatagtgagatcctctctgg

SEQ ID NO: 2076 - DNA, 361 bp, Xanthophyllomyces dendrorhous
cttgacctttcccttctcggctgacggaccacatgtgtacacccatcttccagagatcacttccttcggtcgaccatcatccggcttgatcttccatacatccagcttgtcgaactggtccatctctgccttcatctcctcctcccactctgctcggaaaggtccgctcattgcggctttgtatgtctttggtggtgaggatggaagggttctggatccgatgtcgatcaggatgtttgcctgatgacttcccagccggaacggagtggtggtctgtcctgttgggcgcaatgctcccactggagtgggcgagtctagcaagaagtcacgtacgtttctctcatcttctgcttcttctgcg

SEQ ID NO: 2077 - DNA, 6983 bp, Xanthophyllomyces dendrorhous
ttgcgcatcgtccagctctcgtcaaacacgacgtttctcgagaagatctcctggctcatgttgcttttgtcgatcaaccggtacgctttcttcccgaacttgtcatccgctatgcgcatgaatcatcagaggaaccattttgcatcgacttccccacttcttgagttgcttctgcgtcatgaaaattttagttgagttgttccgtctacgtcatcatttttgctgatatcttttgtggtcatgactttggctctttgcatccaactttctttttacattttgttatattctgttctccagcattaaacaacaattgtccttcatgaccacttgctttaccctgtgtcgtttgttccacatatattttcacgcaggcctatgtgtacattccaccccatatcctttcttttcttctggtttttgtaggttttatgtttggagtcacttcatcaaatgtacaatgtattatttcgcctagttttatgacattacatgactgatcagatgaaattgtttgttttcgctttttcattgtctttttgtatcgatccagtttctttctgacctttctttctgttttaacagtcgcatctgccctgtgttactagtgatacatgtaccctctacatttttttcgttcgacttcctactcacccacctcttctaattcattcatctattttacaaggctgtttctgtgatgatgttcatatacattgttctctgtgttctttcttcaccatctactatgcgactatagcttacttatgctctgcaaccagagtcgatttgtatgtcatgtcgggtataccacccaagattcgttgacttgagaacaattctaattgtgtcttcacatatcattgagtcgtagttatgaggttacatcattgaacgtgaatgatgaatgatagtacatagtgataaaaattacattacggctcttgacggtgatgacggtgtttttcaaatctcgttgaaacatctctctggaaaatcgagtttagtactggttcgaggtgtatatttagaaagtgggatctgctcgtgagacggcatgtgcgattacggatgcagttctacaggatgtatagacaatctcatcactttttcagcttaagctacgaggataagatcatcctgagatcgttgattaacacatttcaaggaaaagcagctaaaagcattttaacgcttcactttcgtccatagtcagcttggactttgatacacacatgttgatactttattcaaaattcaagttctctgatgaatccgaatcttgcctcgtgtagaaatgcgtattgcactctccgaacaatcattctgaagctgatacaaacggtatcagagtgttcataaaaagttcagttcctgcgtccagatttgtggataatcgctataaattgacatacattgcgtcacatacactgacggtctcatttcgctctgatgcatgacctatcatatcttacaaaatacaaagaaagactctgataacaaactgctcgaatgtcactcgttataaggtcacgtagaatcatttagttatatccacagatgacatgtattgacaacatttcgaaaccaattccgaatcatgaccgattcatgaagtatctgattatgttattatacagaccgcatgatcaagtgacaattaaagtacagcagtctgataattgattatagtgccgtaatgaaaccatgcaagaaactaaagccatgggcgtcacacgtgatgaaacgaactgtttaatgttttgtcaaattatgataagtcagaattcattttttgatgttttacactcttgatagcaatggttcaacaaatgacatgaggtcaatgacggttagtagtataatcatatctgtcacacgtatgttgctttactagtgtttgagatgtaaagaggcaaagaagactgttgagtactattcgcatgcaatcatgtgattcattcaactgttctaatctgacaagcagtgagtccagtacggtctgcctattccgggagtagcatcaactgatatgagctcatgtaaagggttaatctatggcaaaacccgatctgtttctcacttccctggcagacgttttgatttagaatgaattgctaaagccatatcttgtggaaaagtaaatcagactcactgcgactgaaaaattaccaattgtgaagatgtcgaagatcttgaaaaggtcataacgaaacgagaaaatatgtatattgtgggcctacagaaactataatatatgatgactgtatggaaattttttctatcgtctttccaatgattgaaacctaccagaatatcatggaataacacgttgtagttgacattgatactgattaacatgaaattaccaaaccgacttgagtcttgagtcaactcaagaggtaaacatattcacatgtttgaccacttgttctgaatcagaacaccgggtttttggatcatatctttttgtccatatctgagaatcgagatcatgaactgaagattctcaatcaatgactttttgttatcgtgtgaaagtgtaattgtaatggttttttttctttttcgatttgataccacctgagattgaaaaggtttatagagcaacacaagaaacaaaataagcactttctgaacgtatccataattagctgtctatgtttgagaagcttaactaaatcgacagtaatggcgacaaccagaaaatcaactttttgattcagagttcaaatgtacttcatgtcattatgtctgacagtaacgttgttgacgtggatgtctatgatgaaaagaagggtcgtcagtatgtcggacattcaaaagagtcatacggttttgatagttatgttaatgaaactcacatcgacgatccaggcggcagtttcactcgcgatattttttctacatatctgaaatattgtatgagagtcgaggtcacatcatgcaacgataatgaacaaaattcataaaaaacgaacaatctaccagcgggaggttgtacttgtctgttgagattctgataacttgtcaaatattctagacacaatgaaatcaaacaccttttctcgaatcaaatggtagtctctgatgttttgcatatagcttggaagtaatgtcaagtattgcttctattcttatctggaaaaaagctcaacttacgataaatcgcaatgtttagatcattttctcgtccatgccttctgatccatgaaaacagaattttgaggatgaagtaaaggtcctgataagtaatttttttcaaatcctgtagttctttaaatgatctggatatgtccggatggcgtacaaagtttgtccttgattgaaattgcgttccatactcctgttctcatcgctgaacaagatgtgtcattgaatgatatgataccttgaatatcttgtctgacatctattcatgaaaataaaattaaaaacgatttctatttagagaaagaagacattgaacccaatatctggaagttgaagcaaaatagtcgtaaaatcattgatatatgtcctgtgagcgagaaaaaaccatatttgttcagttacaatacagataaaatactccttgagagttatatgatctgcttgagctgtggtcaactcaaaaataactatctcaagaaagcaatcatacggacacattgagattcaatgtcaagaatttttatgtgtcggaatccagtcgatcaattactgagatgtgatatgtttgacaaaaaatgtatgcttgtatcatatttgaggtgattttggttttttttaaacgccgtacattactaatcaaaaactgattcaaatgaatagttagtcagtttaacttgggcatgattgtttttttcgatgaattagtactacaaatcagaagactaattgatgcaaagtaagtttcagttgttttccagtataaaaatgaatgataagattggacgaaaatgttgcggcctcgaagatttgcgtgtattttgcaatgcacattttctagtagactataatctgtcaagctggcatgataaacctgaatagaaacatgtcattgcagatgacattgaacaaccactctttcgatctattttctcttaaagatttgaaacaagttgcagaaatctcttatgacctgaaatattgtgtgataatttatctttgcgtatcttgattgcaagaaatgcgaaatatcttcaatgtactcatactaattgctgctttttttgcaagatgtaccaattttacatctttaaccaaaacagtttcagtcgtgaatgatgtccggaaatccgcagccaaaaagatggttttggctcgcaatacatattattcacaatatatgcgtgaaagtttctccaatatcaatttcaatattataattctcattaacaaatatttttcttcaaaactagacgtgtcaccagatatgttcagtggtaagttattgagagtggggaggcatatttgagtcatcatacaagtctttcagttgaagaaccacaataaatatttgtgatgtgggatttattccatgcttacaatcttcagaaatgaggatgatacatgacgagcatatgtttgtctccttgtagattttgtcatacaaagaaatggtcatcatatcaggatatgaaaggattgtatgtcgatgaataatttgcaccagacatgaaagtgcggcgcaatttaaatacggttgtttgattgaagatcaaatcttcactggaggttcatttccataatttatcttgatcattcgatttaggcatacaatcgcagcattctccctacaggctatataggcatcacccgataactcaaattacatggatagacgatttagtgacatttgggcatgtgtgttatcagtcggcacatcaacgtcaaacccattcgacgttttatcaatcccactacaactttgtaccatattgcgaagttaaagcacttacagtatacatcaacaactaaaaattggcaccagaggctattgatggctaagtccgtccaagaacttggttttgcttcataacaaccggcttttccatgttaagacgaatgcggattgtcaaaagtcattcatcaatgtgctcgcattacatagcttgtgtaccttggtcttttcattcaaattgacatgtcaattctcatcaagccgttgtcaagcttgaagtttattttgcaagaatgataacgtttgcgcttattcatcctgctatttcacaaacgacattgcatgagtttgcgggctaattagggtagattctaaccttccccaactcagatcattcctatagatgctgctcatacaatggatgtaaccctaataccatatttccgtcggataccgtagctacgatatgtatgatatcgtcactcgcatatcaacctttgatagcactgttacattacagtgctgaatgcaagaaaccacattgacttcaaattgatcatcagaattcgagatgccatcacccctgtggtacttgtgaacatgcgatcgctgaaaacaatctgttatcagtgattgagtagaagatcaatcagtcaaaactcctttgaatctgagttccgatgcagttctcaaatggacttgtgaagactttcaattattccataagcagtcgtcctatatattgcacttatcagagaaaatcggattggatattgaatcaaaatacacaagtagaatcacgcagctcggacactgttaactgcaataactttggttgtataagagccaaaaatgctttatcaatcgatgccttgaccattctagtacttcgaggcacaatcatttcgaaagcacattcaaggcacttcatatcgcctcgtagatctaagtgtgtacattctgacttcatacgctcaaaacgtttaaagatgctgaatcaacccagaattgggagttgttattctatgaacaggattcaggtagacaatgaatttgacacattgatagatatgtgcaaagatagggaacatacattccaggcgacagctgatgcaccatggacgcgtacaatttgttttggtatgttgggggtaatattcaaaagcagtaaggatgtatcgtaatgtaaaagtttttttcatatgcaaattcgtaagtaaatattcttgtgttttctgactatggaaaaagaaaaatctttgacgccatgtaccaatcgatatgacactccgcattgaattccagcgcaaagacttgggctgaataatgcaaagcagaatagggtgctgagatacgacgaaagatttattagtatacaataagagcgaacactgttttgtattgtagatagattgatttaaaaaaacaaacaatcttagtaccaaagaagcagttttggtaaatgctagggaaggaaaaacaaaaaacgggaaagaaacagtaaaaaagaagtagaggaggaaagagatattggaattagcagtctagacaccaaccatcgagtgttgcgcgttggttgactttctatctcttcggtttctcgttcaacatgttatttcatttctattttctatatcatctttatttcacttctctctcgttttatttccattctactttatttccatcttgtttctctttcgtttgcatcttggtgatctcgaatatacagtagctagtttgttttcttttctttcttcccctttctggttctctcaatgaacttgctcactgtgtgtgtgtacaattgtttgagaatcagagaattatagaattagcattaggatcaggtctatccaagaagaatcagttgtctcgaacgaacaatcaaacaagaagatcaggatagattccaatctcagagaactagagatcagaaacttagtctgacagaagaatcagttggcattcaagtgtttctcaacaagtcgatttccccaccaagtgctccctattttatcaagagaagccatatccaagtatcctcaacaactcaagtactctcaacactccgacttattgttcctgcttatgaaac

SEQ ID NO: 2078 - DNA, 359 bp, Xanthophyllomyces dendrorhous
ccatccatccatccatccatccatccgttcactcgtccatcttcctgactccgactcgaccgtggagtcctcccttgagcctcaggtgctcgtacgtctccctcggcaacgccttcgtcagcatatctgccggcatctccttcgttcggacccatccgaggtccagcacgccttctctgtgtaagtccctcgcatacttgtatcccacatcgatgtgtttcgaccggtgatggagctgaccactcttgactgacgcaatcgctccttggttgtccgacttggcaacagcagtcgggatcgagtagccgagctgtcccaacagcatcctaatccacacgacttgagatgctccttgagac

SEQ ID NO: 2079 - DNA, 368 bp, Xanthophyllomyces dendrorhous
gagtgaggctgctggttctggcagttcgccatcgctgttgactgtatgtccttgttgtccaggattcgatcggccacaaagtcaagagtgagcggcctgggggttccgtgagcgtctgtgccgacctgggcctgtatattggataccagagtctcgccttggatggtcttcggaagcatccgcagaagtagaaggcctgccagtttgtcgacggtgatgctgtctccggtgatctggcggatgagactgacctgtcggaacacgctatctatgctggcccggagatcggtcgagtcttcgaggcgagcatcccagagtgtacttagtagctggaggacaccagtcgtgcctcgcttaagatgggccga

SEQ ID NO: 2080 - DNA, 812 bp, Xanthophyllomyces dendrorhous
cctatgactttggcatcttcatcaatcctccagagcctgaccttcgacacacatcctcgtgtcacaactctacaactctacaatcaatcaagctgcaacagaacggttgccgagcccttccgtcctcacatattgttagaatcacaccgaaaccatacgttgcacagctcgggatgtaactacatagctatatttccatccatttttcttctgtttttcttttcttgacttcatcacctcccatcgcgcgagcttacgtaatcctgcgcccgccgccggtcgtcgtttcgtcctttgatgtttctcgattttttccttatttcgcccatatctccaccaatcccgcccggatcgctctacttctttcaccatccggaccaggcaaccttgctctatcgatccatactgtttctacatattttccatgtctttcatttattttttccgactagtctcaccttctccggcttgctccaccttcttcggcttgtctctgtgcttgctcaactttctcgtccaccactttccatataagccttctcagcttcccatctcctttcttcacctcaggcatcaccagaaccccattctgatgtacaaaaccttctgttacattctgcacttcaacaaaatgcttctaggctgactcatctgctggtccatagagtcatcgtgtgcttggcttggacatcagtctgaaacccatattttaccagcgtcatcatatcacgcccaagaccggttcgttttgttcgttttgttcgttttgttctagcattctccgtttcttgtcatattccgtcagcgttgtt

SEQ ID NO: 2081 - DNA, 741 bp, Xanthophyllomyces dendrorhous
cactcaggtgtccgatcctggctctgtctgttctttagttttcatccaacaatcgctcccgtctctcttccactgccggctcccttctgctttctttcctctttctgtttctacagccatcttctcgtcaggtcgatgtgctcacaagatctagctcatatcatctcggcacctcacgcagccctggcctaccactgactgctagaacgcatgtatatactgatcactcgagctgttcatgcgacgatcgaagcagtcagcaagcttggggtgtaccgtcagtcggtgggactacaaccgtcacagaaacaaccagcacgtgtacccatcttcttgctagcttacaccccgtctgtcgaccgtcaaggcaacatcaagacaggacacagcgctcaccaggtaaagaaaggtatgtgaacggcagagatcttaagagtggttgcaaggcaatgccatgaccacgtccatatcgtatatacatctatcgctgtcacatatacatacccgttctcatatacatgtctcacccctcgtgcagtcagtcagacagccagagtctcgtagaatgatgacggccgagctagagacaccctcggcagcggtcacccagtcaacgtctccgccgaactcactttctcatatgcgatcttagccaacctgatcaagcaaagcaaatcaatcattcgctcacctatgtatcctgttcgaaaaaaggcacagacacaggcacagaaatagata

SEQ ID NO: 2082 - DNA, 652 bp, Xanthophyllomyces dendrorhous
catactgacctctgcttcagctccttcttggtgaggctctcaccagcctccccacacagctcctctcccacccagacagtgcctctgaacataggggcatgcctcggcctgtccatctcctcattgatctggtactcgaccgtcctctttcgctttgtcttccattcttccagcctagacacatagtttggatcagatgtcccgctcgcttcgtccgccccgcctgcctcgctcatctttggtgcagtctgagcctcatgctccttcagcagcccgtacgacactttcatcagtggaagaaacacctcggacagccaccgctgggtgaaggcctctccagactcgagatacacagcaccgactgttcagtcgacaccggtgagggttccatcagcccaagatgagaaaaagaagaagcaagacagaacagcacaacacagaataagatgaagcgaaaccgaccgaaaccaaacatgatcgaatgaaaccgaacgaaacgagataacatggagacagacccagagacagaacagcgcccagaccacgtcacaacacacaaagaacgaacggcaagacaacaagcatgatgagcacgacaaacaaggtggaaatgacggaagcggacgacagaaacacacggcagaagaaaaca

SEQ ID NO: 2083 - DNA, 1179 bp, Xanthophyllomyces dendrorhous
ccctactcaccataagcctcgaacagatcggccacgacagaatgggtcggccgactcaagtcccgctgggagccgtgcgcccgaaggttcttctgtagaccgtaagctaagaagaacgatgcaggcataaaatatgtcatcgtcagtcttgtcattctgacaaccacacttcgtccgcccgggatggacagtagagccagaccctgttgtctttcacccaccattcgagatgtatgccaacgtcggcacattcatcaccagagactgcagacaaggcgataacgtagtatagatgacccatcgatcagttcgctgcggccgtctcgtcatcgacacattcatcttgccaggtcacgtacatgcttgagcagctgttgagatcaaacccggttgtgacaagccaggcaagtccagaaagtcagccagagagcgaaaagacatgggataaacagtataggatatgaaacaaccagagacagaacagacgacaagagctcgacaggaagaagaaaagatcaggaaagagagacgcagaacaaagagaaaggcagaaaagagagaaaggcagagaaaagaactggaagagaaacagaaagaaggcagagaaaacacagactgaccgtcatggcccctgctctcaagtgagggtagtggtcccatatcattatcgtgatcgctgtcgaaagaatgccatcccccaggaactcaagacgctcgtagtccgtcccgctgtactccggctcatcctccaccggccgtttcggatatccatagaacgaggtatgtgtccgggcggtgtcgaacaaagccggcgagcacgtaggtagacgcggtaggctctcggccgagatcgatcgcagagcatccataaacggcttcttctgcgtcagctccaggctcgtcaggttcagcaccaaaggcatctcgcagaaagaccggatcggagacttgctcggaaggataaaatggccgcagactgggcgagagcaggaagagaatgagtcgggtgtgagggcgtagatcgatctgtatgagccgtggcggcagaatgactgatgacgctgggagcacagatagaaactcggccatgtggacagaagatatcggaagcgtgatctaatgataaacgagacactagcgatctattcccccatctgagtgagtattggtctgagtatt

SEQ ID NO: 2084 - DNA, 2072 bp, Xanthophyllomyces dendrorhous
agaccggatcggagacttgctcggaaggataaaatggccgcagactgggcgagagcaggaagagaatgagtcgggtgtgagggcgtagatcgatctgtatgagccgtggcggcagaatgactgatgacgctgggagcacagatagaaactcggccatgtggacagaagatatcggaagcgtgatctaatgataaacgagacactagcgatctattcccccatctgagtgagtattggtctgagtattggtctgagtattggtctgatcatctgggtgagatactcacccatgtatccatctatccgcccatctgtctatctatcttcatctgacagcatcctccttccgctcttctgtctctctctactcctctttctgctgcctctgctttatctatgtcctctgcgtgctctatctcctctctccgctcgttgattcatcttccctatcgctcgtccaaccgatgatcgcttgccatgtcattcctttctgcaagagttgtggcatacttggggtcagaaacggacacatcatcacgattgactatggagacagtgtgtggagccagagaaagcagaacaacccaaaagaaataaactacaagtatcagactacaggaaacaaactacacgagacaggagaagacatccctaggcaaaggaaaggcaaagaagaaggggaacagaaagaaggagaggaagcgaaggaaagcaaaggaaagcaaagggcacaagagggatcacaacgaaaaaagatagagaaagacaaagagaagactggaatgacaaacggcagcacacaaggaccgatcgtcccgtccattctgtttgccgtgtttgtcctgcccgatcatctccagacatggccgcttagcgatcgctagcttggctcgcccgcagaaagctgctcgtcgtcgatgaacgccactccttgtctccggccgatctgacatccacacaggtcgagcctgtcgaacggaagcagaaagctctgcagagaggaaacgctctgaccggacgaccttggctgcatccttgatccggggagacgccagtttggcaagagaaggagcagaccggtctaggtcatcgacaagctcgaccttgatcgttggtatcgtcggccgtcgagtctgtttgccaaacagaggcgagctagcaggtgaggagtcagaacgctcgacaggtggagcagacagaacggacggagcaggcgggctagacagagcagatccagaaagcttggctgaagataggtcaaagcggcgcttcgcaggacgaacgtccgaccgcctcttctcctcgtcactaccatcatcgtcattgtcgtctttgtcatcatctatcactcttcgtcgcttaggtgactcgaagggaggccggggcacttggagtcgctctcgatcgaccatctccgtccagctcgctgatcagacaaaaaatcaccagaaaaacatcagtcacaggcacaacaagggcgagcaagaagcccgggtgagaagacaggagaaaggctcgacagaagagagacacccacaagaagccgcctgaggcaaaggcttcggtatcgccgatgggttcagaaacgcatccatctcggcatccgtcatcggctccatcccccgcagctcgaagcgctgtatgggcgtgaggctcttgagatacgacctctctcgacactctgtcgtcgtcgtcggtagtctgtgcgaacaacagaaggatggaagaacagaaggatggaagaacggaagaacggaagaaccataccacgtcagtctagaaacaaacatctgacaaactgaaggcgtaagcagccaaatgcatcactgacctcatagcctcggcctttctgacccttccagccctcttgacgggctgaggccggtcgccctgcctggctcgactggccacgttggcccgttcattctgcgatgcagcgataagaaagtcagtcgacacgaccgagacaagccatgacaaacaaggacggcaggcgaaagaagagacgaactatgggcaagccctcgacaggatatctcttcgccggccggagcggcttagcggcgggagca

SEQ ID NO: 2085 - DNA, 4352 bp, Xanthophyllomyces dendrorhous
  misc_feature (1827)..(1836): n is a, c, g, or t
  misc_feature (2204)..(2213): n is a, c, g, or t
tggtctgagtattggtctgatcatctgggtgagatactcacccatgtatccatctatccgcccatctgtctatctatcttcatctgacagcatcctccttccgctcttctgtctctctctactcctctttctgctgcctctgctttatctatgtcctctgcgtgctctatctcctctctccgctcgttgattcatcttccctatcgctcgtccaaccgatgatcgcttgccatgtcattcctttctgcaagagttgtggcatacttggggtcagaaacggacacatcatcacgattgactatggagacagtgtgtggagccagagaaagcagaacaacccaaaagaaataaactacaagtatcagactacaggaaacaaactacacgagacaggagaagacatccctaggcaaaggaaaggcaaagaagaaggggaacagaaagaaggagaggaagcgaaggaaagcaaaggaaagcaaagggcacaagagggatcacaacgaaaaaagatagagaaagacaaagagaagactggaatgacaaacggcagcacacaaggaccgatcgtcccgtccattctgtttgccgtgtttgtcctgcccgatcatctccagacatggccgcttagcgatcgctagcttggctcgcccgcagaaagctgctcgtcgtcgatgaacgccactccttgtctccggccgatctgacatccacacaggtcgagcctgtcgaacggaagcagaaagctctgcagagaggaaacgctctgaccggacgaccttggctgcatccttgatccggggagacgccagtttggcaagagaaggagcagaccggtctaggtcatcgacaagctcgaccttgatcgttggtatcgtcggccgtcgagtctgtttgccaaacagaggcgagctagcaggtgaggagtcagaacgctcgacaggtggagcagacagaacggacggagcaggcgggctagacagagcagatccagaaagcttggctgaagataggtcaaagcggcgcttcgcaggacgaacgtccgaccgcctcttctcctcgtcactaccatcatcgtcattgtcgtctttgtcatcatctatcactcttcgtcgcttaggtgactcgaagggaggccggggcacttggagtcgctctcgatcgaccatctccgtccagctcgctgatcagacaaaaaatcaccagaaaaacatcagtcacaggcacaacaagggcgagcaagaagcccgggtgagaagacaggagaaaggctcgacagaagagagacacccacaagaagccgcctgaggcaaaggcttcggtatcgccgatgggttcagaaacgcatccatctcggcatccgtcatcggctccatcccccgcagctcgaagcgctgtatgggcgtgaggctcttgagatacgacctctctcgacactctgtcgtcgtcgtcggtagtctgtgcgaacaacagaaggatggaagaacagaaggatggaagaacggaagaacggaagaaccataccacgtcagtctagaaacaaacatctgacaaactgaaggcgtaagcagccaaatgcatcactgacctcatagcctcggcctttctgacccttccagccctcttgacgggctgaggccggtcgccctgcctggctcgactggccacgttggcccgttcattctgcgatgcagcgataagaaagtcagtcgacacgaccgagacaagccatgacaaacaaggacggcaggcgaaagaagagacgaactatgggcaagccctcgacaggatatctcttcgccggccggagcggcttagcggcgggagcannnnnnnnnngatgcgggcatgggctgcgtgtccgaggaaaagtgcggagcatccaatgaggcgtaagaggggctgaacgcgtgtaaagcatatgatggggaagacgcataggagatgctggaagtgtcagaagtgctggaagcgtcggaggcgccggacgtatcagaggtgtcgagaacgttggagacggaagaggcaggagggagggaaagactgtaacgagaggacgcaaggctgaggctcatcgcggtttgtatgtaatgctagtatccggactgcgtcgaacggtagtgggacaggaaatgagacaagtgcaccaggtggtgtgcgagcagggtgcaggtgagtgtgagtgtgcaaggggggtgtgggcgggnnnnnnnnnngatgcgggcatgggctgcgtgtccgaggaaaagtgcggagcatccaatgaggcgtaagaggggctgaacgcgtgtaaagcatatgatggggaagacgcataggagatgctggaagtgtcagaagtgctggaagcgtcggaggcgccggacgtatcagaggtgtcgagaacgttggagacggaagaggcaggagggagggaaagactgtaacgagaggacgcaaggctgaggctcatcgcggtttgtatgtaatgctagtatccggactgcgtcgaacggtagtgggacaggaaatgagacaagtgcaccaggtggtgtgcgagcagggtgcaggtgagtgtgagtgtgcaaggggggtgtgggcgggtgggcgtaggtggatgacgcgtagcgggttgtaatcggtcgatggagtgttcgtggttgatggtcggaagagtgttgcaacacaaaacagcgcagtaccttttgtactctggacggacaagtgtccagacagataagcgggctgacaaacaggtatgcggctcggtatataggtcgatgtgcaagtagagcacttacagaacacccggcctgatcacttcatcgacgcgacaagataggcagacagatcaataggtcgaaaggtcggcaggtcattcgctaggtaaaggactggcttggtacaagaagaagtcgagacatctgacatgaacagagcgaaagatcacaagagcgggaccagctagcgcgtcctgagggcgagcgactgtccggacggccagctagccaccagactaggcatgaccaccctggccatcggtcgtctatcactgagaagcaagtcaaagaacagagtggaagatggcatgacacacagagatcaaacagagaacagagaaaagagaacagagaggacaggggaaacggggaaagaaaagaaatggagtaatcgaggaaaacaaaggggaaaagggactgcgttctgtacgaccaggaatggcaaacctgcgtatcgtacctggccaagctcacaccacacagctcggcggccgacgtccgggtacaagacactcgatcgcttgctcgtccgttcgctcactcggtctgtgtctgagctctcttcgtcaggcagactggtagatggacatgtgtggttgttggcagcagcgggagcaggaacagaacgaacgagcagtcggatcgagacatggtcagcttgtgcacaagagaaagcagaggcaaggcagtagaacacatgaacatccagaggagaaagccatcagagtgtcagagtatcagagcaccagagtgtcagagtgctagagcatcaaggtatcagaccgtcgggaggtcaaggtggacagggatgtcagtccagtcagcgacgctgcactctggaacaaccgaatgagccgccgacaagagatacagccgacaagatctttgcccatccgtcgcaagcgagtcagttactagccatggtcggtacatgcagaatcacaggtactatcacaggagcctctacgggcactgatgctggtattgacaccagcacgggcactgggtaagtgaaacggagatggaggcttgccggactcgacgaccggatgtagtccagctagtgaccgcgactagggatgcgatcgtagttgcgacgactgtgcctttcaactgtaaccctaatcatagtccggtcgtacatcgagtatcaggccatccacaccacgagacgacgactcatctagagaactatcaaatggcatgttatctcgcgagaaaacacactttcgtttctacacgagtcgatcctcatcagttccaaaataaacagccggtgtattcttgttttgagtcgtagtcatggttgagatgatctgtgatcaaagctggtggcctaacgggcagtcatcgtcaaccgaacgatcgacccgctccgacacgtaactagagaggctggccatgtcgccttctccggaacgcgacggcagatgacgcggttgatttctctatccgctcaacatccttaccacgcttgaacgacactcatccttcccgcttccacttctgctttcgtctgcttcccgtccagaccacatagaccttggccgactggcacatctggtgtcgttcatcttgcaccgacgacgacggact

SEQ ID NO: 2086 - DNA, 1000 bp, Xanthophyllomyces dendrorhous
accgattgatccactttcttctacctcgcctgccttggctctactctgtttacacgcgtttatactggttcgcactcgaccacagccgtccacgattgtcccagcaccaacacatctatcaaccgactgccatgtcaccgacctctatcgagctgcatggattgaagcgggtggacgtccagaagctatgcaaggtccgtctctgctctgtctgtctctttttctctgtctcgctgtcgtactcatcatatgcttctttccctacttctggatcatctctttcttgtctctcatcacacagacactcggtatcaaaggagcaaaccagaagacagaggctcttatcggccttatccttcagcactacgcaaacagccagtcaaccacgagcgagggcgaacaagcaccgcctgcagaactctcttctgtggagagcggttcgtctggtgctgtaggagaaggcattgcctcagcgttcgtaccaacccctcccttccccctgtgttctttctcacttctcccgatcttctttctcccttctccttccctttatttccctttcttttcttttcttttctgctcctttccttttccccctcgtccattcactcttctgttctgtcagtcagtcgagatcgaccccgtctcatccggcctatcgtcctttgatttctatgaccggtagaaagaccagctcgaacagcagcttgcatgtcagccggaacggcaagtcgaactccaggcttctccagccgactgcgagctctcgagcaaagaagatgacgaagcaaactatctctcagaagccatcgaccacctgtaacgctcggccaaagaaagaagccggccagcctgtcgaggccactctgccagaagaccaagagaaacccatgccggtcgaggctgaggctgatgagtatggggaagagcctgacgacagagcgaatggtgacgaagcgatggaggatcggaccgtgccgcccaaagcagctcggcctga

SEQ ID NO: 2087 - DNA, 849 bp, Xanthophyllomyces dendrorhous
ggtaagtctgaccaagaggtatctttcttttgctctttttctctttgtttgctcacttttctttccttgtcctcttttctttcttccctcgacggccgcttgtcgctgatatagttcttatcagtgaagacaagctggaaacagagatagcgacggtcgagcctacaccaagtccgagactgccgtcaacgtccgagcctgtcgagtcgatcgaaggtatgtctttgtctttaacctcttgctgtctttttcttttctttcttgtctcttttctttttttgtctcttttcttttcttttcttttttgttctgtttctccttttcttcccttcttctcttttctcttttctttttgccattccttgctattcatgctgttcactcatgcggccaaagtttgtgctttcaacctgtcccaatcgaactcgactaccctctagcagcgtcagcctgtgtatacacgcggtcatccctcgttcagccctcggatctgttgaccgatctcctgtccgtgcgtacctccttggccgaactcacagccagggttgatgacctgcccacacgagaagagaccgagctcaacaagcgatctgtctacgacgctctggcgtgcaccgatgccaccgtcgagttcattggcgcggagatcatggtctttgggcggatgtccagccgggccgaacggctgtctgtcaagaaggaggacatcgaggcgatggtcgaccagatggtcgagtcccgcctgaagctgatcgagtcccgcctaaagctgatagaacagtcgaggacaggctagaggctcggctgtgtcagtcccagacgtgcgcttctcagccggaagcaatgaag

SEQ ID NO: 2088 - DNA, 55231 bp, Xanthophyllomyces dendrorhous
  misc_feature (16503)..(16512): n is a, c, g, or t
  misc_feature (16590)..(16599): n is a, c, g, or t
ctcgatccactgagctctgtcagagcttgtctttgttgttacttttcccatcaatatcctcttttctcttttagaccgcattgattggcactgtctttaatgctgaattctttcgattttgcctttttctttagtcgtgcattcgccttcatcttcctacgtggttactgtatgtaagtatgcatgtatgtatgtgagtaatcctccttcattgatagattctcgagatagtgcttgggaactaagattgcgttgaagacagatcgacgggtgtatgcatcatatggagacgtttattgagctttgatcaggccttcattggcaataggatgcctatgcaactgatactatcagcttatccagcatcttttgagagaatttagtttgttacccgtaagatattcaagcctgtcatctccgccggagttggattgaagtgatttgaaaaggtccgatttgacgatcaggttaacgagagaaacaaggtctgaagagatgaataggcaaaagagtacttggggggaaaggtcggcgctattgttagaccaaaattagcataaaagttgagaagcatcgtcagttgatgactttacacttattatttaacaatgatatgagtacagatgtaagtctgacgatctttagatgtatgatcagtaagtggtatgatgattcactacggtcataaattatgcagccgtcgcgacgtcagtatagaattatcgcgtgagggtaagtaacaataacagccaacgccgtaaaagatgatacaagacaactgctgtgacgttgaaagtagcccttgaccttcaagatttatcttggtataaaaggtcctgtgataagataaaaggatagagagaaagggatgaaatgatttctaatttacaaaggaggaagggggtggtgacagatgggctaggtatgggtgtggttacatatttagatctgcctgatcattaccgatacacctcaccgttcggaagtcgtctaccttcctgattcccactaggcaacactccttcctgaaaggcaaccggcgagacatcaggtaggcagcgagcaaacaagcaagcaaacaattcccatgtccagcgtttggttgcctctgccttctacttctcaagttcggccgtcgatctctcccaatgctctttcccactcaacaagttccttgacccctatacggacaaactctagctcttctcctagctcaactccccagagatcctcgtcttcgtcttctcaatcgtctactgcatccattcctgctcgtccactcagaccaccaccaattcagacaagaacaaaagctagtacgggagaacagctcggaggctcggttggcctgaaacaaggagatgttgataccgatgtacaaagtacaggatctttgtatgcacccctttcacctactcacgaggaaggggaaatgaatcaggtcgatctttccacatcacctctttcagccaacaggaggaaggataattctgggtttgtcgttcatggaggtaggagaggctcgtcaaacgatgtgacttcagcggcacatagtctagtcaaaagagcagttcaagaagcgttgacgcaaggaaatcatggtccgagacgtgcgtcgccttctacaccttcagttggtgtcactagcttcaagtttggagaggaattaggcagaggaagttttagtgttgttcgtcattctctccactttggatctcttgtcagtcgagagaagcgacacggtcttaacagctcgtttgttgttccctctccaataccataggttcgacaagccacacatttattaacatcaactcaatatgccatcaaagtacttgacaaacaccatctccgaattcataagaaagagaaatatgctcaggtggaggttgaggctttcaaaaggctctcaacctctcccccatcaatcggctataacggaacggcaaccgaagcgtcttcaaggtcaaatggatccgataaaattggcgcaactggtaacaacggtttgagcaagagcacaagtcagcaaacggtaacagatgtgccgattagacagccttcaaccaatgtattggcggagagacagatcgaagttgaaaaggggagagaaagggcaagtggtggtcatccaggagttatcaagttgttttgggcgtttcaggacatgtcaagtctttgtgagttttccatatgtatgaacttgagatgaatccgaattgacgttctcggtcatgtccttcacacctgttagattttgtccttgatctggcaccaaatggagagttgctgtccttgattcgcaaggttagttttgttttctctaatcttccaggcgtattgacataaggcccttgtatggataagggttattttaataatatttttcctgctcttgtatacgtcttcttatcagtacggctcgctttcaacattttcggctcgtcaatatgcagcagaactggtagacgtggtcggttggatgcatgagaggggcgtcttacatcggtcagacagcgtcacatatgtgcccaacgaatttcttctatgttcttagctaaaaaaaaaaaccttctttgcgtgtctccacagtgatctaaaacctgaaaagtttgttccttcttgactattcatcctcgataaaatcagtgctaaatgatttggtgtggcaatcctgcaatagcattctcatagatgcggaatttcatattcggctcaccgattttggtagcgctaaagttcttcctctctcaaaaggaaagattactccagaacaacttgcaccgccgcctccaatgactgagcctggtttgtcaattccttctgcaattgcagctaccaaagacataatttctcacgagtgttctcctacccgataccattcttacaatttcaatcaaagacacccctcgatcgttttcgtctggaagaggtccgccgaggcgttcattcgtcggcacagcagagtacgttagtccggaggttctgctcaacgaacctgcttccgagtcgtatgtcattttctacttatttatatgatggaacatctaatcctttgatgtattaagctaattcgttcatccataatctcaattcaggtccgatttctgggctattgggtgcatcatatttcagtgcatggctggtcaacctccttttaggggcaagactgaatatctcaccttccaaaagatcaaggccctagactatgagttccccattaactttgatgaggacgctcaagatttgattgagaagcttctggtacgtcgtgatgtttcattggtaccatcaacagccaagttgatctgcgatgtccttcggcaattgtaaacaggtcttggagcctacccagagactgggcactggtcctggtcggatgcaagaaattaagacccacccttttttcaaatccgttcaattcagcactttatggacgtcacccatgccacccatctcatctggcttcgttggtccgcctccactatcccccgctcggtcagaagacttttttgcagcattagacatatcgcacaacgatgcacttaagcatagtgccgatgagattgaggatggagaaaagttaggggagttgtccggcctggatgacgatgattgggacccacctcatagtcggtggaggcgcgggccaagaaaccacgcaggaagtggaagtgtatcgagcgggaaaagtgtagtcacgcttgacccaggatctgcggctgggttttcgtttggaggtctcggaatagggagaccaacatctggatacacagatgggagtgggagtgcaggtggtgtaaacggtagcaattacacagacggccccgaaatcgggagtggaaatatgttcaaagaagaagacaacagaggcagtgccgaaagtggccgggaaggagaagctgcagcacgcagaacgccgctgaaaggagaagacagagcaagagctatcagcgggccgtggattagtcctacaagcaaagataagaagtgagtttgtctctgctgtcgttctcttcttgagtatactctttctctctccagctagaaagattgtgaagacttacgcaggtcacttcttgctacagaggtttacctctgctgccagatgagaccccgatcttctcttcaccggtgcttgtccctgcgtctcagccaattgcaaagacgctttcgaagccgaaggaacggcttcttgtccttactgatttccctcgactactatgcgtcaagctagactcgaagggaacagggatactcaatgtcaagtacgagtgtttaattaccagaagggggactggaagcgggatcgggtctggttcgggagggggagcaaatgtaatgaagggggtcaaagagaaaggaggaagagggttcattattcagactgtacgtatcatcatatacaactgggaaaccgtgcgagtagaccacgaaacctaacggtgtcattccgacgctcaaacagagccattcgtctagaatctttctctgtgaggacgatgcacttcgtcgacgatggatggaggagcttcgaaaggttcaagagtaggcgatctaaatcattttgagtgcgttttctgaacttctctctcatgacgacaaacggtgtggagtgatagccttgcctgaagatttatctttaatttttcttccttcattgagcagaaagaacagacacaaggaatccaacatagcatcatatctcaccttccggtgtgtaacaatcatctcaggcgggatatagaagctatcccccggtagaactcttcttcatcccttttttccttattctctcttcttttctagtctctcgctcccaagctgcctgtagttcaagggttttgcacatcctgttgtctttatatcttccctataccgtctctggatgtcgtcttgttgcttggtgaaaaagcatcacatgtcggctgctttcacgatcgtttcatatgaattcttgtgaaacctcttaaacacctgcgatggctcgacttgcatgttgggttttcacctttaaggatctcatatacagtaatcaaatgtcggctgattcattgcaatcaatcgctcgatttggggcaaaaaagctagagtctcaagaatgcaaacccatctgcctcgctctcttctcttttcttaccagataggaataagttcgtttcgttcactattccttgatgggaccttgccctcttttgcgcgactcgtctccttccgctcctcatagggcactttagattcgagccatacaacagtgatacctgatatgttgcaggaggagcaagagccagcggcgaatcgcttagtcgacgtttcttgccgatggaatgtatgaaactggaacgatagatcggatgatgtttcagctcgggcttcaaaatcgggaaggcgagggctgggaaggtatttaaattccaaagaagttcatcgaatagaggatcttcagcaggcgagaaatggatcgtggaagaggattcattgagttggagatcagggtgagaagcaagagcccggtccttatagaatgactcgatcaagttggatgagcgagatgtatgggaggtcacgtcaacaagttgatccagattatgagaagaaagttcgtcaggaatagatttcttgtgaacgcctcgtgatatttggattcttttggtggccattgcttctttgtctggtctgatacaatcccaggaaggggttcgagagatcgatgagataaggatcaaaagacgagtaaatacagtgattaatcaagttcacatacctatgggttgatactgcctgtcagacttaaatgtggtggtagtttggatggaagtacagagggtatcaagcctgtcttcgtcggtgatcggctcaaaaagaagaagaaagagaatatcttcacgtctagaacgcggatagatgaatcgaggagaacaagcggactatcggttagtgatgaactgtatctcattcctggatgtcagtcacaagttgtcagttgtcagttgtcagttgtctagctgtctaactgtgatcaaatctggtagaaagacaggttgacaggtttcggaaggaggagaactagattgatgatctcgtggttccttgtgcctgactctatgtgtctcgtgccttacccgtcgatcaatatatgattggagaatatttcataaatttgagtggtcatccttaacacaagcattcttagaagtttgtccatcttgctctgctatctctcacactctttctatcaacctgatttctcttctgatctctttgtccttcgccaatatgcctccaaaaactccccccacactcaacgatgtccaaaagcaaacattagaaacccttacgtctgtcttttgtcttccttctgctcgagcgaccgagcttaccgtctcgcccaagctaggcccttcggctgctgacctggccggctcgtccgagcttcgagcatactcttgggacgaggccaagggcaaactccttgccggactcatcacgggcggtatcaagctggatttagagacgagagttcttttaagcagcatggttggatccgggaggttaggaaaatctgaacaagtgtctggtcagttgtccaaagcaacctcatgatcatcctccagtatgtctaaaggtacatagagacatcgtgactcacgttactttcgcttaccaacagctgccatcaaatactttgatgaacgcactgcaactcaaattaacgatgatgagttcgacaaagcctgtggagtcggtttgtacagtaactctctgtgacaagaataaattatctctaattgactaggaattccctcttcgataatgagctaggaatcaactttaagcccgaagaaatcccaactcttgtatccgaggcccttgatgtgttcagtccatctagttgggacgatttaagcaaagctcttgtggctgtcaaaaatactgatctaaagtacgtcaagtgtatcactgcagtgtttttgagcatcagaccaacactgactgtgccctatccatcacacggccgtacgactgttatttcacaggtgggctggagcgcttgacgtcaagaatgcagttgagcagtcattcgtctctcgttttggatccaaagaagctgctcgggagaagaaggccaaggtcaatagttttctcagtatgtttgatctgacaaatcaggctgacgtgaggggttacttatatgcataggaacccaaagctcccaaggctgcttcagctgccaaaaagccagtatcttcagacgctacagctgctgatgctgctcggagtatgttcacagaggggtttctttcccggttgcataagccgggaggaaacaagcagatcgatccaaagctaatggaagaacatctcaagttcactggcggaaacgtgatcactcgattccctcctgagccgtgagtctcgttatgtgtcatcaccttcgtctatgtgtaaaagataaggtgctgagagaatgtttcctctgcatcattgatcaatgtaggaacggattccttcatatcggtgcgcgtttcgactcctgtagtcacaatattgtccctttatagatcgtatctcatcataatgcccttcctcatgattaggtcactctaaagccatcgctatcaactttggatacgcagctcatcacggaggacacacctatcttcgagtatgttcacctacatctgacatcgagacttccttgagctccatttgaccatttttcaatgatgtcgttcagtacgatgataccaatcctcaggccgaagagggtcaatactttgagtcaattctagagatggtccgatggcttgggtttgagccttgggcggtcacctacagtagcgactacttccagaggttgttcgatttgggaatcgagctcatcaagagggatcgagcctatgtgtgccattgctccggtatgttcaatcctgatctcttgatcatatccgtgcaatatcttcagagagtcgtcgctgatattccattatggtatatatattgtctcttcggtctgctctataaattagccgaggaacagttaaagaatcgagggggagaaaagtctcaggttcgaattgcttgctcgcaccgaagccgcccagttgaagaatccataatagagttcgagaggatgcgaaaaggggattacaagaagggagaggctactcttcgaatgaagcaggacctcgagaatggaaacccgcatatgtgggacatggttgcctaccgaattgtgcctgccagtcatcacaggacgggagacgagtggtgcatctacccgtatgtcgtttcctcctcttaaagatttgaccgaagtatgtaggtagatttgtacacatcgcctgaatccatccaaaaactcgtgatgttttagaacctatgattttacccactgcctggtcgattcgttcgaaaatatctcgtcagtatcgcaacttcttgtcaattcgaagcagtccgactctgatatttccttcctcctgtgtagccattcgttgtgcactacagagttcattcttgctcgagaatcatatgagtggttatgcgatgctgtgtccgtgtacaagcctcgacagtccgaatatggccgactcaacatccaggggacggtaatgtcgaaacgaaagatcaagaagctcgtagatgatggccatgttggtagttgggacgacccaagaatttataccttgatcgcgcttcgacgacgaggtgtccctcctggtgcaattgtcaacttcgtacagtctctgggtgtatcgactgccccgggaacgatccaacttgctaaattcgagggctctgtccgatcttaccttgaaagttcggccccgcggctgaactttgtacttcgaccgttgaaggtcacgatcgagaatgttgctgatgactatcgagtggaggcttctaagccgcttcatcccaaagttcccgagatgggatcctacccgatcgttttcaccaagcatatttacatcgaccgagacgatttcaggcttgaagactcaaaggactacttcagattggctcctggaaagaccgttggactattctctgcaccccatccgatcacgtgtactgaggtcaagaagaacgaagctggagaggtcatcgaagtggttgtcagactggaaactgagggagtcaaaaaacccaaagcatacatccgtgagtgtatcctatatacgcgcttgacgtaagagctcttcaagagttgcttcactaactgctgcctcatgtcttgaattatgttaaaatctgacgattatcagaatgggtggctgaggatcccatctctaactctccggtgatcgttgacgagacccgaatcttcaacccgctcttccattctgacgatccggctgcgctggacgactatctagcggatctgaacccaaactcgctcgtccgagtgcatggagctatgatcgaacccgctttctacgcgcttgctaaaagatccatggctaccgctttggaagaggccaaggcacgaacggccaaggcactccgagaagttaagaaggactcgacggtcgagaagaagaaagacgatgacaccccggtggctacggtcgatcagcttgttggtttggaagatatcagattccaaggccttcgggtcgcctatttcaccgtggacaacaaggaatccaagctgggctgcttgaacgaaggcgaagatgttgttccgggaaagagggagggcgacaagctggtgctcaacaggatcgtgtcgttgaaggaggataccggaaagaagagcgtgtaatcagaacagtgaacttatctaagttgaatttggttgtgaaggtggctttctgatacataggggagatatctcgatgttgagatgacagtgtgacaaatcagttggttaagatagtcgcaaatatcgtacactacgatatctggaggagggaagatcgtatgaaacccacgaagtacaatcattgatcaggaatgcatataaacatatgacacaaaaggtacaaagttggccttttgcaaatccaaaaaagatttacagttgaatgcgagagaagaaaagaatgaaagagagactagggacggttatagtcgactgattatcaaggtaagaagaacagagcaatcagaaagcaacggaaatttcaaagttcgttttgcactacgagagagtcgtcatgagatgagcagacagcacatcgtgctcctgcgaagtgactgttggcaaacgcagtcaaaagataagaaatgtaaatatatatgtcagcattgtgttctttcgacatttcggagattggcgctcaaaatctgaacccggcttttacatactcttgagaaggattcggataaactctgcagcgaccttgggatgattcttctgcaacttctccagcttcgtattgtccaatttccatagaaccgagggcacctcaaccgtaacagtcgcgtttcgaggtgttcccgcgagagttgatagctcgccagcaaccacacctgacaccatagtttcttggacctgttgtagataggattagatacaaaaacgaattgcttcatcaatttgtgttgtcgggaagggtatcataaaataggagggcgaagcacgaacgagtctagtgtgttcagcgtactgtaaaagaagtcaacaccacgatgagtacatcaagcgttgccgatcggtcatcgaattagatgacagaactggatatagggacttacttcatagacagccctgagcataccgctttcgattaagtacataccatccggctcatcaccttggctccacagaatctggccttgtttcgcgtgaacactttccaagtaaggcacaagctgaaaccagaaatcttccttcagatccgtgtacgttcggaacgtcttaagaagtgttggaagcggcggggctaaagaaagagtgggattgggcgacagggatccattcgaggaaggttcatgtcgaagatggatgtcggctacgatcgtatttgtcggaaggtcagtaagcttgttttgaaaggatgaccaaggtattggtaagaaagatgcgtacaggatttgaatgtcaaatcaccggcctgaacaagatgcttgcgtcttgggctgttctcgtgcgactcgcctaatgagaacggaacttgggaagaagcgatgttgaattctatgtataatcacaatagatcgagtttttagtaatcagagtcgggttcacgatagtgtcccgatgatactcacctcgagcagcaggctgttgctctagcttccgattcggtgccccgtagaaggccgacctttagataaacacgatagagtttgatttagttcaagtcaggttgtgtgctgtccgatccagatggaagaaagtgatacctacaaatagttgttctcagtccactccaatgcatcgttcaatgtgtctactacttgaaccgagttattgccttggtcactccagagctcgacagcctgtagtgcttttccaacaacaccttccggatggcatccacagaatctatgattttgtgatgaataaagtagaccaaaacaaacaccaatgtactgttagttcggtctcgaaaacaaaattggccaaacgcgtagtaggagcgaagccgaacgtacacaaggactacgcccttcgcttcgagaagtcgttggattcgaacaaaagcctcggccgaagaaaggtcaagaccgtataccaaccaaaggtcaacgatcaagaatctgattggattatgttgccagacagcgatatccaacatctggtacaacgcagacaaacaagagagttaggcacactggtattcgataatcaacgggaagaaaactgacatttctgatctctccttctacggctgagatggttccgaagaaaaggaacccttgaagcttgaccacctgagtttggcgaccaacatctttaatgaatgctgactgactagcgggtcgacgaacagtcgaacgagcaacagatccattgaaagctgtaacgcaatggcttacgatgagcattctataataaaagttcttagatgtcaaaataatgcttacctgctcggatagcccgtcgctttgaattctgaatgacgaagaagatgcatgccatgacaattccgataaacagcccgatcacactgcatttatgattatagttttgtcgttgtgttcagaatgagttatcgattcatcgggcggtgctgaagctaacttcattatggatggaaagaaaacttacaagtcccagatagtcattccgatagtgatggcgacaatggtgacatactcccacctgttgactttgtgtcgggtgtcccagacggcctatgaatacggagagcaaggaacaaactattatatatcacgtaaaagaagcttatgaaagcgcgaaagactcacctctttggcaagatcaagtcccagcacaaaaataagagcagcaacaaccatgatagcttaattagacagacatgatatagattcaacgtcagtcattaagacatgtgcatgagattcatggaatagaggaagatgagcatacgaaggaagccaatgacagaaggacctatgaagaacagaagaaagaaaaccatacagattttcgttttgaaatcagattcaacaggtctggtccaacgcagagacaaaaacgaagacttacctgcaaccatgattccggcggtagcagcagccaacatgagtgctgccaatctagtgccgcctccaactcggtagaagagcacagtgttgacgtagccttaaaagatcgttatggaagcaaataatgagtaaagcttgtttgatcatgttggcgtgttctacacccatgagaagagcaaagcgactcacaaagatagttgggaacagaaccaacacagccggacaggatattagagtatccatgagcgatgagctccctgtcaagcttgacgttgtcttcacaaagagacactcccagggcaggaacgtttagaggaacgtgcaaaattcctgaagtttatcatgatccaccacgaatggagacaagatgaccgaagagtcagagccaaacggttgaaagctacggcaaagattatatggaacaaaccgaagaaaacaagtgcaaactgggtagacatggacttccagaaggctccccaatgaacctgtctgaaatcgtagtaggctttggtcatagagagagggtccattgagcagaacgtcaggatcctccacaccctgagaaatcctgaaagagaccaaacgcacagtaaaaagtataccaaggctccttgacctgtccaacttcgaacacccatctgtttttcctgagagtctcgaagtcaactccgatgatagcgatgacaatgtagaatatgatgggcacaaccagaaagtatgctgggaagacaagctcgtgcgtgtatcggagggagatcaaccgaaggaagagggcaaggaatagagggattgcccagagaagaacattgtgggccgatccgaaaagctgcacgtaggtgttgtgagtaaagtcaataccttcaccctcaatcccagctgccacctcgagtctggatatcgatgaaattggaatcatctaacatcagaaattaagcttttgggtaggatgattgaacggaagcatacccagtctcaatcaggaaaactcccacaccgccgatagcgccgataaggatacttctagggaagaaccctactaaagcaccaagcttaaactttccaagaccaaagaacacagcacctgtgcatagcccatatgcagtatcagtctcggcgagaaaacagagccaagaaaaccgtgaaactcacccgtcaagaaggatgagaatgcaaacgccgccatggttgtggcgatgatgacatgaggctgtgatcggacatagaaaaaaacataaggttgatcagatattttcagacgtgacaagacgaactagctgacgcaagaagagtacaaacgttttcttctccaacctcagcagtgatagtgttgacaaggatatgaaagaaggggacggcctcaatcatcatactcccatttccagctctgaaatgcgcccaagtgaaaaataaatggctgttacaaccatgttttcttcgaagcacctacaaatgtttttaaaggcagaattcacgtacttgaagatagatcctccaagagtgaaagtcaattgggatacgatgcaactcataaagaacatggaaactccgacaactccaaagtcggggaagattgcgttcgaggggaacatgatcattcgtaatgctcgaaagacgggaaggaggagatcgatagtaagaaaggagaaacgggtagacaaacggtagtgttagctcagtctagtcagatcaaaactcaagatgtgagatgaaaatgaagactcatcataagacactccatcgagtaaatttctaaaattcagatgttccggaggatgtatccaattagcccgtttctctcaagattacgtggaagatagaaggtgctttgagatgctcacaaaagcaatccaagcatcacggccggtaacgccttggtgggcgcgaccacacagttttcaacaagtgtctttccagtgggtttctcccagccggtcgacatttctctccaccagcctaccaacccggactctctgttttttccaaagctctcaggatctgtttcggtcaacccgttggaggaatcctgcgcatgttcgtcatgacgggccaacaaatgagtcctttcgttcccgccctgattgccggctgcgacagagctggttgatagctttttacctgatgatgaagcttcggttgtgttactaatatcagaatcctcctcgacaatgtcagaaggagccagtcgactacctcgggacgtttcttggtctcgctcgacaagtgcggacagggcggatccttttctataggagcttgacttaggctctggtagaaccgtcatcttgctcgctttgggcgtcacggaagtactcgggctccagtcgtcttcccgttcgtccgcctcatcctcttcacgaggcgggtcgatctgaatggccatgcccgggctggttgtatcatccaaaccggaagcgggaggtgagttggactgaagcatcaacgccagtccggaaggaccggttcctccaggactggttcccggctgatgtttctgagataatcccaattgcgccaaatccttattgacatccgaagatcggtcaactcctgtagcttgagtatcactgtagtgtctggtggaggcaaacatcgagtggttcgcaggagaggaaggggtcgagtcgattcggtaatcagaagcagaggtcgaatggaggggtctggccgcaaagtcggcgagacgagcggtagaatttcggatggaggattgggtagcgctataggacgctggagcaaggacgggtgggtgggtcgaatgggtagtagagaacctatagacgatggtcgaaagatttacatgatcagaaaggcaagatggaggaagagatgtgttagcaaactacacgagttccaacatgatcatgaaacgtgaagacagtgagaccgtcgatcgaggttgttgtcttgacggaagacgagtcagtgaggatacgttggttgtagagaggtacgcgattgagcgcaagaagaccattaggatcgcgtgacggaactcgtattagatgagaggttggagaccgtatccggtgtcttggtctttcgctcttctttttcttacgactctttccctcaagagcagaagaagcggacgggcgagagaagaagacagagagagaacgagaacgagagagaaggatcagaagatgaactgggaaactaaccgtctcgctccagaggcaggaacttcagagggtgttccgctaccagactcccgttgccttcccagatgcgatccgttgtgggatactagatcgccgctagtagagctaaagagactgtactgactagctccttcgtcatctgcaccttcgtcttgaagagcctgcagggcaggatgttgaaagtgaggccgttcgctcgacgcggaagaaaaggtccgacccgtcttggacattgttcgtgttggatggactgataagaagagagtaagacccggagaaggcgtgagagcaagagtgtatgagtgcgtgagaaagacacggtctggtgtgcttgtcctgacttgacaagataaaagacctagattcctttgattcccttctcgaaagaagaaccaagactgagtttaaagaccactgaaggaagaaagacgacaagacgaaagaaagagatggagattgccgtccgttcggtcggctcgagataaagcggccgaaaaaaatgacggaatagcgcaagagaggaaaaaaaaagggaaaaaaaaagggaaataaaataaaataaaataaaaagaaagaagatagataacgatttcgatagataacgttcaacgttctctttgttttccagtcttcttagtcggtcacgtctttccgaaacaatcacttccagacaacgacgacaacgacaacgacnnnnnnnnnngacaacgacaacgacaacgacaacgacaacgacaacgacaacgacaacgacaacgacaacgacaacgacaacgacaannnnnnnnnngagacacataggaattaggatatagaatgcgctcttcccgcaaggcaggtatcactttcacaaacaaacacacacacatatacagagataggctttctataattaaccgaccggagatagttgggaataaagacaacgtatagacactgatggtatctacgagcctcgtcagcccgttagcaggctgaatcgatctaacaaagaccgagagaaagaacgaggtttttggaataattatgtaaagcggacaggtacatatgctacatcgggaaccgtgaaagaaacgcgttcgcgaactcagagggcagggggaaacatgccaaggtcgagattattcaggcagttatgagaaaacgaggcgatcagagcttgagttcagtcaatattcgcttagccaggatgtggtactgccacgtatttccaccgactcgtcggaactgaactccatgaagcggaagccatggaacctatttaaaatgaaataaaagggcagaccaaacacaacgagacaatataagcaaagcgagcggtaagggcgggacaggcacaagagaagaaacgaaccttgataaccataatctcgaaccggacgagcagctcgctcagattcgagtcatctccgtcgcctaacatccataactctccccctccttcccctcccggacttttccctgcatccggcacaccaggcgtctgcaacctccgcgcgagcactccaggcgtcgctaccggagatgcgggtggagagaagattccttgttgtggtccaggcgtcgacggagcgttctctcctcccacaccaagcggctggtgaatttcctgctgaggggatccctgagacgaagacggtggaagcgaagacgtgccgttcccgtcatcacctccgtagatcactgaaggctcagccgatgactccttctccctttctttgacgggccgaccaccattcatgacgagggaaagcttggatgatttctgcttgatactccctcgctttttcaacgaccctccgcccgatgaatcggtgatcggtgagaacatcggtgtctgtttcgacggctgctggccgccattcgcgttcatagaagaaaggtcgatcgatgggctatacacacattcaaacccacccttaatttgccggtgccgaattccaaatcgatccagaactttacgaatatcagtcgagagagcggtagccgactttgttgatgtcgtagccacacttgacaagatacacacacgagatgaagagaaaaattgattgattgcttcgtcagtctttcgacaacgttcgcgaaagaagttcaagcaaacatcgacttacctgaatagtcccttcatataaatcggcttaaaatcaggctctgcctgcagattcccctgttccgccgcaagcccggccgccttttctgttgcctttttctcctcgccattctcttcattgccaaattctccgggcgagctccaatcattgccgttagatttgacatgtgctgatgcccgcctcgacccagccgtcatcgttgacgatctaacgacagacgctcccatcgacgttcgccgatctgagggcttcgggtttcctccggctcctattccaaggccagcatattccaggacagtcgaagcccgtctgtagttgctaggtaatggggctgattgggatgccgaaaaggaggagccatcttgagcctctgtcatctcagtcaaaacatttggttcgatctcggccatcggctgagaattctgtctcgagaatgacctgggtagattcaagttttgacgcttgtgggctgactttgttgcatcatcaggcgaccgggagagcatcgatccaaatcgacgagctagcccaccaggggaaccgaacccacctgaatgctgatcggcgactggcggaggagtcgtccggccggactggatctggtgatgaggaagtgtcggaggagatccagacgatatttcctcgtcctcggctgtcgcaggcaacgccatcgacggctctccttgagtagacggccgagtttcgaacgcagacctctgccggtgcgaatgaccggtttgctgagggataaatgactcggagagcggtctggcaggaggtgttggcgctgagtaggagagagattgacttctccggtgggtagcaggaccgggcgctcggggaagagtcgtctgagtgccggcaagcttggttgttgcatcgtcggcactgggatgagccatgacagaagctggatcacccaagcctggctcatctgtggctcgcggccgtggggtcgcccctgatcgggaggcgaagtcttgggattgaatgggaggaactcgactgttaggtgaggagagagcggatgcaggtgctggtagtcgaggaagagccatagtataatctggaccaacactagaaggagctcgagcatgaagagaagcggacggggcgatgggggtgagaggcagttgggttggagtatcgacagcgttagggataaccgagatctccgacgatgcaaagtggcctggcccatacaccctttctcgttccattttttctcgaacgagaaaatatatcgagatcaaagggtggaaccctcgcgtcgggtccaaaggctccttctgcaattcggccatcggcgctccaagtcctgcggtcccgttagtataatttgaatcatttagtgccccttgatgactcattttttctttcttaggagaagaggagaacaatttttttttgtagaagtcgaaaccagaaaaccgtttgttgtgcttcttggaatcttttccaagaggagaggccatggtagaggctgcttggtgatcgttagcatcctggttcggctcgctgaagttcatcaatgatgaacttgtcgggctcttccaccctgctttcccggaccgctgggcatctcgtcgatactcccagttagcgacgcaagagcgatatgcatcgctccggagaacagcccgaagacgtcgctcgatatcgtcggccaatccaaattcgaatcctaccatcccctcgacgatccgagggttaatctcctcaattcgaagaggttcgcgattgagtaggaaggtctctggtggaccttcaaacccttttgtcatccaggggtgggacataacctcagtcaaaggagctcggtaggtagggttggtgacgagcatacgcatgagaatctgtttacactctatggatgcatgaaggaacaaggaaggatttgaacacacgtccatcaccgcatacaacgattagagaacgagacattgatgagttgacggacctaaacttaaccatggttgatattccacaacgccacgcttgatttttgcgtgcagtgccggcatgttttggtcgtcgaacgggacctttccacaaaccagcacgtaaagaacaattccaaaactccaaacatcgacttcgggacctgtatacggtttagcgttgagcaattctggagcggcaaaatacaaggatccacagaaagttgataactgcgattctggagcgaataggtttgagagtccaaaatcaatgattttgatattgccggtattagaaataagaatgttttcaattttgagatctggaagaaagagcatgaacccaacaagaaagttcatcgatgagtcaaacgcaaactcgggcgtagagaaaacaaccaagcaagtcaacaatccagagaagcagcgtacctcgatgaacgatggagtttcgatgacagtattctagcgcacttccaatctgccttgcaaacttccttgcggcacgctcccttagccggccatggctgatgatataatccagcatttgtccacccgaaacgtactcaaacatcatatagtaatgatttgtgtgagtgatcatctctttcattccgcatatatgaggatgatggagtagaagcacgatggctgcctctcggacggtccggacttctttggactgctctttggcaattgcccgagcaataaacgagtctgtgggtgagggagcccgagggaggggtgttccgtccggtgcgtgagtccgggcttgagcctgtagagctagtggtcgatgtgccgatggcggagttcgagggataattttgatggcaaccttggcaccagtctggacatgggttcccaactttaccttacccatcgaaccagctcctagagtcttgcccagtgagtagtctccaatttgtcgggactgttttttagccggaggaggcggtggtggtagttgtggcagttgggatgagggcccaggagttgaaggcagtgaaccggcagggtaggacgatgaggtcccatttgactgttgaacttgcgggaagagagctgtagggccaggagacggaggccggcggatggaggatgaccgagcgggtggcgaggatgaaatgggaaccatatgtgatggaagccgcgagtgtgtactcgacctggaggatgatctatctaggccggaatcttggtttttgagtgcggacacccccttggataaaggttgtcttgactcgacctccccgtttgtttccacctcatccctcggcggtttagggctgccttgggctagacactgactgtctcgtctgatctcggacgttaggggtagagagtcctggtcgtacctgtgaagatcgtcatcgtccgttccagtagagacagggtcatgagggttgtcgaatggttgagatgggtaagatgagcggtggcgagacacataagttcgagagtgttgacgaggggtaggaatttgggtttcacgtagagaagtatacagcggccgagggatcgttggggcagaagcggaagaggacattggccgagtcagggaatccgttggtcgagaccgaacgtgaggatgagaaggtaggttggaagtacacgtttgtgagaaaagtgggacgtcaggggaagcagaggtgttcgatgaagcgtggatgacggatgcgggagaggatgagaaagacgcagggacaaaaacagagtcgatcagctcgaccttttcagaaggatgtaaaggtgacgacgacagaggcagcttgggtttctttgttcttgacaacaaggtccatcgctgaggtcgtctaacctcatgatcggcctcgcccttgtccggccgttccgctaccgcgacccgctgagcaccgacggaacggctgatggacagacgacaagcatcaacacatcgaaggaagcttattctaggactagatgctgataactagatatgggtgtgatcatggactgacgacccaatagcaggactagagtcagaagatggaagagatctccgagagatgacttcgttttatgaggatggaacgaagcttgattcacttcgaagacgttccatctggagctgctgaaggacgcgtatgcttcctctcgagcaaaggaggagagaagacgtggagtccgataaagagaggtacagatctctggaagaagaaagagaagcgaagcgagaacgataggagagggacaaagcgggaaagcgagatagaaactccaacaaaggatggaaacagagcatggtctctcgtcgtccaagcggggtagcttctgttcgtttctcgtccatctcttctgcctcttatcagctctatatctaactttcaacgtttctcgacgtgtgtacttgtctcaagaagagatagacgccaggttttctagcaacagacgaaggtgaagattacactgttcgcttccctatctggtcctccgcaaggaaaacgcccagggatctctcgagacgaggcagaacgcaacccaaacgtagacacggctctcatgaagaaaccggaagtgcgagaattgagaaaagaaaaacacaaacctgacagctccgttctcggtctctgaaaaggtggatgtgatgatgggcccagcgtccatctctctgaggtaagtagggaacagaagatgaggggaaggagaagtgtgaaccaagaaaggacaagacaagggacagattcaaggtttcgtctgtccagtcagatgaaggtcaaattcggtgacttgagatgagttgacttctcaattttgagtgcgtgtcgggttgaaggagttctttgttgtcttcttcttcgtcgtcgtcggtgtgtttggagatgggctgaaagaaataatggtgattgaattacaaccgcacagcaaatcatttatcctgtacaacccactcaaaaatgctcttgctcctctctcaacacttatcatctgaatcatcttaaatgagcacaatgtcatctgccagaaaggatgttttcctcgatccgcgcatcatgccaggtcggcacgtattttacaaacaatggttgagagccaatttaaaatattcacatcaatcggcttccggtcgtccgactttactccatacaaactccaacactcttttctgctctctgcctcccaacccttcgatctgctcaggggtctggtcatctgtattaggctagtgtcaatatccagatcgatagtaatagaccacctcattagctcagactcgtttccaaacagagataagcctcttggagcttacccgttctcggtccgcaccggcctcgataagtatcaccgctgtcgagccatgaccgctttccaaggctaggtgtaacggagtgtttcctataatccaaaacgtgagcccaaacaatattccgcaaggagggcagataagtgtaacgcttcaaggaaaagtggcattcatgaagcatggactgaccgatccggtcttgagtattcaatctagttcgctttccatcttttcctccggctagaagcaattgtacaaatccatcagatccagtcgaagccgcccgatggagtggatgttgattcgctcggtccttgatattaatctaagcgtatgatgaaaccgattttggtaaaaggagcagcttagacacggacatatagatgcagatatgaatcagtgcactgacatcagctcccttttgaatgagccgacgtccaatctaccaaacgtggacaggaacaaagtcaatctagctatctctctggatgctacaccagctaactctacattagggaatgtcttacttctatacgagcttttgaagcagcgtagaatctattacagggcaagtttaaacgcgatctatcttcatgggcactatttcagggctatgagtgagaagaaagacctacagcgcgctctgacccttgtcgtttgtcgagttagggtttgctccagctccaagaagggcaacaacattagcttcctgtcccgatgagactgccaaacgaaggcataggccaggtgattgagtagaaatcggtgagtcagtaagcctgcaaagcgtatctacagaagcaaccgcaaaccagattcatagagggacgaaccggcaatgatcaaaggggtgcttcctcctgcgtcttgagcctctaagtcaggtgcaggagtgtttttgagaaggatctcgagagcctcaagcgaggtcgacgacgcggcccagtgaaggggtgtcctaccgtcctgttcgttccgatcgatttgagcagttgaagctcagaaaacattttctcggacaaaacgaaaaacgcagtctaggcaagcgaccatgacctacagtatctttagagtggatgacctgaggctctccgttcagtagagaccgtataagacccggttgacctagttgagtttcaaattgtacgatcgattttcaagagtgatgtaccacgttgactttgattcagtttttactcgtatatagcattgattccatcgacgagctaggaatattaccatccatcgccgctttgtgaatacttaagccagctaaaaggataggagcacagcaatcagtaacgtcctcaacgagcgaatagccttacaagcgacttgagatacattataacccaacgcttacaagacatgacgacaacaaaacagtagattgacggatacgataagtcgagatgaagtttgttagcctggcgactgtcgtcgtttgtgtagatgatgatgtggaggacgacggccatctaggatgatgtaagctgcgcctgacgctcagctcccacataggtctgagccttctctcagcctaacacgaatttcttgcccatcttgattgttcaactttccatccagatgttagcgagcagcccaatctctcatcttccaccttctcgtcggtccaacatcagtcgcttctcgctttgaaagtcttgtgcaccacacgttaaatcgacatcgtaaacatggtcagtaaaatttgttgttcgacattggcttcgtcctcctagccagctctcgagcaggtccatcttttcaaaacaaatgaggaacatggcctagttgagattgagtcatacacctttcccatctttaaagtcatgaatcgagtttatatctcactttccattccagataaaggaaccagatattgactttttggtttaaattatcgtctctctgctctcccaatacgaattctgctccgtgataatcaaccattttgtaggctactccaaacgattgggaagttcggttctcgaagtccaagtcgcttccttacttttactccccctcgaccggaacgtctgtctgggaggcaccagctcatttgtcccacaatcagattgctggtctgcctggagctgcgaattatctgcgaggcgcaactagcagaccaactgcccagccgtccggaagttcagaaagctctgggccagaaaaggtcagggctagccatctgctgatcaagcataggggtagcagaagggcaagcagttggaaagaagtttgtcccaatctcacttgaaatcagaggtttctttttacacattggtcttgcaacgatcatgctgagactccgattgtatttcctattgttgatccttgtcttatgttttaggcgaacatcacgcgatccaaagaggaggccatcgctattttgagggaatacagagacatcttggccaaagatccgtctcagttcccttcgctaggcaagttccctttcccaaggactccttattctgtaccaacgtcttgctttctactatcataagagaccgacacttactcctcaagtttcttcctcgcatatatatgaacatggtgctgatgactttccccatcaacaacgtacgattggcatccacagccgctgccgaatcacactgctcatcccacgccaagtcaggcgatcttggatacttctcccgtgggcagatgcagaagccttttgaggacgccgtctaccgactgaacgtaggcgagattagtggaatcgtcgacacggagagtggcgtgcacctgatccttagaactgcttaacatgtcgatctaacggtacatgcgcgcatatccgacaccaataaaggagacctctctctcctccttctaagtcttcttcctcttcttcgtatctcatttttaattgtatctgtttcttttcaaggtctttctctctttcgacccttctaccacatcgatatcgacagacattctggacgacccgcagtagccgcctatcgagcttgagagttgtagcgcagcatcagtttattcagcatgaaagatcgtatggacggcgaccataatattccgagtgagtctagacagacgctacattttatatcattagaaaaacaaggggggtaggtgaagcagtcagaagtctcaatgactagaagattgaaaagggtagagagtaaagataaagaaagaaagaaacagagcgaatggatccggagaatgaagaaagagaaaacaagtggtcgaaaggatcgtgcaagaaaaaggcaaggtaagaagaaaacaagggcttcgatctctttcaactaacaagaagaaagaaagagttgagccccatacaaaaagttagaaggggaaagataaaccgaactgaactcgaagggtgaaccgaagggtacaacatcagaaagacaagcgtcctcatgccgtggtctcttcagtcagccaacgggggaatagtggttccctttcacgttctttcttctttcttcctctcttttcgttctatcctcctctcgcctcttaccacctggcctggcgagctctggcgatgacgacgaggaccgaaccagcaggttcgatcaacgagatgtctcgagcattgtccctaggtcgggcgaacgcatcctccttcctcacaagcctctcccactccgtcctcctcttcatccggtctgctccgaaagaggggaggcaacagacatatcagatgtcgctgtaatcaaggacgaccggggaacaatcagcaactcgccgtttagtcttttctcccacatgcatcaacaaaaatatgaaggcaaataacgaacctgtctgagctgtgatcagagtcgtagaactcgtcctcatcctcatcatccaaatcacctaggttcgacatgtccaccttgtatctacacattccaagaagtttcacaagcgaccagaacagaaatactgatcagctactgaaactctgactctggcgcaagaatgtgggaggtttcgttcgatgtcactaacctgagaagaccaccgatacctccgaatcccttgcagaactggtttccttcctgtgatcggttcgtaacaaattctaaggcggctccgaagtccttgtacttgtcggcaagccactcgagcaaagactgtggttcctgaacattctccatctcaaggccggttgacttgtcgagccacttggttcggtctttggcctgctcggcattggcatggataatgatctcctctgtaaagggcaaatcacgataattaaaagaagttaacagtggagagaagatatacgcatgagcgcaatgttgataaaggaggctcagaaaacatcagaagaatttaggaaggacaaacctccggcagcgtttctcagcacgtatcgcatcacatccaagttctcccaaacgatcagtgtctcgactgcacccatctccaaacccttgagactgtcttcaataccaaacacgaatcgtccagtatcgagagcaatctcgtcgaagtacttctgaataagcttcttctcttggacgaacttgacattagaaagcgaatcggaagcgagatcgatggcctgatgtgtcgcagagtaaccccaacatcaccgtaggtatcatatcagaatggactcatgaatggtagaatgcatgacgcgagagtagatacctacctgagagaatccctgcagtccaccgtaagaaacatcgacgacggcaatgaccttagcgaccaacctctgatcgaacatatcagacaggttgagctcagacttgaagtcggctgatccagcaaggacgataccctggacgttgaccttgtcgtcggtgatgaaatgctggacagagtgttcggcgacctttcggacgtagttgtgtcgggcctccatacgaagacgggagaatcgaagagcagactgtcctcctcgtcctattgggtgcagagaggagtaggaaagacgattgtgatgagcgcgcatgaaacggcgccaaagatgaaaacatgaaaacaaatacttaccgtgcttctttgggaggtcaacagagaacttgtgaagaatctgtcgggtgtttccagaaagggtaccgaaaagctaccagatgatcgagaagcagatgtaagcgactctgagagacagaaaaaaggatatgagttgaaaaataaattgctcacagttccagaaccatccataatgatgaaaccgaacttagaatccgaatcaagcaactcggaaagagcagcagtttggaacttgttgtcacatcggtacaaggtgctgtaaccaggacaagcataagttcatgctaactttgtacgtttatttcgagtcacttgcagagacagacttacgtgttgataggcttatgaggctcgaaatcgaacgaaaccttcttctccttaccctcatcagtcaagatagttccaacgtagaggacaagtccgttgggaggaactatataacgttgacaagcaagaggcaaagataagtaagtaggtatcacaactgtaggttatgcttgtgtaaaccctaagaattagcgccaagaaacaaattggaggctgacctctgttgtagagcttaagcctggcctgagcagaagaaatagcagaaagaacggaaagtcgattgactcgagatttaatgttggatgccgtcccgtactcgtgcgttaacatggcttgggaatcagagatggtggactaaaggtttcgaatgatacgtcaaaagttctaatttagtattgctgatcccgaaatattatgatccaattaggaaaaagggtgggggtggagaaattatctgctaggtaaagcgagagcttggaaggagagaagaaattgaggtctcaccccgggcttcatgatgagcgaaatcatggaagttccgtttcctcgagcgctgtcgagcgacttgatgagctttcgcatcttccagctatttgtggagagagacaaaggagaagaggaataagctcggcgtgcataagattggctatggtaatttgcctagagtgatattcttgaggtcagggacgtacatctacagaacgatttcccagattcaagggtatggagaaaataattcaaacggtaccagtcggatggcttgtcagtttcgatacttgagatgaaccccgattgagctgctcagatagatgtcggaagagattgtgtacaagtggaagaggcaaaagtaagaaggaagaaaagctcctagagcggacgaacggcgatattctgctcagccacgtcgacagtcgaagcagcactagtgaattgactctgaacgggtgttctctccatcttgtctaagggatgatcctatacggggaagagaggaaagaagaggaaaagaaaagaaagaaagcaaagaaagcaggaggttaatgggataaagtaagaaagttgggagagaggcaaaaaaagacaaaagatgcttaccgatatagatgaataacacagatgttatctaagtcgttttgtaaggttggtcttacacgtctcgtcctagttggacgctcccactccgtcctacactcaacacacgcatccattcacacactcacaaacacccatcatcaatataatgtctgagcagccagagcctaagccagagggagagggaggacccaaaggagagcctattaacatcaaggtcagtctaacgtttgcatcgtgttctgtttttatcatactttgcttcgtcaactaggcagccaacccatcgcgatgttgacctgtttaaacgcgcttggtggtttgcggtttttttttctctttctcttcttgtgatgccgtgggtacctcctttaggttgcttcctctgatggaaccgacgttcactttaagatcaagacaaccacaaaattttccaagctcaagtcggcttacgctcaacgagtaggaaagtcggtgtccactatccggtcagtttccgtgttcttcttatcaagtcttgtcaatctcgtggtgaagagaaggctcacgcttcaatcattgtttttgtttttgtttttgttttgtaaaaaaaaatcttatctggcagattcctcttcgatggaaccgctgttggagatgatgacacccctgcatcgttgtcaatggaggatcaggattctatcgatgtgatgatcgagcgttcgtttcttctcttttaaatatactgctttcctcttttctccgaactgacagaaattatctgtttacctttgcatttttcacagagatcggtggctgtagacgaccgtcactataggctatatcagaaactgaaagagttttttgtctgtttttgctataactaactttgctcaggagagagtaaagcacgcctggtcatgaatgaaatgtatattttcgacatgtgttcttgcaagattgatcaatcagcacgccgtcatgacaattgtttgagtagttcatccagattttagggtattggtcgctatctttacctgaaaaatgactgaccctctatggaacgatagataagagagtttctcagaagagtgcgttggaagatgattctccgttctgaatgatatttttctttgtacgcacagacatccacctatgaatgatgggaagaccattacgctcatggcattctcccactttgtttctatcataagatctgtatggctaagagacggcatctagacttggtagtagatcgcattatcatgaaaaagatccgtcttggtctctatctacagttgattgttttcctatagaactactcttcagcctctactcgttcatttctcttctcatgatctcactcctaactctattgctgctattcctttgtcttgtaatctgcgttttactccacaggtttcattcaaataggctgatgacggacacaaaatcaacatagaataatggtaaatcccatagcatatacatcggttcctcctcattgtgcttaattctcgagtatagacacacagccatctattcaccggtcgacctcaacgcctaaccctagctccttgcccctcctaaagacaagattggagatagcgctgagtgaacaaacaggtcaaagtacttgagttgagcggatcatccaaacgtgcgcgaaaaagctaaaaggaattgtaacatacacatcttgagttgccagaccaacctaagccagcgtcaaaataaaatccgaaaagaaagtcaagattagtctgaatgttgcttcaaggcaggaagactaatcaaagattaaacgaaccgatttccagacagtcaggtcaccttttgtctgttcccaaagctctctgccctttcccggtgttttaagaacactcccgacctcgcatacttgcccttcgaatccctgtagctcccctgcctctattttggtctccttctcgccatcgacgaacacgatgccagctcgagtggaaagcagactcggctcaacctctagcatgaatggtttataggagccaatgagagagatatgcgtcccagtctgaggctgagtagatgggaagagaggggccgtcgacggagtactaaccaaccagtatgaattgatcaaaatacgtttatatcagaagctgaacaaatcgagttcgacttggatcagaagatgacaaaccagcaaagaatgatgtttgcgttgtgaacagcctgaccccgatcatagttctcagtactggaatgctccaactgaacatttggatgaaggtctcgaatatctgatatcagcttcttcaaccgatcgttcggctctgtagagccaggccgagcaaggaaggcaacatgcttgatcgacggaaagagtagcaggtggaaatgagtgtgccctgatcgagtttacgagaagaacgtagatattgatctatgggatcagaacttctataggtatcccttgtaacgacgaagaatcaagatggaatctcacagaatgcttgaaccccagttccaaagactaccatcttttctcttcctagtccttcccccaataacatctgactgacgacagcgctacccgcagccgttctcactcctgtgagctgacctgctccaattaccgcgctgacctcccctgtgtcttcatccagcagcacgttcgatgctggcaagccttggccgttgtcttttccttcttttggaacagacacaatcttgcatgcggtgccccctaaagcagatgctcgggaaggcataaacaaagtcgtatggttgggcaaagaaagagctagtctagcaggtgtctgaacgtcatcatttgagttcgatggagaggacgaggaaaacgcttggaaagcgtctgattgagaggaaagaaagtctgaaagcgagagcgagagaaggatctgatccacatctttagacgataagaacgtgatcttgctggtcggcttggacgataccggaagagtggacgacgccgcaggcttgctatcgtgagaagaaatagtctcccaatcactcgataaaatcggctttagttcagtcatcgttcgtaccagttgatgtagccgaataaagaagagagatgtaggcaagtggagaagagtgataaaagtgggaaagagtagtgagagtggaacggtgagatgagagatagtcgatgagacaatcagctgataaagttgagataaggaaattggaattttgaaatacgtagcttcctcgcagccgcttgaacataacgtccaacctgatatgtttcatatctcatttctccggcattatatacattgtgttcattcatagatattcagaattgaagaggaaaagatgggtcgtatcgattgtatcaacatcgatgtctgcagtgccgtggccctcattaatacattgaggagatctagaaaccaagcttgcccaattgtccagtaattccacccacgctacctcctgaaggtgaggaaagagaggaaagaacagcgtaagcaagacgttgaaatttgtgctcgctggctcagagggaggaacataccagtagcttcccaaatcaccaatcgtccgtccactccactgctagagaacttgacaacctctccctgctcattccattcatagggtttgagagaggtgatagtgttctggtgtacagtcttcagctcggttccccctccgtttccaccttgagaacctcctgcacctggcccggctccacttgaagaggacgcgcccctcgagtcggccgaccggaatgtcttgaatgcttctgagttcaatctacctactcctccggaaggagttagaactccggatctgtttcctcctccagcagacgaaccgtcgtcaagagaccgctctgatttccatccgccgtcagccgatccggtcaaaaggaagggctggcaatcatgacctgctgcgacgagagaggactcggacaaccacagaagggaagtgtagggaaggttagtcgatcgaatcgtgtggactgcaaggggaggagagtcaggctgatcagcgtaaatgatggtgaccgtggaatcgtggcctgaagagaattgaaggagaggaaggagaggtaccccgaaatcggctctttttcagcaatgtttgtttgcgagagatataacggtatgctctgatggaagacgtactacagaatgcaaccgcatctccgcttggagagaatgcgatgtcgtgaacccatccaccactcattgagccccattctccacacacggcattgaaaggtaacttggccccccagatattggccgagggcctgataagattgagcaaataatcaaggttcgcatgctgatttagaatccttcttagatgcaactcagatgagaataagaaaccgagagaaccgacctagactcaacatccttgatccaagcggagaatactctggccttcatgtccgcacttcccgaagctagcaagatgttgttcgggtgccagtcgatcgaaagcaccgttgaccgaattggtttctttaggtgcttggctacccaccagttgttttccgcatcgaacgagcaaaccgcaatgatccttgcaccggaaccgacagcgaacttatcctcgttgggactccatttgacacatgtcgctgcccggttgattcggagaaggaccaaagtcggcttccagacaccctccaatgtttgggaccaaacgtacgcgtttcggtcctgagagcaggtcacaattcgatttgttcgaggagcccaatcgatagaagtgatcaacttgtcgtgctgtttagatcggtggaagcgtctttgatatcagtattgagactgaatgaacctcaaagttgggatggaataccagagaggacgcgaacctctgagagtgtgtcctggagctcgaatccgcctgaagaagatcgactgtaaatcttggcgttgttgtcgttctcacaaataacaacctctagagaaaagaaacgtccaatctacgtttagggatccgtaccaatgtttgttctttccatgttatattcaagaagagacgtaggaaactaacgagatctatcgggagagaacgaatgagcggtaataggtccactggagagatggaagctgttgtagattagatggcaaaggtgatcgaagcagagaagatgtgtatcagcatgacagcacttctcaacctacacttgtctacatcatggccagaatcacttcaatcagattctcagacatctctatagaatgatcttcactcccaactcttcaggactgtaacctgtgtgattcgaaacatgataaagatgcgaacataaaaacacctacgcttcgggaggagacatcgttgggtgcgagcaaactatgattttatgggtttttatatcagactattgattagaggactctatcagtcgactcttcaagtatcttgcttggctgtgctgagaagaatgatggtgaggagacggagagactgaaagaaaagagagatggctgggataagatgagtgatggatgtgagcgacggatcagaaactcctggtcacaaataattacatcgaaggttacatgacgaacccacatgcaccgcctagacgacgtgctgccccaaccctaacattggccacccctcgttccttatgtttccaactcaatctttcgagaaatataccttccgcccctccatcacctaatcctcattatgtccgagcctcttgccggtctcaaatctctttctctatctgatgagtctggaggacccaacaatcaactgctatctgatgctgctgctgctcaagttgacaagacgagcgatgtaaaagattctgaaagggaggtcgtacagcaacagaatcaaccgagagccaggttggtaggaccggagattgtccagctaccaccaggttggagtgatgacgagtcggaaccggaggaagagggtggagatgaaggtgccaggaccgaggacaggaatatgctgacgagtctggacgataacacagatgtctgtcttttcttccgttgttggtttgttcagtagtatctttactgacttctgtttcattaaacgcaacgccgtcttctcttcatggtgaaacctccatcaggatctagagcttacccattcgtctctcgactccgagaaactactcgagcttgaactgcctcggtttggaccgtatctgaagagactctgtctgcgtcaaaaccggatcacctcgctagacgaatcaatctttcaccatctgactgagctagaggaattagacgcatatgataatcgtgtcggtgttcttaaaggcctcgaaaagtgccctaaattgaggtaagtcaaagcatttgactggcagcgaatacagacccactaacagtatcctcactttgtcacaatcagaatactggacctctcattcaacctaatcaggtctctcaacccttcttcgaccgaccctcctcctctttctgcattcaccaagctagagactgtgtacttcattcagaacaagatctcattgatagagggtctcgagggtctgggtcactccttacgcagtttggagctgggtggaaacaggatcagagtgagtcataatctatcgctacggtacttgttagaaatcattatccaacttacatgcgcgtgatgggtcacaggaaattagagggcttgataaacttgtcaatctggaagaactctggcttggcaaaaacaagatccgaaagctagaggtacgcctcgtttcctttctttggaagacttgttgtatccctttctctcgatccccttcctctctaacatttactcctatcgattttgcttgcagaaccttgaaactctgaccaaactcaagatcctctctctccaatcgaaccgaatcatcaaacttgagaacctttcgtctttgaaggacttagaggagatctacctgtcgcacaacggcgtgctgcagatcgagggcttaggagataataaaaaattgagagtgttggacttagggaacaacaggattgaaaagatacagggcttagagaactgcaccgagctagaggagttctgggtaagttcctcctcttgatacatatgaactcaatactctgggtgtcaatgaatccccatcccgtctgtgttcggctaatggcaattcactttaccaggcgaacaacaacaagatacccaatctgtccaccctgtctcatctggaaaaacattcgcacctggagactgtttatttggagcataatccatgtcagactaatgatcaggccggttacaggaggaaggtcagtccggattttctctcttccctcgtggtcattcacgttcttacttgtcgggtattctaacggcgatccgtctgtacaaactaggtcattctgggcctcccacaactcaagcaggtcgatgctacctttgtgcgataatcacagctccaatttaactagaccccacctgagcaatctcctacgtcccgttctacatttctaacacaacgcttaacattcttgtgtcgagcatgtacatatcatctttatctggctctgccacatccatcttggttcagctcaaaatctattgtagattatcatgacccttgtgatttatgagtgatttgacagatctcaagtctgccgcaaaatcaaatatatatatcaaatatattgagctagattgtgcacgtccatctcgactgccgaaatcgcactgtttctccttccttacactcttaccatctctagatttcatctgcccgtcgttccgtccttttatactcaataatggtatgtcatattgttgataggttatctattaaattatatgaagggtaattcgctagtactgatgaacggaaactgggttgacaaaatagtctgctcaacaatctcaaggaatagccacgcttctggaggtttgttcataatttcttcgtctccttgtttcctcatatctttcctccttttcagtagcaaagaggcaatctgcctgtgaatgcatgagatctcaagtgaaataagatagaaaggagactaaagctcatcttccacaatatatggaacttggtctgtacaggctgagaaggaggcttctaaggtcgtccaggccgcccgtcagtgtaagtctttcccttgttcattcagttcaacgcacccctcttcaatcttctcttgaggatcagagcgggttgcatccccttcatgctcttctcttatttctcctatagctactaacccaatatgagttgcaatggcgtcccggtgcagaccgaactcaaaagctaaaggatgctcgaaccgaggccgcgaaggagatcgaggcatacaaggctaagaaggagagcgaatacaagacatttgagcaggaggtaagtaatccgttcgatcattatcatttttatttctttcagaagagttttgcaagagtcttcccgacagatgagggagagcaaggattgttgtcaatctcttgaatctgaccggtgcttgaggaccgagcatctatgcaattcgaagagggttgagggatctttactatcatactgttcgaggtagtcccaaactaagcagatggaatgcactggaggttgagcaaaatcctatcacgataccacgggctgaccagtctgcttcactcgtcggcacatccaatagcactccggcagcaccacgacatcacagtccactatcgatagctcaaccgagtcagtatcttcgccttttccatcattcactgacaaaaatagcgtttgcttcaagctgactgtcttgttattaccttgatgcatttgaaaatgtttctttcaatctaatatccatctcccccttttatttctttcatcatcgatctctctaaatcaaaacctctcacggctatcacatgcaggcaatcgcttaaagacctcgaagagtcgttcaagaagaaccgagaggccgtagtggaaaagttgcttgaccgagtcgttctcgtcaagcctgagctccacaaaaacttgaagaaggtcgaggcatagatagacagatcgataaacgatcaggctcgcacgttcctcttctttggctcctttcctttccccccctttttttgtatcctttttccttccatcatccacttctctgctatcgatgggccctctcctagtattctgatttatttgctgttttgacgagggccttcggctgttgacctagtcgttgtaagagtaccacggtttatttacaactgacggtatgtctagatcatagaagagctagaaaaatgctcttgttgtcgtcctttgtagtgcgacgaaccaccagatgattcaacgaccgtctacaagtcggaagagaaaagagtcgaaacactgatttacatgtcggatggataattgtcgtgccgtgtatgaataataacacaatgtgaacatcaaacagagatgagaatggtagactgagaacacaatggtccgaaaacaggtacgcacacgcagaacgcgcgaagtacagagagagaagaaagaggaaaagagtatatggaaagcagtgatgtccttatatatagtccaacatgatgaggtgaagtgaataaggaaagaccggcagcagcggaaagaacaacgagtccaaggataagcatagaactgagcgaacagaagcatttatgagaaggaagatggcgaagcgatagtgatgaatgagagcatgtctttctcttgaaggatttatgattggtggtgagggatttgctctcgaaccaatctgttacaatgagatgtaccgaacagaggaagaggatccattcaaaaccgttagttagcttggtcctgacatcagaacttgaaactagaattggtgaagcgagatacgtacttgagccagacgctacccctggtagatttggatccaacaatctcccatggatgtcgatttgcgaaaggactactatttccttcgggcgtgatcctattgagtatctcgtcccggcccttgatgattgcacagccataatagaacaaaagatatgagcatttcaaacagcatggagatataaacaacaacaaagtgaaagaagaactcaagtaacaaacctcttttgttccgtcggcttctaaagtgaccatcgtcccgttccatgggtttccggcttcgccctggtctcctgccgcctttcttttccccatttcactctctctccactctccaacaccgtcgtcctcattatacttgctttctccaatataaaatcctgcctcgtggatccacaagtcaacgaataacgtttgaccagatgtactgctcaactcgtttcgttgatgggcgagtctcaaagaagctcgaactgcttgctcgaacggagagatatctagaaacacgatatagggcgcaggaagaacggcgtggaagtatgttggtggaagaagaaacatgtccagtgttggaggaaggtggcaaggtcggaaggggggaagcccttgcgattgagcaggagagagagccatcgacctggagatcgtcaaagtactatgagcggaggagagaggttgtaagaaaggaggaacaaagaccatggtgccagtcgtccacccgctagggtgggtcgtccgcctaggatgactgatcgctagattctcaaccagatccccaagtttcatcttgcttaatagtccggatctagctagggcctgatgacacaacttgagtgctgatccggacggccatcgcacacctgtcggaagagggactacaatctccaccacaggagctcggttgtatctgtagggagatgtagctgagagaaacaatggttcgactggttgaggtgtcgacgcccgggaagaaggcgaaagatacctccgtccgacaacaaagctaccactttctagagaacttgaagatgagggggagctcatgaagtccggtcgaggtactccgccaaggaaggacgagttggatccaaagggactcccttcggccatggcttgagatagatcgtttatcgaactatcaggagattgaatgagtccattagatgcattgctccatgcgagattcataaggctaggcacgggtggagcatttggatctggatagaacgttgagtgcgatgagggaattccatcattaccgaacgagggatttcgttgacgctgtagaactgacggtgagcctccactggagtatactgaaccagcatcggataatccggcaagatctcgtcgggttggtcttcgagggaacacaggttgctgggagaactcatatcgtctgggttggggatgaatcgaagggggaggggccactcgaatggatgaatcaatagaaaagattgaggcagaagaggaaactacccgaggtgagccaaccgatgtaggcgacagatgagcctggccaccactctccttgccaggaccaagtttcggtcgactcgcccaagaagcaacgctggacatgctactccttctgttgattcttcgtttttccaaagcaggaaattggttcctgcctccgaacgggtccaatgccgactgcgaaccgtttgctggcaaaaacatgggtagtagtgcaggagggggagccggtggttggatagaagtagcaagtggctgggggaaaacaagctcttttccgttgcgaagtgtccgagacgaaggaggaagagacgtatgcgcagggaccaccggttcgatgatgcaatcctcctcttcgaatgggattagatgacggccaggtgggggaaggcaggcatgcgatgcacgaagaaggagggtgacgagtgatgtgcaaaacacttgacgaggagatagctgggtgttgggagggagaaggagcgtggacactacgtgtgtcgagccaagccaagccagtcaagccatacaagccatttagtatatacatatataaacgacttcaatctgacaccagaactagcagtaaacttacaaaaatctacaatgattccatttcccactccatcccacccatccctctgttcaacctcagtcagagctcctctgatatagcctgcccatccaaggccccagactctgatctcctctctagcttcaggggtttggtcgagctgagctctcgtgctatcctctagagcatcccacaggctgaccatcgatcggatgttaagactgggtagaaatgcgcgaaggaaccatggttccgtgactacacttagaaaagatccgggcagaacaaaaccatcagacaatttagaattttcctccccttctccattttcatcgccatgttttatgccgtttccatgggcatcaaaggtcaaaaagttcatgtccgaagacagtgactgggggatagaggcaactgtcagcggtgcaaactcattctttgatgcgatatattgaccatctatgtgtgcaggctgagccgatggttgatgcagcggtaaaccagagacctcagtaagagcgtgagatataggcgacaacgtataattgaatgttgggccgttctcttgatccggtctcgaaggaagagggcgattgtgagaagagccaaacccaatagacagcgggggcagttgactagtggacatcctctcagtgggtttcaaacgttgaggggaatcaagggaaggggaatagagcgacggctgggcgaatggttgagatgttgggtgaggaaaagctggagtagttgagggatagtgggatgcaggaggagacatcaaaggtggaggcacgactagctttccgatctgactatccagtcttttgtcatcctccgtattctcaaccctatcgtcttcgtctccgctaacatcagatccatcgtactcttcatctctaaagctagatccatctgaggagacggagtcgtcgatcagcgaagactgcgcgcctgctggaaatattctaggattcatcagcgagggagctccaggaagagcattctgcagcgaccgaggggcgccgctctgatcaagagccgtcttgaccggtgtgttgccgagtatagacgagtcgtcttggctgagaggagatgggtgtcgagatgagttggtttgattcggaggcgaggcgcgctgtccctggcgagaaggttgagaaacgggaagcgagggggttcggaaagacgaagggggcgacgaggaagggagggaacgggaggatgcgatgacaacggcctcaaatcgtttgctaggaggaggagtggtcttgggtgactttgttggtgagttattgtgatgaagccgagttgttgttgcaggaaacatgtctggtcaacccagatagacaagaacagaagtctgtttcagccggtccgtcaacgtagacattgagggaatgttgatggtttgatgagaaggcaatgagaagagaaagaaaaagcatgcctattgaagtatcttcagacgataccaaggttgaacatacctttgttaagttgaataacgatgagagtcgagagatatgctctcgtctcactttttaaccgaaaagaaagttgacaaaagaaagtatgaggaggatgctatatcattcggacagccagacggtcaagacctaaaacgggatgtttggaggatggacgcgacagaggattctcagcaatgttcagccagacatccggacgagaaagttaagcagaggattctactagatggaacctaccaattctattctcgttccagagaatgaagctaactcaaccgagcgagacagggaacaagcgaagaagggagatggaatgaaggttagaaggcgaacgagaccgacagggttgaaggaacaagggcggtactcgtgcctggtcaggaacggaaaaggaaatcaggggcaaggggtaaaaacattggtcaccactggttacggcatgtgcatggattcacgtgcttttatcagacttaggtagttctacctaaggtcgcctccccctcgctctgatccctccacgcagacagatcgttcgtccatctcatcatcaacgccaacacccacacccacactctcatatactcgcccatcatggatcactttcctctctcctggggcagaccccgtaatgaaaactctcaggacatgttcaacgctgcaccgatgtacaaacctcaagactgggaggccaaggcgtttggtcttgatggaggatctcacggccagatggatgaaatttcacatacccagtaagtaagcctgttttggctgtcggcacataacatctttctcgccctccctctttccggccggaagttcttctctgtgtctcggtgcgctcgtaagctctagtgcaaagcctcctttgcctggtttcttcgagtgttctatatcgagtctttcagagaatcgaatctggagtcgccgagcgtgttcctttccgaaacaccactctattctgcctctagccgaatcttctctcttgttcactctttcaagaaagagcgagacagatcttggttaagaagtagaaagagcggtgctagggcaagaagcttggtgtcggcaacaagaaatatacattggtggttgaatgtggtagagagccggttgcgagattgacatcggaaggagccataccatatcatccctccctctactccgttcttctactgctgctttctctctacagaaagaccaattttcagggctattcaggtagttcagaaggagtcaggttgagaggcggattagagtggctcttactgttcccatcttacattttcctttgcctttttcattcttgttcttctttcttccttagcctgtgccttaaatcatctgctcagaggctcaacagcttactcttctttccttgctaacttcgtggacgggcaggcaaccgatagtaactggaacatccgtcctcgcgctcaagtacaaggatggaattatgttggcggccgacactcttgcctcgtacggctccctcgctcgcttcaaagatatcgaaaggcttaaaccgattggggactatactgtcattggtgctggaggagatatgagtgactttcagttcttggaaaagacgctcgaaggcttagtgtacgtcttttcatttctcattttttgcttgtaataacaagacgatttgcgtccagacctactactctttgtattaatcatttaaaaggatagtgctaaactgcatccttttaactcttttggatgtgctcaatgaaaacatcgctggcttgcagtatagaggaagctaatacatccgatggacataatcttggcccaaaggaggtatattcgtatctgtccaaatatatgtacgccaggcgaacaaagatgaatccattgtggaattcattgctggtgggaggtgtcaagaacggagagcggtatgttggacactccttaccatttaccatttttttaaatttaaatttatatcttcaattcctgtcgctttggtctcctcagctcaacttataacatcactctttctttgctcccatcattgtctaaactagttttctcggatatgttgacttgattggaacaacttacacggcttccaccttggcgaccgggtatggatcatacatgtcagttgttcttcgtgttcctgtcgttctccaaatgtgccccacatccagctgattgaattaagtctatacacatctcacttcttcatttaaatcagcgctcaacccttactccggaaagccgtcgaaggaaacgaagacacgttgacgagggaacaggccgagcaggtgatgattgaatgtatgaaagtgctctactaccgagacgcccgatcgctcaacaaggtgcgacctctctttccaaccgttctcttgatctttcttatgatgtcaagctcatcgtctgatctgggctcttcctcctcttttgattaacagttccaaattgctaccgttacttcggccggagtggaaatctcggagaccatgagcgcaaagaccgaatgggcgttcgcggagaagctaagagggtacggtgctcagacacagtaggtagccagatcgagacggtagtaacagtattagaactagcaccaatcagagaatatgactctcttgaattctatctcccttgttcgaggaagaagattcccatgtatgtttccatttgtttgttcagactgtacttgtcatgaaagtaaccatcagaaaatcagacggacgaatcaaacataaggagctagaaaacataagaggccaaccataaagtatatatgcatcagtctagattacaggacaattaagaacgcgaaacgatcagatgtacaaaaagccgtggaagcgcatcactaagggagaaattgagagaagaaagatgaggacaaagaaaattatagagaaagcaagtcggaaacacgttgtttcttaatacaagggtatcaagcactctgaagttatgcagcctgatgaacggcgagcctagtctctaagttccggagactttcctccttggcaagctgtcattgaacatacgttgaagagatggtaggcaagcgattcagcctctaccaagaaatcagacagaaaataagacaacaaaagatgagattcgtaccagctcttgccttctttcagcaatctccctctgtactttgatttcgatctctcggagcttttcttcttcaatccgaagctgctcttccttgagtcgaacggattgagaagccatatcctctggcaacatagatgagtcactaccaaagtcgataaaaacagatcgatacggaaacagaagtagagttaacgatgactttgttcttagaatcttacaaaaagtgtaaatagagatttacgtacccagtatccccaccctctgcggttcgacttagcttctccgttcggtagttttcataaagccagtcatgtgaaagctccttcagttcgttcaaatgagatccaaacaaggccgatctaagtctagagaagtctgtatgttctggattatcgatcctgttgtatccatgattcaacgatccacggacggaaggataaagaaacaagtggtcaggaaacagttccttttgtgtcatgttttgcaacagggaactcatactctacgacgccccaagggtatctccgaacccgaacaagttctccatcgatcctcatctcttcttcgcccccgacgatagaaaacggcaagagcttctgaagtgcgccatcaccaggaacaaattgttacaaggagttagaagagcaatcgatattggtcatgactcgggcgcaggatggacaaactcgaagctctctgttctcctgcacagtatattcgtcgtcttcttcagcatcgtagggaaagttgtatatcggaatagagtaatattcaatatcttccatgcactgttcggcatgtatcaatatcaagaaacagcgttgaactcgacttgacaattacagcaccttgaagtgaaaacaaagagacaaacccgctttttgaaagcccgcagctcagaaggagttagcgaatcagcccgaccaatgactgtcgataatttccaaatagataagcagaggccaagtaataccagtctaaaggtaattaatttcgagagacgagggattcaataacatacctggaatgatattaactctagagctaagctttctcatcagctcgatgtcgatctctcttaatctgatacatgtcataagcccgttccagatgatatacatcagtacgtaatgatatgttcggttccctaaggaagaaagacctcacgcatgactgaagaaacatctagttagtaccaacaactggatttgacatatacgcggatgtaagccgttcagaagaggaggcttacccagtaggttcgatgaaatagatcaaggcatgaactcgatcgtctctaaatcttggatttcgtttgatttgggactccatagccaaaactaaatggcattcatgaatgaggttcaacgaaaaaaagagaccgatgtcaattaggagcaagagactgaacttagacaaaacaagaggcttagagagacctcggacctactctcatcaaactgtttctccagataagatagtatctcttggaagctatgtcaaccagaccaaacgaagtttcaaatagctaggtctcagaagaaagctcaggcgcatataaccacagctgaatgagagacaaacttgtcttggttgtcaatgttgtccccaaatccaggggtatcgaccacggtcaacatgatctttataccgtcttcttcaagctctacaagcgcaattcgacaagtagaatagatgcatctctgaccgacttgagtttttgaccgaccgaaccatatgatgtaaggctgacgtaccaatctggtgttgtttgagtctaaccttggtctcaaggtgagcttcgttggcaggtccgatgtctttgtgagcctatatgcacgaatatgatcatcatttgaggtcgtgcgattcaaagcaaggtcagttccatcaagacagctggccatagaaacgggagaatcgacaaaccaagacggcgctttcacaaagtgtgttgatgactggttgaaaatgtggttgcaggatgagattcaatcaggcacataaggaagccgtcgtcacttcggatacaagtatcgactcaattaagttcaaacactgcttacaagtcgtccttcctgtacccgactgtgtgtttgtttcaggacaagaaagataatgttaccaataagatatgtcagttgcgaatgagttccctgtctggctcatcgcaatgtgcagggagaccaggaacgctatcagggagaacgaacggcaccgcagaccatgatggtcaaccctatccctttcttgactgatttccgtcctctagatcgactggccatggacatatcgctattaaagagctgagagaaaggttgattgaggtatgaaaggcgaaagaggggtgtatgggattgagttgggagttggtagtcaggacagaatcgactcgaggacaaggtgagatggccagctgaaataggaaaaaaggggctcgaggtttgagctcaggcacaccgcgcagctgtttggacccctgaatctcatccggacctgtcaacaaatcctcttctatacaatcaaagcacttatcgcatcgtgtctgtatatcttgaacgacaggaaacaccgctttgtaataaagatacctagaacatgagagaatcaaagctgttaaacatattcgagccatgtatattgttggcttcacttgcgccttggtgacactaaatatctccctcatcatccgttcctatcacaaacagatccatcatgcctcctcctccttcgtcttcttcttcatcgggaacaccaacaacaatccctccaaacaatccttttcctccgaaccttgcctgtccatgttggaattctgggatgaggccggaagaacgcacatgccgaggcggggtctctcccataaattctggggagtctggagcgaacgttggctgagatgaaggctgagtcaggctgtgagctgaatgagacgccgaagcaacaggttttgtgggcgttgcaggaacaagagtttgcggctgagactgcgactggctatttccttgattgaaagaggcattgagtgagggaccggaacgggagggaagcgtagacgtagacgagctgaaggaagttgaagccatcagcgtcctgcctccgaccgaatttgttctctccatcttcttcttcccatttacctcgaccttgtcaccagatcctatccctgttcccatttcagcgtcactactaccttttcttccaacagatacgcctctcgagaaactaacactacgtctcatcaatttctctgccttagtctcgggtccgacgctatttgctctgctcactgaactattcatagcgcctgttgtagatgaggttgaacctgaccgaacgaagcctgcacgaggaccgaatgatgccgatgtggaagacaacgaggatgaaagagagatgttggaggcagaccgggtcaaacccagagtattgtgagaagatgaatgcgtgcgtctgggaagagagtcttgagtgaggtgttgactggaattggttgaagaagatagagaaattgaggcggaagagcggagagggaattttgatcgcgcaagatccaaacgaacactggcgttggcgctcgagggcagttgccgtgctaacggttttgtgcgagattttccagttaccaaagtcgaaccatccccggtaaggattaattctgcagaagaactagaagcgagtgctacagatgaagacttattacttctagaggagggtattatacaatccatactcgtcgtggcaggttgaggcaggaatttcggccgcgatagatctgtttttgccagaggaggaaaactgagtttcgaacggagaagaggaatgatataattatgggtttgagagaagctagaatacacccagaagaaaggagaaagaagaacaaaaaacagaaaaccagagagtctcagcttttgtcgatcttaacgatgtcaaactgaagtctcactacttctccacgacgtcctcccaaaaaatcctgatccaatctctctcttccttgacttctcttcccttcatttgaggatcctctttcacttttctcacatcttgctgccggtctttctcagcttctccagtccctgcttcttcaacacctagagagtcaagcgcttgccaaacacttaatcgatcggtaagttggtccaaagacttggaaatgggatctactttcttggacgagagccttgatgatttgggatcggagcgagagcgcttttttggttttgagcgtgaaccagactgatcgttatgcggttctgtttgattacatataggagggggtggagagcttggaagaggaaggagaagaagatgaacaagaatttgtaggagagtcctgatagaggacgaagagagagaggctgttgatcaggacctgatacatggcttcagactgtatggggtcaaaacatactctctcctttccagtctttccagccattttttccccttctcgatccacctctcctccttctccctttctattcgtcttctctcttcctcctcctcttcttccttgtggtccatttccttctcaccctcttcgacgtctttctccttttcttttcttcttcgactctccttctctttttcaccttgagagccaaggaacagaccgaatccagatttcagagcgctccattctttcattcctaagccgctctctccatgcggtattttcgaagaagggttgactagagagggaagcagtggaggaagtattcgtttgtatttttggctcaagtccggaattgttcgcacaagcgcagacaagggcgatgatacatttctgcaggactcggtcgaggtttttgaagcgacagcaggaacaagatgttgaagtgtaggaatgatggaagatagagaatatatcatctagcgatgaggtcatgaatcgatcagtcccggacatgtacgaacaacattggaacaggagatgatacatacctcaggcatatagagagcctctctataatgtgacagacaccagtcagataattcatccgaatgtttctcatctccactgtaagaatattggtttatcagtctcaacaatgtgaataggctcaacaacaacgtatgaatagctaaacgatattgaatgaagtaagatactcactcggccgttttcaagtctccccatcctttgcctccaaattcgaacgcgattgtggtctgatctttcagtttttctggccattgaatcaccggatctgtatcgagctcccaaagatgatctgttcccgattgctcagatagacgtttgacaggtgatggtttagatgttatattgccgaaccgtgcctctaaggctgatgtcgagaacgctgttgaaaagacatcaggatcgactatggatgagtttgagttgtgggactgctggctccgttcgatgattctcatcctacccaaagggataagcgagcgcgttgtacggtatcaattgggagatgagtgaatggatggttgggatgaggtgccgtctcgatagggaggaaggtatgttgactgatcgagtgagagtcgattagtcagtttgggcaactttgattaggaaattcacgcgtcttttgtagtttctatagactgagttctttgtaggtttctcctttagccatccctctttctctttctttcgctcacgttcacatcatcagtctcgtctggtaatcttcatccatctctttgagagatctaatccgactctttactataaagatatcggacgctacctaccaatatggcaccaccattggcaccggctccaacgcctctcccagcaccaacagctcggccggcgaccgccatcaatccctctgcacctaccaacgcgacagccccccagcccccgccttcggcaccctcacctcgattacccgagaccgatccagcgtataatgaagtcgtgctttcttttttgagaaagagaggctaccatttggccgaagaaatgcttcgaaaggaaattgcaggtacaacaagttcggcatctggttcaaccgctgcctctgctgttgcctcttcttcgacatccaacccaacaaataattcttctatcaacgctgccacctctgtcacgtcttcaactggaggtggatccttcggaacaggaagtgcacctccacctccgggaggcatagctggcgctcctggatccagaccgatcaatcattccggtccaatgggtacacctacggctggctcgactcctctaaataaatccaacacgaccaacttgccaaatctaatccaacgaaacaatctgaacggaggtccatcaggtcggcctccgacacctggtggtggaaatggtccgcaaggcagatccggcacgcctccgcctgtgatatcgagccaactatttgatgtgatgctccagcatttgccgagttcggcattgacgacactgggtttgacaccgccggctgccactctcgagagagaacgaaaggagaaggaggacaaggagagggcgggacgaatactgaacggaccgatagctgcaaacgctatcagagtgttggagcctggggagaggattgccggatatgatgggctgagagcttgggtagaaagtgggttggaaggttggaaggttcgtttcatctcctcaactttgttctaaattcttcaatcttgacacatgagtagaaaagcggtcaactaagatcatcacatcgtatcccttctatcttgcttctcaggccgagttgagacctctgctgtttccagtgtttgtgcacacgttctttgatctcttaatcacaggcttttcacaagctggtaagtatattgatattccgatgtgcgaggccactgtgttcaaaactgatgctgcaggcttccttcttcgctctgggatttccagctcgggagttctttgccaagcatgccccatcgcataaacctttgcatgcatccaccatctccaccctttccgcaatatcttcctcagctcatatctcggcatctcctttagcgcgtcgatttcgtagtgaaaagtatgtgcttcgtatgagcaaaggtggatttggattgctggtaggctggctcagtagtggcggagttgagggtgagtgggacactggagggaggaaggagagaggcaaagaaagcgtcagaggagtgattaacgaacgcgtacaggtcgatggtaagtctctcagcatttaactatttgaaaacagaataaccatgtcgcatcttggttctcacgttatcctgtcaaatcgtttctctcttcaatctgctcggtgtctctcagtttcccccagtacccagccaatctctccgatggctttgctcacggagactgggctactttcggctcacatcccagcgcaccagtctccaaagtctacttcggcaaatggaactagtcagcaaccccaacaagccgttcggccgtctccggcgacattcaacgcatctcaagcgcctcttaaacttggatttcctgctcttggagagaaactggcggaagaggtgaggaaggtgatcaagatcgaggaggccgaagaagaatcacgtttgaaggaagcaaaaaaggagtcgaatggcatggacgtggatttaccagccgcagaaaacgcaacttccggagcggctacaacgtctggaaacgcgtcaaatcctgcggtccctgttgtcacgaccgctcccggtgcgggaacctctggcgggaacgcgtccacatctgtgggtttgggtgcgaaagataaggagcctgatactgagggactcttgattccgaaagatgatgatctgcttccccttcctgtcaatttccggactttcgacgttaagcgagaagttgaaaaagtgctggattctcgaaaacggatccgtcttggtccattaaactcttcgactacggggtccgcttctgctggtccgacattagctactgctgttgggacggctgatgcgaaatgggaaggaccagaggtagaaggtcgagtagttttaccaagtatctgcgcctatacatttcatgactctggtgaggggatcaccagcacagccttctcggcagacagcagtcttctggcggcggggagcgaagaaagctgtgtcagactgtggagcttgaaaggagagaagctaagagggctgagaaatgatcttgatgtgggaacgtcaacagatggtgagtgctgggttgaggaattgtttttcgctctgttttcttcatcaaggaaatatcggcatgtgttaacaaaactggttgttcgtctcttcgtgcttgatctgtcttatgctgtgtttttttgttcgctttcctgtttgttagcgtctttccttcggaagaatcgggagaaaggtgggttggcgatgcggaagctcatcggtcactctggcccggtgtattctttatcattctccccgatcaacggctctgccgcgccacctcgacatttgctctcatcctcgaaggacggcacggttcgcctctggtcactggatacttactcttcccttgtcgcctacaaaggccacaacgagccagtatgggatgttgagtggggaccgatgggtgcgtactttgcaactggaagtcgggatcggactgccagattgtggagtacggaccgaatctcggctctgagaatgtatgtgggccatttgggggatgtagatgtacgttttctccgactcctgtattggtattccaagcgtttcgtgcaaaggcggaaaagtacaaccgagctggatactcaaatagaatgaatagggtatctaatcgatttattgtttgtttttctgtacacagtgtatcaagttccatcctaactcgctatatctggcgactgggtcgagcgatcgaacatgtagattgtgggatgtccagcggggagcctgcgtccgattgtttgtgggtcaccacgacaatggtatctcgtctttggcgatcagtccggatggcaggtatttggcaagtgcaggtaagttttttcaatctgggtacggaactgacaactcggatgcgtgctcaaagtctgtggtcatatttttgggggacgcaatgatagccgaggactatgcaatcaacatttgggatctcggctcgtctaggctgattaaaaagatgacgggacatagctcgtcgattcactcgctctcgttctcggctgagtcgtcgcttctcgtttctggtagcgcggattgctctgttcgagtatgggacgtgaagagttcggctgtggaggccgagcaaatcgttcaccagccagcgcttgttccggctgccactg

SEQ ID NO: 2089 - DNA, 5879 bp, Xanthophyllomyces dendrorhous
gtgtgtgtgtgtgtgtgtgtgtgtgtgtgttttgggaggaggggacgtcaagagagtttcttggtataccaacttgatatacatcgttatttgcaatacaaagtcatttgtctcattaatcgagattcgtgactgaggaaggtatatcccgcttcatcttttggtgattctctgagagcgacagacaacagatggcctttctgtacttgcccttctcacttggtgtcctctagcacgtgtcaaaagaggaagagaaagagacgaccggctccaagaccagacggagatttgaattctcaatattctctgggttgttcctagaatgtttgtgcctgtgctgctcgttcctaaacccatccatccggatattaggccaaagttcagagataacgtatttgaattggcaaggcgaaatacttgaactgcgccttgaggtgttgctgcgcttactgcgctacgcgatttttgatctctgcgtatgtgagtctcatttgggtgacaggcactggacgagaggggcacatggaaaagaaaaacaccctcggccagctcggccagttcttcctacgttctcctcatcttcgtttcgtcctgtcctcatcgtccatccgattcttctttcctttctctctctgtgttgttcatcgtgctcataaatccggtttctctctgtgctcactggtatgtatctcagtcggtcctagagcagagttattccctagctctgttgcagtttacttctctgacggccaaagttcttattgtcgaaatctaccgaccggtttcgtcattcttctttagcggggtatacatacttccgatcaaaaaaagcgcttcgggcacctttttcttcttcttttctgtgtagaaacttagatctcttctctgtatagagacgatatctctcttgccacctttctcctcttcttctagtctgcttcaagaaaaaaacctcacattttttggtcatgcctaacatcacctagtacgtcttctgactcgatttgcgcgaaacgaggattctgcaaatacaagttgcaggtcgatcaatacgcctcggcatagttgaaatagctgtagcatcatatgcattttctaacacattcgctctttccacttgatcgtatcgtcgcacactcgtctgctttttgaaaccagcggaatcatctctggtgcggatgggtcgatcgacgccggtggaactgttcgtttctacactcatgtttttttccgctgggtgccttcctatgctgtacattgtttcttcacaaagctgaatcttggctgcatcgcaccggtgaaccttggctatcatggtttaaggacttaatcgctactaccgatggagttgcctcatcgtatgaccctggagacattgcttgggtcatgacctgctcagccctcgtctggatgatgattcctgggtacgtgttcccacttgactcttgtgtaattagaacgctggttccgtcaccttgtccaaccgtgtttagtacgatgtgttgaacttcaattgtactttcttcagactcggttatctctattctggactcgtcagaagaaaaaatgcgctcagcctgttattcataacgatctcttgtaagtcatgtatcgctgttccttcagccgcccacaaggtcgctaacttctttatgatggctagctctcgctgttacttcgttccagtggttcttctggggttactccctcaccttctctaagactggaggccttttctgggggaacctccgaaattttgcgttcgttgtctctcttcgactgtctttgactgagccgtccggctgactcatgcatgaccatgtcatcttcgttctctttccgacggtccactttcgacgaaatgaaatttcagtttcatgaaagtcttggagcttcctgtccccgaagccaacaacaaaattccggaaatcgtatgtatctttccttttctatgtccttcatcggtcaacaatagcctcgtcctgatcgtgttccacaccatacgttcttccgcattgttttgtgtaggtgtttgccttttatcaatccctctttgctgccatcgttcccgcgcttgcccttggcgccgccgcagagcgaggtaggttcctgcccgccatggtcttcacttttgtgtggacgactctggtgtacgaccctctggcccactgggtttggagctcgcacggctgggcattcaagtggggcgttttagagtaggtccatgtagctcgactatctgtctctcttggcttcttctttttcttgtttctgtttcatcttctggttttgtcggctgacgactattttccactttctcactcaatataatctttctgtagctatgcaggaggaatacccatcgaggttgcgtccggtacaaccggtctcgcttattctctcttcattggtcctcgacgcgggggcgagaccttgttcaagccacagaacatatcacatgtcgtgttgggaacggtgctcctatgggtaggatggcttggtgcgttttggtcttgcttttgttcattgttgcggccaggaacatgttggctgatcgacttggttgaatttccctcttcattgtaacgggtgaacaactggtaggattcaacggaggcagtacttttgcggctaatctccgagcggccatggcgatctacacaacgaacttggcgggtagtattggaggcattacctgggttgccatggactacagactcgaaaggaaatggaggtgcgtgtattacatggaataatactcgacgatcaagaaaccaatggaacagattttgatatgtgtatttctgttactctagttgcattggtttctgcactggtgcgatttgtggtttggttgcgatcactcccgccgccggctttgtcggtccaccagcggcgcttcttattggtttcgtcgcctcggctctatccaatctttccactcggctaaagacagtgatgaaagtggatgacgcgctcgacatctttgcatgtaagatttcttcgtcttgatttattcccccctcccttttttccttatcttttctcgtatgcccatccggccgttctcaggccggcacatgtactaactcccagctcgaggacttgactgaatctatactcaaaggccacgctctctccggtgcgattggtacgttgatgaccgggatttttgcagaggccaaatttgctgcgttggatggttactcaagcattgccggtgagtcattctttacggcgttccgctcgttcttcttctattttcttgctccgagatggactcttggccgcgcagaaatatttacctgatatcatgttttctcttcgtgtacaaacgttaggtggttggttggacggaaatttccgacaacttggacttcaggtcgcttgggtccttgtcggcttcgggtggtctttcgttgtcactcttgccatcatgtttgtgagtttgcctctgaggagagcctcttccacccgggccatgcttccgttgtcggtcgatcgtgtcgcttacgatgaaggttgtctggacggttgatgaactttcttccaacccttaggtcatcaaccttatccctgggcttcacttccgatcttctgagcaggccgagatccttggtatggacgagaccgagcatgatgaggtatgttttgacaacaagaagaagaaagagatgaggatgatgatggtgatacacgagaagaaggaagcgaatatgtgatctaacgtgtatatggactacccacacctttttcttttcgcagttcgttcaagactacgtgtctttccgtcgagacgccgatctgacggttgccgcgcacaaggctttgtcccgagtagcgtcttcgatccacagaggaccatccgggtcgattcaccggtcaccctcgaacgaccctagatttgacaccaggcacgaaaacgggcttgcgaacggagacgaagagaaggtggggcgtggtcgagattttaggaaacacggcaccgtcatcgaggccacttcttccgatgagggaaaggatctcgagccgagacctgccgggttgcagagcaggggttcagaattgaggctcaggagtcagagtcgagcgagaagcacaaagtcgaatgtgagtctctgatcaagaaagggggagaacaggtgcacttatggctgatgttcgtttcttttttcttctttttgtcaattttcttctttctagggtcctgtggaaaacgtggagatgaaccgacttggcccgtgagacgatgctctctcagccgaatgaagcagtctgactatccgaaaacaaacctaaacaaaacaaaaaggagggccagtacaagagattctacagatgcccaccgtctttctcaacagtcttttcttcatcttttctttcttcacgcgtgatccgaatattccttgtccattcttctgcctacttggcagccgctctttactttttcctcgacaaaagccacgattgtatggttatgagtaaatcactgacagtctaccggtgccaatttgtttgctgtctaattgtatgtccatgtactttatccgatgaatcgtctgaaagagaacgaagagaggaaagaaagaaaaagaaagaaagaaagaaagaaagaaaaaagaaacaaagtgacgttttcacatctcgtgctatcgaacgaccgaccgaagagttctggaacaaagatttgcagggcctggaaaagaaaaacgccccctttatttaattctatctgtaacaatatactatacatctaacgggggacctgcgcgccatgtgtcagaagcgctctcctgcaaatcccacagctcgagaacaggcttaatggtttgagccccctagaaaatgccctagttgagcgcgcgcgcgcacgcacgtacacacacacacacacatctccactcacacactcacatcctccctcttggctaccaccagggtcgatccgctcggacggggccgcttcttgtgatgatcgttcttgtaattctgtttatttctcctgttgcctcgtatacatactcgtatgctgctaaacaagggtttcctccctacgttcgatacattctctccggtcctttctctctccctctctccctctctccctctctctctctattgcttctctccccactcattcttgtcccctttttcttcggtctctctcttctcggctcatctccgtttaggttgatctaataaaaagcctctcctccggtctttcttccatcgaggggtcttccgctggtcgggctcacctccccctcatccttctcctgctctccctgtctctctttcgatttatccttttcttgtttctcttgctgtctatctctctcaaactagttgaacacatatacatacattcacacatgcacatacacatgatttcgacagaagaactcaagagacagcaagcgtacgtcttctttgggtcgctcttatcctgaggccatctgtcgagatctgtactaatcagatcatatctggccttcggaacgtctgtctttcgttcttcttttctctcgctggtcctgggcgaaaacagtggcttggatgctgaaggctcaatgtctacggccgagggacgcaggacgtccacttatgttatttattcgacgtgagttctgagatttttttctctggagattttatctccacttgtagatgtataggtcagatcgaagagttgggaccctgagggaaattggtactaaatctgtgatttttttcatggctgcccttgcccgttctgttcctctattcgatcacgaaagctcaacgctggccgagacgattgaaccttctagcacgtctactcttctcagctcaagttccagtcatgcgtcccctcgtagcatgtgagggctgcttctcta

SEQ ID NO: 2090 - DNA, 4263 bp, Xanthophyllomyces dendrorhous
tcatctgctccataatcctagcgcttttctttcgttctcgaaggcgcagacaggcatcgagagagctgccgttgcaggacaataaacatgcggcctaccatcccgaaatgttcatggttcctgcacaggcgagtgtgtttgggactaagtcggctgaagtgaatggcgaaaagactctgagatcaatagagaccggtgggcatgctcggaccccgagtgaagttcctctactgacagaaccacccttggctcccatgccctactctgtcccaccgatctcgacgatggcgccggcccgactcattcagggatcggtctctttatcgtctcttcgtccatcaagatccgagcaatcaatctaccctctcttgagttcctctgcttcgtcagacgaacttatgcaagcacacgatcccttcggagcttacgctcctgtctccatcattccaccccgttctatccctcggtcgagttcgaggaccacattggggttctagatctctcttagtcaacgtatcttcttcttccttgttatcaaccatacacatgggggcaggaagatagattcactcttgggtaggttgacataacacgtccttatgtacccttgtgtttcttgaatattatctttcgagaggaaacattccaatggaacagaatcagtgtcgaatatctttctaagggtttccggttaaactggcattgtcggatccttcatcagttgcgctctctcttcctccttttttcttttgcttattcaatccctgataacatcctccccactagaatatagtagtcctctctgctttgatctaccaccttgccttctaatatatctgtgcttttccaatatctctctttgcttttctttcttctttcggattcgtctcatctagcttcacttgctcttttcttatttatcacctcctttccatcatcgcacgttgcttggttcttgacaaagaaagacgcagattattgtgccgataggttcacttaggtctctcggagactgtcaggcttggtcggcatactttgtcttgattaaaagatagaaacagttcgagatatttaattatcatcgggcatgcaaccatcatcgacaggtcgatcgatctgtagcatcgttaaccgagaaccctgggagcaggggatagaagatcctcggattacatccggtccggcctcgttgatgcgtctttcttgttctccttctccttctcgtccccgtgctccactttttcagccactgcattatgggagcttctctgcatctcatgtctgcttatcctccgtcatggtttatttccttcttggctaccgtctcctgaggaaaacctccctcctgctccatgttttttctgtatacaactaattttctatctttccatgaacaaacacgtctctgcacccagtccttttttttccttcttatttgtatccctttcctcaacgacctctgttgcatgttgatctgtaaagacgctttgctcgattcgagattctgaccactgattagggaccagatcgaacacatcgactcttccttcttccttctttcttctttctccctacctctaccctttctttcgttctccctcttcatgaaccgcacgatatgtatacaaacgagttgaagcgacaacaaacgtcagttgagttcgattgttggtgcacgatggcataacagatttcgctgactcactaattgtattgcgcttgatctttgatcttttccttgtgttccactgctttgagaaattaccagtggaacggccgttcctccttcgtaagtgatctctgtcgctctctgtctctattgaggtgtgttgacgatgtgaatgacaaaaggtcgtttcattctcgcaccttgacgttctctcttcttttccctgccttgtattagtccaacacaaggcgcgccatcgggcactccaccttccggtttctcccagtttccttttccttttccttccggtcagccaccgcctccaccgccttctggttttcctcctcctgctggttttcctccccctccttcaacctcgtctgcagggactacgtgagatcgattctcctttctgtcctctgatcgcacccactctctttttcttaccttataggttgattttcgctttggctggttcttcgtatcgttcttgtcgatcagtgcggtagctgctattgtcggtggcgtcgtcggcgggattgctttcatcatcgttctcctcgtgttcctctttttctacttacgttcccgaaggcgaacccagcaaaggcgaacgtcacccgacctaccgttgcagaacaactggctgagcatcaaccaacgtggaacttggttgaaggaacgagatagtgttctggccgtcaagtcacaggaggacgaagacgaccgagctgtaggcaggaacgagaaagacaatagacttccccgctcaatcatcaacggagacgatctatcccgagcgtcgttctttgtcgcgccattcccagtcccagtccctacaggtcctcttgcttctatccaagagatgactgctgtcccctcggcatacaatccgaaggcagagacaccgttctatacgtcacccgccctgcctatgtcgtccggacactttgaacaatcgagtgatctctatcattctaccggttcgtcccctcccggaccggatcagaccgactggagccgatctgatacagtgtttagtcaagtgggttccgatcctacaaatcaagataggtgagttcgttcaggttccgatcagcgtcttttcaataatctgtcggccggtcaaatgggcgaaggtgcatccagcaggaggggacgcattcgtacttcaccgctgaccgatggctctggtccgccttagttctgtatcaaatagacgacaaagcctgaatctgccagatgaaacagccgatggagtgcagtttggaaaggcgttctgagaggtttttttaaaaaaaatcttcaagctttgtttccatctctcgggcctgtcttgctcgttggatgttctctagaatgtcttgatggtccttagtcaatcagaccgtacattcaacccaacctgacgtctctttcatattcttctgtgagattatactgtgcgattatatgttgttgttgttttttttttccttctgttcgaattctttctctacacacaacactctgtacaccaaaaagccggctaccaatctatcttatgtaggatcagatgtaagtcgaatgctgaacagaacgaccttccacaaaccactagtacgtccaaacgcatgacatgagccgacaacacgtatttctggataggcttgtatagatcagaaacagaaggaagtccttgtatggagaaaccgaaataatatagatccaatcgacccatcgggtcgattccaaatagacagcaacaaaagaaaaggtgcgcagaacgaaaaagaagaaagttatgatcgagaactcgactgaatcaagagtcggacggctagagagaggcgggggaggggattcttagaatcccgcgctctctcccttaccctcaagatcatccgttcactcttttcgttcgtatccgactcttttcaaaacattgtcgagtccgaattctttcaacaaccgatcacacccaggcttcatgaagaaatacccgacaaagcccagaccgttgatactaaacttgagtttatcttcgatctcgatctcttcgtcgtcctcatcatcgtctttaccctcctctttctgcttcttctccttttcctcctctgctttctttatcaataaattcttcagatgtgctggcacgggtacctctacatcccgactcttcctggggatcgtgtggagccctcggagcgtgagcaagacattatgggatctcacaccctcggattcaggctgcgctccatgggactcaaactggccgagatgagtctcgtagatctcctgaagggtggccggggtgatctcctgcgagggtgtcgtggtggggtcggaaggcgtagacaaggaagacggtgacgacgacgacgacgacgatgttgaggagctgagagaaggcgtagaacttgaagtagcggtcgaggttgaaggagccggttggtgatgtttcgaggttccgggtaagggggtgaagaaatgcacgtatggtagtggaaggacgtgaggctctgttcgagtacgcaaatgtatacacaacagaccgaaaagaaggaaggagaaacgacaatgtgtcaatgtgcgagactcgactaggtctatgg

SEQ ID NO: 2091 - DNA, 18322 bp, Xanthophyllomyces dendrorhous
actcactctgcgtagcatgttcgaactcgcccttgaccttctcggaaagagcttcgatgggcatctgatcttgtccttcaggaatcggaacgacctgaatgtgccgatgaggctgagatgctccactcagcttccccacgctgttgtcggcagatatcatgacgaaggttcagtaagggtgtctcggtagagtacatgtagacaaatcatcggtgtctcgtgcgattgaaccacctacttgacaaagacaaatcctctgcgcccggccttctccatcgccttgagaaccctccaggctgcccaaagatcctctacttcgaggggatcggcctgaacggcccatctatgagagactagcacgaactgctctggcaggaagcagaacttgttaagctgattggtttgtattaaaccacagatgaaagattaggtaaacttgtcagaccgtccaccattcgggagggtagaatatcgataggaaggagtgggaagaaaaaagagaacgataccaaagagtgatagccttcgtctagatcggttaaaaattcggcgggtgcaaaaggctccgcaaatggatcttcgtctggttttgatcttaaatcaggcagctcatccgaaggtggtggcttttctgagagagaggggattacatgaatcctatctgttttaaacgatgccgtgtccacatcagaacatgtatggaaacgcaatgataaactttgaagggatacgaacaggtcacatcacaggtagggacttccactactttctctgtgtcgtagatattgatcttttcaaccttgataccgtggtctgttcgttactcagaaacggagcgtcaatagcttctttgagaatcaatgaatgtggagatctctggaaagaggctgaccatatactttatggagcacgcccatcaagtcatgcagcgaatcttcttttcgatccatagtctaagaactagatggtttctagaggtgaatgtacaatggatgtttgagggtgaacatatcaagcgttcacatttggcgttctcgggtggagggcgtccaaacggagtgctgcgcctcgtttggctatgcttatggcggcttcatttcggagttatttcattatcagacaaagccgttctatcataatgtccggtccaatgcagatatacatacgaagcacatgacgatatacattcaagaaagaagaacggatacgatccaacacaagacaacatttaccaaataagtacaggttctacttctagaaccctacgggagaagagagaatggcattttaaacctgcttggcaagaagcttcatgtaccattcccgggagtaataagaagaaataattgagtcgtcatcagcctcagtctctcttcaaacttgtctgtatagcaatcaaaagaagaagatggcagacttaccagtttgacagtgtcgtaaactttcctctgaccagcaaacaacaaacttgccgtcaggacgctctgcagcaacttggcctgcatgccccggtatagaccttgaacaccctccttgccaaggatttgaagcagggccgacaagatggacgggtaagcatgcgagtttgattgctgtgttggataggcaatgagtttcagagaggctaggcaaatgagacaatgtgaagcgtttaaagacgtacaagccgggacttgaggagaaccagagggtagctcaaagaagtggcaactaagtatagaccaacgattcgggttcagtattccaagtgttgatctaaactaacgctcggtcagtgtaaaatgatttgaacgaacatagtttcgccaacgcgcctagaacaaagatgtcgatatcggaaagttttttaacgggcattccgcgctttcgtctagcggccagaagcaagttctgtagctgttcgaatgcggtatacttttagggtaggaccatgacatagattgtcagtctctttttcttgctaagaacaaaactactgaactagcgacgtacttgaagtacggggttgataaccagcacaagagcagccttgatacctcgccagaaaccctctgggccactctcggccagaatatccttgacagattttggaatggagggcgagggcgagttgggatggaggtgagtgtaggtcgactggtgtgtctctgaagttgtgcagtttccatttgatttaacgaagaagacagactgtcagtttggaggaacgacgtagaagaaccgaacaccaaaggacgaacggatgacccagagtgggttggttaccacagtcgtagcggttcctgttgatccgtccaagaatggaaatagtgatgaaatgagtatttacaagaagaccgccaacaacttgatgtctcgaaaggcaaatgcaggatacaacaaacaaggacaagagcaacgtaccggcaatcacacctgccaatatgctctgtccaacactgaggttccctccattcctcttccgagcagactcagaagataaagaataggcgaagtcttgttcctcgtgatgtacgaacaagtcagaattcaaatcaatcatgaagacgattcattaggggaaaaaagaaatctcacagtataccgcgttggtcactccgattccaaagagagaagaagatagtccagaatagagcccggatacgccctcttgttcgaaaattcgaacgatcgtcgatttctcagtgattgatttctgagttttccattcagattaaagagaagaaattttgatatgttgaagcaaagaagatgttcaggatcagagatcaagatctgcttgatgtcaacatgacaatgaagctcaccagtctattgagcccctcaacctctttggatttggccttctctgtgacagcatcccgggtagaggcaacgactaaaggataggtaatgcacttttcattattgaatcaccacagatatcaacaaatcagttcggtcactaaagtgaacgatagatgaatgtattcatcactaacgagggcacccatcccggctacagatcctgccagagattgaattctatgaatcccagattcccatacatttcagtcagcttccttagtgttcattactagtaaacttcggttcggttgcacaactctgcatgatgatatctgaaagtggagcgttgacaacatataaccatccggcactcacacggactcgctcattctgtgttatatatcctgagttgttttttttgaataagactaataaagctcgaaggtttatggttgatgattgatggttgatggtcgatggtcaacgatggttgctgatgagatcctagagctcaagaagcgttcactcgctcagccaaccggcaaagtagatagccgggcaacttatataaatgaatatcgcgtatggacataggtaattttaactaagctacgcgacgcgtctattagttcttagttctcttcagctcacttacttaccatatcatctcatcaaacatggcccgcaaagagcaagcgaacgctgctgctgtcgctcaacagcagcaatatgaggagataaataatggaatcggttggtttttctcttcccttcgtttctggtggaaagaaagtgctgagaaatctacagtacgtcggcttcttatggaaacaagtaaacttaccttctaaactatctgtttctttctctggtatcgttggtcgcctttgttggatgatattgcagaaaattatgaacttcaacgaagcattttgactcgagtagctaaggaagatgtttgttctcatcggttctttatcgctcagcctgtgtatcgtcttgtcggttgacggtgtatgcgatacgtctgctgataagctgtttgtcgatgtttgctcatcgtcacattggatcggaaccgtgtacagctaccgccgtcagtaaagattcagaaggatgccatgtctgggatcagtaaatcggctaccgtattcatcaactatttaggttcgtccgtagtttctctgtatatatcaatcgcggagggtagacgaaataatcctttgattggtacctgatatcctggcctgcgtgcgattgtttgatgtatgggaaacattctctagcttcaacgttcgtttctttcgtttttaaactctcttcacccctttccattcgctcgctcgcttgaagccgatcgaatggttgacaataacgaatatatttctgttcctttgtagcgcccatgaattatccaccgctcgtggggtcaagactatctctgctgcagatgtgttgaacgcgcttgactcgactggtttctacccagaagagttatcggaagaactcgaacgggaactcgaaggtttgttgttgtcttatccttcttaatctcagtttttttttttcttaaatagtctttttgacttatttgttccaacttttctctttactgtgtctgtttgctaactctctttctcacacatatgtgtgtgcgtgcatttctctaaacctaatgacagcatatcgagcggtcccgaaaaagccaagaccttccaagtcgacgaccgtggcaaagaaggcagtctccgatgcaccttccggttcgcctgtgccttctggttcaccagtagagaacaactctgccgaagtggatgaactagatgatgatgatgacgaggaggacgaaaagatggatcaagaggtggaggatgaagaggaagacgagccagaagatgaggaggacgctgaagaggaggaggacgagatcaaggaaggtgatgaagaaggtgaaggcgatgtaactcatggggaagaggatcaacctatggaggatgtctaaggtttcgattgtttcttgttgttttccgaaagtagcaagacgacatcaccttacctcccctcccctccccccttgtcttctcggtttccctctgttttctgtgcgtggctcctgacgcattcatagagccctttcgtccttcacggctcgcttggctgttcaacgcatgttgatttgaccagttgaacgtgtggctaaactctgaagttgatagaaacaattttttttcaaagtgccacaagtcactggaacatgttggtcgctttggccctacaatcagagaataaagtaaggaagaaaaaaagagataagagatataagatacggaaaaggaaaaagttacaaaagagaatggctgagtggaggtaaggagtagaggtagaggtagaggaagcaatcgataagccacgacgcaagatgataagagcgccacgctctgctaggcagaaggacgaaagagttgagaggattcatcataaggagattagcggccagatcagaagagatgattgtgaaggcgggaagaaggaatagttggtgggttgagataaggtggaagggcgaggaaggaaagagaaacgaaggatggtgggccaaagtgagcccaataaagactatgtatgaaggctgtctctatgcttttaatcagaacaaaagaagaatggataaagaagggatggcaagacgtgtcggtcaagggattaaaacacgtaagccttgaaaccgttccaggcggcggctccaacggccatgacacctgcacctgctaaagcaggccttaatccagctgttctcggtattttccaaacagacaccgcatacacacaacccaacatacacccgttaaccagtttcaaacgcaggttgagtacgtgtcaagaaagaaaacaaagattttcaaagaaatatcagcatttgacttggatttaagaacctttgacggaagcgtatgttgaaagatcacatacacgtcgatttgtataaagctccactaagcgcacccgagatgatggatgtcacctggtccgatgtgtttgggggggagaacttgtagaccgtgttgttgagaatgttgtaaaagatggcttttaaggtggagaaacatcaagaaaactggtgagtacattaactcaagctgagagagtgcttgaaagaattatatgatgcagaaagactatgggactatgacgtctctctgtatcatcaccaagaaaaacggatcgatagacaaagaagagacagatattggccaagagaaagtgaagagaaactcaccaagagtaccagcagtattcgcgtagtaggttcctcgcatgcttccagcgttgagcatggcgttccatcgaagctttccacccattttgccgggtttgcgcaatccatcgaatgctccaagcgcacctccggcaaagagacctataccgatgtggaagggaacagggaagtggagaacaaaagagatgttaatcgacagatcggcacagatcattcaacgtgagagttctggaaagatcaacaggaaaacataaaagaggagagcacaaggtccccatgaaaaagaaagagaaaaagagaaaggagagccgaaggatggacgaaccagtcacataagccgtaccggctccggtctggacatcatccaagaaacctctacttcccaggatagatccctccatatttgtcttgtcctcctcaagaagaaggtagtccatctgttcgtttgtaccgagtccggcgaaaggatgaagctctttgtgggtgatgctgttggtgaacaaagactctgccgtcgggctagcaaacgcatctgttgtcgacgaggacgagctgggggatgacgaaaaggaagtagagggagtagattgggaaaacgagttatcctggaacgaggactggctatggttagagctggcatgggccgagccccgatcgccaaggaaagaagtgaaagacatgctgctgattagagagacagtggaacgaaaagatcaactcgaggatgaaggtggtcagcaagcgagaaaagaagaagagaatgtggaatgcagagaaaaaagacacgagacacttaagtcaatatatgaaacatttatgacgatatccggttacgggtttttgacgcttcttcctcttttttctaatgcttgactacgaaccttctagtgcaactttgtagtctttctgcttttctagcctttttttgctcctacccgcttttttttttccttttactaccatcaccattatcaccatcctacaacacatctggctgtcatgtctctctctagatctgtttctcgggcggctagttctttttctcgcgtccggttggcgtctcgtcctgttactgctcttggccggtccattcggttctctcctatcgttctccctcgaacattctcgacatcaccttggatgcttgctaagggtatgtgtttgtctcttttgatacatgtcttcactctctctctgtctctaccatcataccgatccgtctgtgatctgtccagccagtacttctccttatgcgctgaatcgttttgttctacaaataatactacaaccaactgaaacacacctgcctcaatagctatcgacgacccgttgccggcagagccagatattcctgccgagtatgctgagcatatcgaaggtggaaactcgtatatcgacactggagactacgaaagtgctcgggattcatttgcgaaggccctcgagatttatcgaagtcccgacgtgttattcaacaagggggtcatggagtactgtctgagtacgtccttcctctcactcgtatgaccaatctaatgacgtgtattaagcgaggcatcaaagattactcgtgatcaaatctctgtgtcaaatgctcatgctagtcacttctcaacaaccttctttttttttacctagaggatcattcagccgctatttcttcttggttggagtgcattgcgttggatcctgagaacacggatgcacactcgagtaagccttcgagctcgttgtactaactcagaggcgtctttgactttgagagtctgatgaatgtatgtctggttgtcacgtgcttctctacctagatcttgcctctgcatatgtgctatccgatccgcctaaagcccacctggccatcaagcatcttcggtcagtcgcgcacgagctttaaattatgcatgtacgagagaagaatctgaattgatgttcttccttgtgctttaccgcaatttagtgcggcaattgagatccgaccgttagatggagagatctgctttaatttagcggccgttctggaagctagtacgttatgctttctgcatcagccagtatctgtttgctctcgtagttctggtaacccgtttgaatatgggtttggtctgattttttcttgcttctcgcagcgaaccaactcaaagagagtttagaaatgtacgagcgctcccgagggttgggtatcgctcgtgcagagcagaacgttcgatccgtatgtagatcatcttttttcccttttatttttgtcttttttctttgaattgagatagctcgcttgatagcaacgatgggtgttgatggttttcggtctgttgacctccgtatattttctcaggttggagccaagatcatggcctctcaggataaagagtgatctatattgagaatttagagagagcgctagggagatcaatagcatgtcgtttcatacgacatttcaggcgtcctgtctttatcacttctctcgcttttaatttcccgtcgagaaccgacaaacatcttggaggaggcggatgtatctttttttatgtctcacgagaaacaagagcggatgattccgtttgtttaagcatcaaacgtataccaatgacgttgcgaagcggaaaataaatccacaataccggtgttgtggttatcatcagagtaaattcatcaagtatgggtgatcgtgaatatgtatgcttaagcgttcgtagtaggtacgtcacagatccggtatgctgtacagcttgtatacgaaaccacgtggacttcggtctgtcacccacagcaacgctcggatcgaagacgatcggcaaaatcgaggcagcacacggataaataatcgtttgttccttcggtacccgagtacccgctctcggtgaaaagatcacatatctatcggcaactattattgcaaaattgatcccggccgatcgtcaggaacagagtggagagaagaggacaagaaaacaaggctgggccgtaagagaagctcgatttctgggcgggccttctctcatcgcggcatagccaacgttgttaatcgccgatccctttttcttgtccacgtcgtatgcccttccatcatctgccgttcgtttttttacccaccgatccccgtcgtccaggagtcattctcttgcgtctgaaaagatcctttcgttgtcgttctctcacagttggcacttgttcctgcgtgctcatgcttgcgcgcgtgaggttccatatgaatgcattcttaattggcctctttcctttccgtcacctccttaatttttttcccggttgtctatctaccttggcctacggagctcgtctcccggtatatacataggtttcggaagggctttttaaaactcgatctcgtttttttccttatttcattcttttctttttcttctgagatttcgctccctttctcttcgatctttgatccctgtccagcatttgctcacctctgtctcgctctgccgtgttctccgtgtttatgcgcaacttgccgctgtttgtctgtcaggtttccgggaaagatcacactgtaatttcaaaagcgctgattcgtccctcgaaccagctttacattttagactcccgccttatttaaaagaccctctgttcggctctcattctcagaatcattctttttaatttcctggtttgctccttgctgctttcttcctttccctttcttcgtcttctttctccctatccggtttactctataatacgtacgttttctcttttttagcaaagcctttcagaacaaatctcctcgattccgtcaccttttcatttccagatccttcttcacactaccaattttaccgaccatgtataacccgatggagccgtcaacaggcatgtccggaagtaacaccggaattggaatcccaccagacgtcaaagcagattccgaggagtcgacagcggggggttctttcgagacgggacaaaaccagagttcaataggatcctactcgagttcgtctacgaggtccagccatgaatcggatagccacaagtttgtttagcccccctcttttttggtccgcgttgctgtgttcccgttcatcattttgtctcgttcgttttccgcgtcacttgttccaaagtcgcgcgtcagtttaacaccccttttttttctttttttttgtcacccttcccccgcgaatgctgacgagaaacttgctttctttctctatatgctcagagtatgttcgctatctgtcgttcagcaaccgggtggagcgtctgaaagtggctccgatatgctctcccggttacctcttaacccggcacttattgtcaaactagatgttcacaatccggagggagattcggtcgatctgtacgtcatctcttttgcaaatcaaaacacctttcccacggctggagcaaaaacatacgcgctcacttcagcatttcattttccatatcaatctttccaaattcttccatcttcttatttctaactcggataacattattttgtctttactcaatcttatttctcttgtatccttcctctgctccatccggtcccagtgaaaacattctccctttcttgatatgtcatctcacccttctccctgcattgcctcgatctgaatctccatcgacaacaccaaacgaatcatcccgagctgcctcaatccctttggatcaggtccgagtgcctgggcccgatcccgccccgcaatcacccacccgaccagaactttcctcgtcgtcgtcgtcatctggctcgagcgatacaaagtcatcctcggcatcttcacccactgaaacaaactactacagagcgctctacggcaatctcgtctcttctgctttcacgctctcgttctcccaagattcgaacggaagacctatctatggccaatactttgtctttccggacgtgagcgtccgattcttgagagggacattccggttaggaatctcactctttaggattcgtggaccaggtcaattgccgtcgtcatcttcggcatcgtcgtcgtcctcctcccaagatatacttgcgtatactacgagccagtcgtttgagattgtctccagtgaagattatcatgcgcctggtgcgtccgtcttttctttctctttcccttgcatctccttgattccctcctcccaagtttaagcgtagattgatgtgatgtctttttatactctcaggtcagacaaccatgacggcgagcgtgattggccaaggtgttcggatgtattctcacgaagttaatctttagaggcaaggggctaagccgagcccaacccattcgacacaaatgagactttttatcaatcttctcagtttgaaccggttcatcggactccctccctccttcttcgaccccttttcttctcggaaagaaaggagacggaatcaaataaatttttccgtttttgatttcatatcaatcaaaaaatgaaatggaatgaaacaggctcgaagataacgacgatgatcaacaatagctccttgttctcctttctcttctttgattttttgctctttactctttatgtttactttttcggtcatgtctagtcctcatcacacttgctcctgcttttttccttctatctttcttggatttctctctgtcttctaaacttccttagcctggtttgtttcggtccgtccagagttcagttttgatataacatcttacattttattatttttctttcggttttcgttcttccttctcatctttctgctttctttcacttcctacttgcttcgcctcgctctgctctcgatatacaagatgtctatccatagtttgtctgtctatcccacctctctcttctcctctccgtctgctcatctctttggttcttgctcgttgacttattcataactttattcatcacgcgcatacacggttcccatcctgttttctttctttctcctattttcttaatttatatcatgatgagtgatctcaacggaagcaagcataggattcgtccgttcaaggcgaaagacacacgcatggacattatcaattatagaagtgaggagtgaggtggacaggcttgttcgaacgaaggacaacaaatggcatggaggaaagactcgaaggaatgaagaaggaaatggacgagtggtagaggttgattaagaattaaacatagagagaaggaataaagacaatagagaaagtcggtaaaaggaaaacatggtgaaagctatactctccgaacgatcgacgagtagctcaaaggttgctgtcctcctccgattccttcttcccctccatcttcacctccacctcctccactgccggtagttccggcactcgctcctgaccctactggaagtggtccgacgaccggaccgaggacattcgctcctgtagctgatttgagggagctcgtcaacccaaggttgatcaatgctagctttgcttcgatcgaagctacctctatcatggatgacccggcgtttccaccttcacctccaccgccactgctggcactgccggccaacgtcgagtttgagcctgcgaccgattggcttgatggatcgtagagcgctgcaggtgatttcaaaactggccgtcgaggctggaagtcatcgtcgtcgtcgtcgtcggcaacggccacatcgacttcaacataatttccgccttgatcaatgacattcgttctctgttcttgttgtcgttgtccttccttatgttccagcgctcgatgagtgtgaggctcgacattggaagaagaggagggatggcttgccggtaaagaagagtggggatgtccagtcggtcgattagaggatggcgcgttgggcgggggggggacagtatggaaagaagactctgctgccgccgtagtttccattgggttcggcatcttttcaatagcagaagatgtctctcgagacgctccgttcccaaagctcagtctctttgatccggcatttgcaacctgtcttcccgtccctccgttccaaattcccgtcctttctccaacccctgctccgttctcgcgcaactcatctgattgttgacgagcaaaggacatccctgccaaaggaggaaagtctgagctacttaactgactcagagaaccactaggaaggattgggtccggccgtctaaggtcgaattctggataattttcggatgaaacacaataaagttagcgtcgaggtcctgctttaggcattgaaagggagtcagacatacgttggttgcctaccgaccaatcaggccgaggaggcagaggatgatccttgggtggcgggatagaagctacatgggatgacgccgtcatcctcgaagcggaggagattgtcgaagactgcatatggagaggaagggaagactttaaatgttagaacacagcaaagaagaacaggcaacaagaaaaacaaaacatacgggtgaagaaggtcgatcattccccgactctctccttctgaatgcctctctggtcgaaccggaaccagaaccagaacccggactatctccccatccacctctgcctcctgcgcttccaagcggaccaccggaccaaccaccttgcctaattccgaaaccactgttccctgttccggagctgagtcgcctacttgaactcgtcgagcctctggagggtggtctgctaagactaccgtcgccgttataggacgacacgctagagcctgatgatcgatgttgggtatagatcgatgagcctgagttcgcactggtgaacgtcggagggatagggttcggtgaaccgttcaggttcggttgatagatataccgatgaggttgagatccgaacgaggggtcttgagagtgaggcggtcccgattgataataagccggccccgagcctgtccggtcacctggataaaacggaccatgtggctgctgttgttgttgttgttgttgttgttgttgctgtgattgataggcgtgttccatcgagctagaccctgaggatgagcctgccgagggcgtcgcgacgtaaccagagaacgatccattggtcaacagcatcggtgattgaacgaacccgcctatcgggttgactggcggacttgggtaaggatgcgcgccgggataaggcgaaggggacccagcggatcctcccaagctctgtcgtctgccaccggacggagggaatgtagatgtctgagggtgggattgtggcagtagagcctggtgttgagattggtgtggttgtgaatgcggatgtttaaggtgcagagattgttgcccggtgtcgtaaggaacagcaggaataaacacataggcctgaccacctcctgggggttgatagaacgcgtgggcagcgacgtacgttccctgagggggcaactgggtttgttgatgctggtgctgatgatgatgctgctgttgttgctgttgctgttgttgctgttgttgttgatactgttgatgttgctggtgttgtggagggggacgaaactgagaaggggtagtagttggcgggtatgtttgttggtgagccggtggtcgataagatggctggtaagacggctgatgggccggtggtctataagcagagcctccggtatttccacgacgatacgactgagcggatggtctgctagaatatccagatctggaggaagacgcgctagagtgagacgagtagtcgctcgagggtcgaaatgacgatggagaaggagaaggggaaggtccggtcctgatggatgcagatgcagacgatacggaggtcgaggagtatgtgattcgggagttggacacgctcgaaccagtggagctgcttaccgatggaaacacgaccgcggaatactctacaccatccgagactggatccggaataggaacagctatctgggagggtgatgtcgttgtcgtcgtcgttcctgatgaagaggaaacggccggattgaatccggtgaaaggatcgaactcgggagccagaggccggagtgaattttgggctatactcgaatgaaaggctggtcgagaaaagatgaccggaacggaatctgttgacgaggtcgacgaacttctcgaccggggtgggacgatagggactgctttggaagctccggcgccttcttcatcttccaccgggtttccaccgtcggttggcggggcgctggtggaggattcgggtgtctcgctgttccttccagacgacccagttgcgttcgataaactgaaaattcgctctctggcctcttcgtactctgcctgtctctcctcaaatgtcttgttccgtctggaagcctcattgggctcactggcaggagactggcctctcattggggatgatgtaccgtttgagggatctctacgcatgattttaaatccagtaggaggaacgttggaaggtgccgaaggaggcgcgagaggagcaatatcaataattcgtcgcgtcctggtgggtcgaattgttgttcccggaagaaacgataccatcagtagtgtgaagcgtggaaagagagagaaacgatgaggacaactcacaaagtcagacacgacccgtctccgggcagacggaccacgataggtttgccagcaccatcgctggtggccagcaagccaaggtactgcgcgcactggtagacgatccgacgatggaatgatgtggaaggattgaatgagactggcggtcggctgaagttttgaacaaaacaaaacaaaccaaaaagatataaaaagatagtgggtttagattacatgactcgtttgattccgagatttttctctttggacaaagagatatgtgactgaagaaggaagaggaaagaaacttcaagacggaagaaaaagaaaggcaatgaagattggacgtacgctgctccggacaatgcctgtgttccaagaaccaagccctccatctcgtctgccactctcaacacatagagcctatccttacctcctagagcttggaccagttgaagatctgccttaatctcacccgactccagtccgggcgatgatcctggtcctggtgttgatgcggagctgactaaggaggacgaaggaacggctgatggagaggatgatgactgggttgaccgagtatgagaagtcgaacccggagacgagaacgagggcggtttggatagaagagtgaaaggagcagaagaggttgacattggtcgcctgtcggaccgaaggttggaaagtataacagggagtgataaagattgatgaatctcttcagaatgggtttctgacgatgagatattaagtattgaccgacagaagaatgatcagtcgttgggctccgatcggtgaggcgacagcaaatcggccgatattcctcttgtcttgaaagtcgttggtcggaaagagtgtttgacgaaagtccttccttcctttcttttgtcctccttttgccctttttattgcctgcgaagaaccaaagaggaaggaaaattcgaaccggtagggcaaccagagtgaaaggaaagaggaaaacgagaaacaaaaaaaaaaggaagatcaacattcttggctcaccgtcggatctgactcgaatccgaacgagcccgcccatcggtcgaagcgagctggctacttggacgaggaataaagggagctagagattacggattggcctactcaccaaggcgtcgttcgtctactctgaactatgcagacagtttctaattctaactgatcctaaacgaacagaacagagtcgatgctcagtctgcgaaagtatgggtgtgagggtcagtgtgagagaaggagactcgagatggaaccgacggggagaaaaggggcgatggcgaaaaacgtgtaaccgtttaccgtaaccatggaccggggtgggggtggaacgatccccagtggtggtctgtcacctataggtagatgccaccagagagcgttagcaggaaagttcagtttcttttctctttccctctgcttctccctgtagctgcagagatcctggggatgaggacagtgagaacagaaggaaagagacagagcgcggatggatgaaggaacggtagcccgtcgaagatctgcttgccgagaagattatgcagaggaaaaacagactacaaccaagactacaggaaagactacaaaatataacgcgctggactagacgaggggccagtgaaacgtgtggaatggttacgccttacagcacagcttttgtgcttagtcattcaatgaatgctagggttactccctcctcttgccctcgccctctttccagaagggcggaaacgtaggtaaagagaagatcccacacaacgattcctggaaatccttcggtttcgaatcgtcccctggtcatggcacctctcaagattagattgaagcttccatctaatccgccatcatcagagccttcgttagttcaaccaactccagtctcagcctcagacgtctccactcctatccctcggcctcgtctgatcctcaagcatcgtccgtctcagcagcctaataagatttcctctagcagtccttacctaaaacatcaccaagacgagagagaagaggacgacaatgacgaggaccaagaaagcgaagaacacagtgaaagcgaaggagatcattcccacccatatcataactcggcatacgaccaagctccctcgtctgacagaactcgatgggaggaacccttggccagtagttcggacgcgtcgagcgaggtagagcctgaaccgatggatgtcgacgaggaggatcaggaacaagattccgacgaaagtaaagagaatgaggaagaggaagatgacgaggatgaagaagatgacgaggacgaggaggaagaagatgaggaagctacatcaagcactcgcgcttacaacgccattcatccttcaagctctcgacttcctctatccggctcatcccctgccttttcccagcaatctacaccggccgtcattccgtcacctatctcacactcaccaacattaaccaccgcatcgtctactactgctccagccgtggcgatgagattgcctaaactcgtcatcagaaacacgtcgaatgtggtccactctgacgcggtcaagacaccgacgtcgatcatcctgtccaggccggacaagccttcagggctgatcaagaaatcatcacgacccgatcaattagcttcatccgaatcgactaagaataccaacgaatcttccgaagaaccttctcgtaaggaagtaaagaaaaagaaaagaaaagaaaaagaagttcgctcgacgttggccccctggccgccaccaacagaaccatcccctgctcccccatctgccgaactatcctcctctttcgccccgtcccccgatccatacgcgcctccaacacc

SEQ ID NO: 2092 - DNA, 3167 bp, Xanthophyllomyces dendrorhous
ccatatctgccttcaacttctcagttttctgaatctcgtcaagtgagcgagactccggaaccaccggaagagattcacagttacatcgcaccgaatggcacgaaggcgtttgtgagagcgaaaggcgtcaatggacgaaagatcgttggcggtcaattacaaaagccactcaaagaagtgtgcgagagactattaaaagagattggtagaagagatgactatcagttttttcttaatcctggttcgtcccaatcttttcttcttctcttcttctttctcttgacatttttcttccattaggagaaagctcgaaaacactcggtctcatattatttaattatccttatccagtctcagagaaagaagtgccaggttatcattctattatcaaaactccgatgtcactctcagtcatggatcggaagctctcccagggattctatcaaaagtttgatctctttgaggcgagtcaatatatttcctcttccccttacgtcattagccttccgacgttctgacttgactatatgcaattcctctatttctttctgcgctttctctttactcaggctgatctccgactaatcttcacgaactgcatcactttcaatccaccatccactatcttctccaccaccgcgctcaaactattgtcgtggttcgagcgccatctaccaacctaccgagagcttatcttacccgagacagacaacagagaagacaatacccttcgatcaaggtctccatcggtatttgacgaacaaggcgagccttctcctgcgccttcgggtttggcggacgaggatggggcgatgacgcctacaggtgggaatggcctaggtcaggctggccgaaaacgtggtccttacaagacaaccggcggctctggttcaacttctgccagcgtcacgggtggagttgcagtagggggagggtcaaccgtaggagtagataaatctcaggcgggctcgtttgatgaagaaggcgtattaaaaggggcagggatgtttggatacgatccggttgtttggggagcaatccactggtgggagactggcggtagaaggttgaagaataagcgagagaccacaaagctggcatctagagggaacgagtatgtaccttgtatgccggacggatctagagatctctctgaatgtacgttggattcttctctcttctgtttcctagcttgtcctccatctaaatctttttgttatgtctgacttactggattgcaatcgaccaatagtggaacatctaactccaagtctcgacgtcttcctacggcgaccgatgtccgtcccccgattagtacccctgcctgctaatttcttagctacggacgctcgaccgatatcggtcaaggatatagcttctttgaatcctcttccaccgacatcggttcctccaccttctgacgaatgttacctcccgctaacgtcagacgagcttccacctgcttttcaagcatggaagtcatcaaaatccatcaccaccaccgctactaccgccgctccacctgaccgaccgtttgtacgacccccgagagatgagtccaggacaagaccgacactcgccacagattacgcgccttttccgttgttcccgctctcggcgtgtacctctcagtccctcaccgaggcttctcgagcgtcgtttatcgagccagtgctggctggtgtgagagcgagaggagggagtcggccggatgtaggcgacaatccggtcgaacaagctgcccggacagcaaaggaggaagactggatcagggatatcgtctacggcggccaactgggtgaggcgtatgctcggagtctcgaacgattcctcgaaggagccatcatccactcaggaaaagatcagcaaggtctgaagcactatagggacgactttctcaccggcaccgtgtgggcgggaggcgggctgaagtacatgcaggacgtcggttcggtcatgagggatctccaaggggttaacagatggacgagagagccaaaatgtcaggaacaggatgacgagagactttccttgaagaccgagattagggtcaagaaagaagagactgaagatagtcttgttaaacaggatagggaggacgccgatcttctgatgggcctctctggtgcttccacttccgcttccgcttccactttcacttctgcctctgatcccaccagcgtcccgacttccaccttcacttccatcactcctcctgagacaaaccctacgctagccagtgtccgctccaagatcgaccgagtgattcgagacattccttcagacagaaaagttcaagcggaactagcactcattcgctccctgccactctccctttcgagcctcctccgcggtccagatgactttatccgagcgatccctcccagggtgccgaagaagcgcaaggcagaggagaacgacgacgacgatgatgatgatgataggaagcaagagataaactggccagagaacacgttgaaggctgtaggggaagaattgatggattggattcaggatggttcgagcctatccgagatagacgatgatcgatcgagccgaatcaggttgttactcgttcgtcttttccaccttggccttctttttgaccgtctctgatatcttgtctcgagtctcaatcatatttcctgtctatttctgtttgcttgtcacacagctctcgttaatcagacgagctccgttgggtacgatcgaacgactcggaccgaaagacctagagatgtttcctcagggatacattcgaactcatttcagtcagattgtcagatagatgtcgttctgtctctcttctttcgtaccgttcagacttttcattgggcacataatcgatcgaatcacagatgtaatcatctatcagtaacaagaaccggatctatattctcatcggtttgcttagggcttatcaacggggggatcaaatagaaggatcggtttgatctcgatccgttctttatcccacttcggcaaagaaagcggcgtcgatggggaagagcgaaaggaaaagaaagtgcgagggaagcgaaaggaaaagaaagtgcgagggaagcgaaagaagaaagaacgaaagaacgaaagaacgaaagaacgaaagaacgaaagaacgaaagaacgaaagaacgaaagaacgaaagaacgaaagaacgaaagaa

SEQ ID NO: 2093 - DNA, 68372 bp, Xanthophyllomyces dendrorhous
  misc_feature (35298)..(35307): n is a, c, g, or t
agaacgaaagaacgaaagaagatgagtcatgttcagttttcgtgcgcacatcaagagagctgataagacaatacagactcaccacgttaccggtatagtacgggtcactctctattatcttcctgacctgttccatcgactcgcacttcaatacgaacatactgccattcaagggaaacggtggggaatgagggactgaatgcccgtcgagcgtgcctcctccgaagactgtgcgcatcccccccaaaagaaaagaaaagaaaagaaagcaacagaaaaagtcaggattctcaagcccaacctatttccctagactttcaagctggggctacccacagagacgaacgccaagactagaagagactgaacttaccgaaggagccgttgtctgaattttgcttcgttatcaacagatgttcagttcggacggccatccgacgggaaagggcatgttcatcttgctggtcgggtgcccagatgacaaagttactcagattgggactcattgttcgtagtggttttccaagaaagaataaagctggtcgtgtgatatgcatctatggcagaggcgactactatcactgctgctgctaccaccagaattcactagagatgatcaaccagcacaacacgttatgaaaagtcgagtgtcgtgtacgggccggacggccgatgagtcacgcgcagcacgcgtagcccgttggccacgataaccgaagccctccacattttgcgtaaccagttacgcgaccgttctgcgtcatagatgccggaacgtcaggtacaaaagcttgatctccggccaagttctccttgattagagcaaccactcgccggatcattcttcttgaatctatatcatgtctaactctgtccccgagctcgctaaaggatcaaaggtatcgctcgtttgtggtacttgcactctttgccgttctaagctgattcacctctgtttgctccgagtctaggtccttgtttctggagcttctgggtgaggaattcgtcattttcgtctctttctctacagcttgcgctgactaaccagagtcattcacgaacagcttcatcgccgtccacgtagtcgatgagctcctcaaggatggctttgaagtcgtcggaaccgtccgatctgcggccaagggagattacctcaaggatctcttcaagggaaagccattctcttacgtgatcgtcgaggacatcggaaaggtggggccgttatcttccattgcatggtttgaataggtcgtgattcgatgtctgacacaactattctgactattattgttcaggatggcgcgttcgacgaagccgtcaaaggtgtccagggtgttgcccatacggtaaggccaactatagcacatgacccatgatctaccggctatcagaacaagatctgatctgtttgccttgcgctctttctctcacatgtaggcctcgcccttccatctcaaagccgatgatccggaagagttgatccgacctgctgttgacggaaccattggaatcctcaagtctattaccaagaatggttctgacgtcaagagggttgtagtgtgagttcgagttggagccaacgtctgggcggagatagtatgcctctcgagggtttctctcatgtgctgaaccaactcaatttattctgctttgactatgttcgatctctagaacctcttcggtcgctgccgttgccggagacaaaactgctccttacacctacaccgaagatgactggaacgatgtgtccatcaaaatcgttgaggagaaaggcaaagacgccgatggcggacacaagtaccgaggtttgtctcaactccgttgcctgattttgtcattcggaggcatcctgcttataagtatgtctgtgcatataaagcttccaagacgctcgccgagaaggccgcttgggactactccaaggagaacaatgtttcttacggacttagtactatcaatcctccattcgtctttggcgtatgttcttctttgaatttcttttgcccttttctacatcctggtgtgctcagttgccgatcgctttcttcattctgttcatagcccatcttgcaccaggtcgacaagcctgagtcgctcaacacctcggtcgccaacttttacggtatccttaagggtagcaagaaagaagaggatttacctggacctttcggaaactggattgatgttcgagaggtcgctttagcccatgtcaaggcgcttactgtgcctgaagcagttggcgagaggtttatcatctcggccggacccttctgtattcaaggtcagctggaatttcctataaatattgattggtcttgcgtatactgatgcgactcatcttattctctgtttaatttgactccgacatagacctgaccgagagcatcctctcgatcgcgcccgatacccctggagttcccaagggtaagccaggagcggccaaggaaacgaccgacccttcaaagatgaccgtctgctctggagctaaagccggaaagatcctcggcatcaaataccgatccattgaggactcggccaaggacagtacgtataatcttttgttctttctggtctgttctcatgagatgccagcagtactgatggctgatggttgtcctgttgatgaactctgctcttagtgtatgattctctcaaggctaaaggatggtaatcaggtttcctccttggtggcctgtacaatgtcaggccgtgtacgcatgcgtatgtgtgtgcggacggttgtggaacctctttctctagctatactctgtttctttgtgaattgtatctatcattatggctgtatcctcgtcttgagatctgattgatgtcgaccagcaaagagagatgataaatgacgaccgcggcgagatgtttagatagaattcgagccaggtcagctgcatatctaaatatttagccgacattgccgactttgtcggagagaagaaggcagcggagagagaatcgcaaaacattcatcctcttcaactaccatctccatccctcatcctgcccatcccctgtttagacgcaagccaggacaagaagatagaaatgcctctcatcaagattgaccttatcaggggcgtgcgatccatgccggagatcaagaagatcgccgatgtcgttcaggaggtcggtggactgattatcttttgtctctttttgaccgttcctctgctttggtcttactgaacgagaatcgctgactttgagagtcttctggttatggatgagggaacacagatcatgctcgctaaattcagggcgccgccgcgaggtttgtccccttcgtctcctcaaagtcggcaccttggctctcttgtctaactagatatccctatttcttgaacgttcgggaacaacagaccgataccaggtatgatagttgttcgttttgtgtgaacgaaaggatctaatgaattctgactcgaagcttggtcaaacaaaattacaaaacacccgatggaaaccggaccgccagattatcactcagcacgaagagggcgagattatctttgaggacacggggctcaactttgagcgaaccaataagattgtcttcatccaggttcgtgcactcgattcacaaagagaacgatttgatcgggtacagcttggcgaacgctcattcggaattgtgcatgtgtgtgcgtgatgatgaacgatgggggggtcttcgaactggacgtgaatcgaacgatcggccaaatccgggcgcttagattttccaacaaggacgaacggcagaaatgaagatggccatctataaggatcttgcaaagagattgcatcaggaatgcgagtcagtttttggccttccacttcttttcgtccatttctttcctgtttctctatcttgtttaatccctttcgagcatctgtcgaagaaggatgctcgatcggttattgctggaactcaagaattgaagaagctctcccgctctcccttatccaacagcgtccctcctaccgacttgatggtcagctgcaatgagaacagttcgttcattccttctttgcgcgaaatttgaaaaatcgcaaaagtgtctgcgctcatcaccgctctttccttctcttttcggtgttatcatatagccaaggccgattggtcttttggaatgggacgagctcagttcttggagggagacttgtaaagcaagaagagagacaggctcaagaacaaaagatgattcgcttattgaaggtcatccgggggaagctcgtggtcaacctttgtttcaatttttttgaggaacgtactgtctagaagaggtctcaaggtgtcattattcgtcgatttgaccggcttgctgcattctgcatacttcactttcctcaattataatgctgttcgcttatctcctcggctgtggcctcccgtgtgtatcatattcaaatgaaagaaaaagtttgcgtaggagacatcatggtcgtgttcgacttacaaactacgaactcaacgtccagatatgtattcctgttcgactgatcccaacagtaaactttgcgccatccggactgatgctcacaccgatcaattcttcgccttcggctataatggcgcagtctaagatcgagtacggttcctgcggtttctcaaattgaggtacaggttctattgccgggagaaaagaatcagagaagcgtataagaatgttgtactttcgaccgacaagaaacatctgattgatacagaaggagtcggaagcgcgaagaaaaagcgagcgaacctgtttttagttgcttctgcttcttgaactctttgcctggtcttctgtgaggttctctcactggcgctgaatcatctgaggcaacttctaaatcactatcctccctttcttccttcttttcttggattccttcaacttgtgaactgttcagatcgctcaactgactccttgtttccaattcgttctcttcaagcacctctttattctcagtttcggtggcgactaccggagttccagcgccagaaccagatccaagcggtccagagaccaaacttttcttctgtttcatcgtcagaggcgggataaatccatcggatgctggcgttctatccggatcaaacaggacaagtcgaccgatcagtgggattcctatcaatgagcttgtaatttctgatcccggacgaccggtgggtgaagtactgatgaacggtaggtgtctacccatgagcgatatccaatagggttctggaccgatgaacggatgaggtatgtcggataaagcgactggtgaagttgacggatccgggagggtcctttgaggaccagcctcgatgggagggagatacgttgctaggatattcatggatccttgtcatgacaataaagtgtgttcaacgagaaagttcatcccacaaccagaaagttcgtaagtttactttttctccccgagcctccttctattctctctatcatcctctttcgggagggatataagggaaaattaggcagtacaagaactcactggatttagattccgcatactggctaccgatactctgaaggccagttccattggactctgcgtacctgacgatcggcttttcgtctgtccctagagggaaatgtcgtcttaatcccatccactgccacttgatcgctttcggtgctgggaattgctggtacgagattaatgtgtcttctccgtgccttcagaagacgaaacacaacacaaagtgtttcatgacggttatcatctatcgaacgcgaaaagaagatatctaggttgtcagaaaaaaaagaagagacataccagagaacactattgatgattccatcatgaaggagcttagtggaaaagagtggcgtatagcctataaacaacttgtgcgcgcccttaggaaaaggcgaaggaagcttaggtagaggccaaatcttgataatatagtcgagctagaattcaatcaagcattacatcgtgtgtcagaaaacgaagaaatcagcttcaaacaacatagagcttaaggaagagaagaaaagaaaagaaaacaagaaaacaagagaacagaaaacttgagacatactcctccggttactagcagaggaagcgtaggatgaaagtctaaacacgtcactccttccaaatgacctccaggggcctgtccgatgagaacagctatgagaagtgaaccctcgttgccttgagcgaccgaaggagctctataagccccaacagaaggttctgatccgaaaacattccatagacggatagttgtgtctttcgaagcggaggcaaggacctaaagatacagtatagtcctgggtttcagaagtaggttgagtgtatcgagtactgatagaaagaggacgtacgtggggatgagaagggtggaatactaaagcgtatacttcctatattcattcgaaaggtatgtagccccagatggttcatatcagcacaacatgacgcccctacaggaaaaaaaaacaagaggatccaacagacttctccatgtcctctgagtactctgagtctctccgcaggttctcccggatctacgctcagcctccaaacatatattaaattacttctcccacaaaacgccacgatgggctgtaatctaaccggatcataggaccaggcaaccgtgtagatttcgtcttctggttcctgaatcttgagaaagaccttgtagggcgattgtgctgtgagcctgaggaaaagtacctttgagggagaagatgagaggtagtgagctcttgacgaccggtttagatgtttggtcgacagaaaaagtcgacagaagagagagactcactccgttggattcaacaacagctgctacattagaccattctttcaccaagtcgacccagcgagactgccatggccgaagtgtttgcttgctgatcattgtaggcgtgatatcgaatcgtctgagggtttgagggctccatggcgagaactggacgtgtcgaagtactttctctgttggcggttcgttctatgtcagttaggaacgaagacggatgaatagagaagcagcacggtcggatatcaagaagaagacgaatagcgagaaataattcactgatcagacacatatgattcttaactctctacttccttcagccacacaagctcaaaaagacagagataatcaaggaggacctaccggctgtccatcgactgatggaagcttcttcttccgttccacttgcgcgttgggttttcgaggtgcataccacgctggtctcgagacgtaacggaggttcagtggtcctcttgcccttcggttgacattatgattgacatcaaccggtggtgtcggtaatggtagtagtggtgctaacgaggaaggtatggggtgactgttgtttgacgaagctgtgaaaacaggggtaagggaaggggcagagagagatggtctagacatcctattcgagagatatccagctcttgtttctttcaatctatgaccagcaagagattgagcagttgatgatggcgatgaggacggtttataattgcagtggttgttgagaaagaatagacgcgaccaaaagagaaaaccgacggttctgatcctcttatctaatcagcgttccgtcctaggaaactctcagatacaacttcaacatatgtgttctcttctgtctggtcaagatttagatatgacgatataaaccatgacatgtatattctctacctacaaagcgtaactatcttagcaaaagagcgaatgggggtgttgggtaatggagggaaataaggtgtgaaggggaaaggaaaagtgaagcatcaaatcgagggagatgggagcagctataagataatgatctacctcttggcggccctcttctcctcgagctccttttggtaggcagcctccatctctcgctgaacattgggcatcaccacagtgtgctcctgcagaatgagattaagaaaaacacacacagttcaatatcaatgtaaacatcaagatacttccttttgatacaacgacgatcgtatcgacaaagaaagacgaaccttgtactccatgctgaactctccctttccttgggtcattcctcggagggcggcagagtatccaaacatgtcattcaaactgacgtcaaccagggcagtgaactcttcgtctcgagtctcggtatcgtggatcgttccctttcgctggttcaagttaccgataacgtttcctgcgaggaaaaggagaagaaagagagtttaatgcgccgctcttgattgacgttgctctctgctcaggtctccccaaaagaagaagaacaaagaaacagttaacgcataccttggaattcggtgggggcgatcacctcgaccttcatcattggctccaaaatagcgggctttgcctgcttgaaggcctctcgaacggatccaatggcagcagtgacgaaagcaagctcggaagaatcgacagcgtggaagccaccatcctcgagcacgtatcgaacacccgtgatgaccgaaccacaaagaggtcccttctgacaggcttgcttgaaaccctgatagatatgaaacgtatacagcgagacgtattcagtttctcgctttctattcgtttgaaagatgaaacctatttgatgaaatatgcaaaacgcaccttctcgatagcaggcaggaacccgttggggatagagccagcgatgatctgagactcaaactcaatatccttgctcgtttctggatctctctccattggctcgagataacccttgaccttggcatactgtccagatcctccggtctgcttcttgtgaatgtactcgaaaggagcacgctcagtgattgtctctctgaaagcgaccctgggtttaccagtggtgcactctacgttgtactctcgcttgagtcgctcgacgtaaatctcgaggtgaagctctcccattccagaaatgatggtctctccactctccttgtcgacgtgtactcggaatgtagggtcttcctttgtgaacttgttgagagccttagaaaactgaggagtctcttttccagtaggggtcaaagcgagggagacgacgggctcgggaacgaacatcgaggtaagagagtacgaggtctgcccgtcgttgaaggtatctccggacgagcaatcgactccgaacattgcacaaatctctcctgaaccgaccgaatcgacttcctccatatcagcactgtgcatcctgaccaatcgggggaccttgatcttcttgcccgttcgggcattcacgatcgttcctcctcgcctcaaagtaccctggtagatcctcatgtacgtcaactgaccaaatcttccctcctccaacttgaaggccagaccgaccaggtttgcatcggctgcagggacaagcttaactgggggagcgttagcaggcaaactgacatcgagggcctggttatggacctcggatgggttgggaagatacgagatgattccgtcaagcatcggctgaacaccggtgttggccaaggcggaaccgaggaatactggggtgaaggaaaggttgatggtggctcgtcggatggcgccagtgatgtcggtagaagagattggcttttcgtcaaggaaaagatccgaaatggtctcatcaacctcggcgagctgctcgatcaactcgtttcgcttctctttagcaaattcaaggatatcagcaggaatttcgtccgtctcacgaacatttatcctgaacacaataaatacaaaagggtaagtgttaaagggaggaagagatatgagcgcgcgcgcacacccgcacacccacacacccacacacaacaacggcgaaaaccaaagaatgaagctagacaaaccctttgtgaccctcgttatagattgccttccacctaatcagatcgaccacccccttcagctcactctccgaaccgattgggacttgaacagcggcagcaggcttcttgagcttgtttctgatctgctcgatcactcgccacgggttagctccttgtcgatccatcttgttgatgaacgagattcgaggcacgttgtatcggcgcatttgtcgatcaaccgtgatggtttgactctgttatgagggtgttttttttgaggaattgttcagtacaaattactggacaggaaggataagccagtaagactgagaagacggaatgctgctcacctgaacacctgacactgcgcacaataccaaaactgctccgtccaacactctgagcgctcgctcaacctcgatcgtgaaatcgacgtgaccaggggtatcaatgatgttgatgttgaagttttccctcttctcgccttccggagagtcttttccgaagtgctcgggtggcacggcatcccagtcgcagaaggtggccgcggactgaatagtgattcctttctctcgctcgagatccatagagtccatcttagctccaacagagtctcgccctcggacctgtttgcagagaagttgagaacaaagtgattcatgtatccatgaggttctgtacagtcgagtcgtgattcaaggaagttcgatgcgctgatgagcgggaacaagaagaaaggatatacacacttcgtgaatatctcgaatacgaccagtgtagtagagcactcgctctgtcagagtggtctttccggaatcgatgtgggccgagcttcacgagtggatgaagaaaaaagaaacatgagtgcgtaagttctgatgaaagcagatacctacacacatacggaacggaacgggccgattcgattggcagataaaatcaaggcaaggaagcccaaattcccactcacattccgacgttccgctgcctcgagcagaaagcttcatccttcgcggtcatattgggtagaacaggttctggccagacgacctcttccttttctccatttgcggcctcggtagtggccagtctcttttggaacgaggaggctccgatccgagaaatggaagaagagagcctggatgtgaaaagaggcgctcgaattcctgtggaaacgagacgaacggaaggaacaactacaggccgagagacctgagatgggatccggagagaccttgttggcaatcgtctagcgaaggtggacatagcactgcacactctgtatctaatgaacccaagggatgaagagcaactctttctggacgagtgggatgggaagaaaactaggaaggaaaaagcggatgcgggggagacttgggcaaatcgggggtaaacacgtgacatataaacacgtgacacttaaccgaatagatgaatcgatagctgatagataagcttatcttgggaccgaggaccgcgtttggcaagtcacactccatttggccatttaagacaacgttgagcgatctcttggactcttcccgttcttccccttcttgtctcccacccatccactcattcacccacccacacacacacacacacactctgatacacacacatattatgctcctttccacacttcttacttcatcactcatccttcctctttctgctgtagctcattctcattcccactctcacgcaaactcgagaaagaccttctcgttcggtccccaccactcccacgcaaagttccagctcagcgcttcgccttccaacgggccactcggtggactcgtcggtagagatgttagatcgcctaccgatgtggctagagttcttctcgaaaaggaacgaggaaaggagggtgtcgattggttcctcagagatgatgtaagtgggcacacgaggacggctgtgtcgtttattggctcttatcgcatcatatcaatcggtcacctccgctgatccgttcctgacattgtctatccttgtttctcgtatctcctctctctttcatcagtcctacaccgaccggaatactctgatcactcatatttatgctcgacaacttcttcatggccttgaggtcgtcgatggagatatcaacatcaacgttgatgcatccggaaagatcatctcttctggaacttcggtaagtttatatgagacttgtgcttgactcgacggatgacacgcttagctctattcctgttcgtcaacaaccagttctacgaaggatctgctcccactcctgatactcttgatcatatcaagtcgcccgccgatatcaaggccaaagcggcccactgtgcgacgctcacacagaccctccggtccactactgagcacttccgatctctccttgcctccctctctcccgaggaagccgaggaccacttggttcagtacggccatgaccagatttcatttggaacgcctgacgtttatgatgacgagtcctccaccaaggctggtgttgtctccgaaatgggaacattcgaacttgacaaggtttcccagaccgtcaaggagctctcgaggctttatcaaggactctgcccctctcccatcaaggggtctcttctcgagactttccatcaggctacatcgttcgctgacggttctatccagtccggagctggaccagctctcctcaagttcctggcattggtccacccggatcaaagcacaatcgctcagcttcattcgaacccttcgaagatcttgggatccctcgagtcggtgtttgaacatacactcatgccttccggtcactcgaggactaccgagctgctttctggagctccaggagtcaacggtcccgctaaggcttggatgggatggatccaggaggatggcggcaaggacgtccggctcgtatggcgattcgaggtcgatctcgggagctcctggtatgagggagccgtcgaggttgggggcgaccgaaggattctgaccgccatcgactgggcgagagatgctcctgctgttgctaacaagggaaaaaaagggaagactcctggtaagtaacctgtgttgtcgtttccatcttgatacctacagccttactgactctttagcatcgcttccttctttttagccgagccggttgtagccaacgccacatacaacgtctggccctggggagtgaatgatcctgtatctggcaagcgagaattggtcgaatcacctcatgatagtatcgcttcacctgctgggtggcactcgatcccgctcaacagctcgcccttctctgcctcgacgcctggagtgatcaacaaagacggatggacaaacaccacgactacgctcggcaacaatgtcttcgctcaggagaattgggagggagccagcaactgggtgaacaactaccgaccgttgggattgaacggaagcttgctctttgatttcgagtatggagccgaggagggccttagaccgttcgtactgttttgttctggaacaatcctgtttgcttccgctaaaccaagttttcacaatctgtcttcattcgtcatgctctatcagttctgagtacatcgatcttgcggtgactaacttgttctacacctgcaacaagttccacgatctgatgtaccgactcgggtttgacgagctttccggaaacttccaggagtccaactttggaaagggaggccgaggaggcgacgccgtcatcgccatggcccaggacggaagtggaacgaacaacgccaatttcgctactcctcccgatggaacgcacggccgaatgaggatgtacagctgggatgttgctaccccatggagggacggagaccttgaagctggaattgtcatccacgagtttgctcatggaatgtctacccggttaaccggtggtcccgccaactctggttgcttgggttggggagaggctggtggaatgggcgaaggttggggagattacctcgccactcagatcaggcagaccgatgcgaccacggaaggcaagggtaagaacaccgacttccctatgggttcttgggctgcgaaccgggctggaggaattcggaactatccctactcgttgaacgagactgtcaacccgtccacttacaagactttggacaagtcaggctactggggtgtccacgctatcggtgaggtctgggctcagattctgttcgtcatgaccgagtctctcgtctccaagcacggccactccaagacgcttttccctccgacgaacacttctgtgcccaacgactactatgtcaagacggccgagttcaacgctcagggcgagctcatcaaacctttggtgcccaagcacggaaacacattggctgttcagttggtggtcaacggcatgaagcttcagccttgccgaccttcgttcttcgcagctcgagatgctatccttcaagccgatgaaatcctcactggcggtgagaacgggtgtgagatctggagcgcctttgcctcccggggacttggaccagaagcccagatcattggatctaccccttggggtggaggagtcaggaatgaggactacgatgttcccaagggagcatgtgggaagtccaagaagatcaattagtcagattggtgtccttgcctcgtttttttccatagaccttgtttctagatttcctttagactcgttttcgaatgggctgattgttctaggtggtgtgtggactttgtagtatacccttttctttttgttctcactctctcctttcatttttactcaaacatgtagcttctgtgtctgtgtctagtttatggttgtggtttgtgtatcgcttgtgtgttccgttcttttcagcatttgatttttctcatagctttctgtttgtgactgtggttatcgatgaagactatattcgcatcgttttctgccttttgccagccgcgagatgatgcccgaggtctgtcaacacctaacgtgcacttgagtcgctcttgagctttgcgccttcttctttctgcaacatggagtctgatagcacaaatccatgctcagttctcacaaggccaccggagctatcacgaagagctaggtcttcgtccggaccatccctctcttctagactcgtcctcacgcttgcctgggcatgctcgacttgcttggcccagacagtcatcaccaaccagacagtcaaggtttcgatcccttcactcgattcttacctcctctcttcttcgttagacgttccgctactcttatcaacgagcgaatccactgatgtcggaagctctatcaactctaccgaccagcagccagagcgtgtctacctgagcttttctttctgttcggccttctccgagtcagacgctttcccttcgatctttgtgagcaactcttcaggggtgtcggtaccttcatccagctacctcaccaaactgggaagttcggactcgccttcggatgggtggaagagcagctcgacggacggagtgtggtgggtggagttgtcggaaggctatggaaattggacaggttggaggacaggtgtagggctgtcggttgctgtctggtcgaacgtcggcttggctggaacggttgagggtgggtatgtagagataggcgtgagctcatctggtaagtcttttaggctttcggcaggcaagaggtctctttaaaggaaaggagaaaatccagagaaagacaatttgctgagagcgaactgtggatgacttttatctccaaacattcgattttttgaactcaggaatccttcatacaataacggacagtcttccagtactaggcgatacgaccaattcacatgcactagtgttcactcctgcattcgactcagcgaacggtactatagctcaacagacctacccgaactatactcttcctccaccggtctttgataaggatataccaagttcgattccaaatcaaacgctgtatgtgatcccgacttcatctttcaacgtatcctccgggatgtcgctctcggtatgtttcgttcgttcgaactggaattctgtaggagtaaagcttcttgaggacaacaggacaacaacgttgaatgccacagaggacggttggagacagcaagtggtgttgagctcgggtgtaagcacggagaacgcagggctaaaggctggagaaaactacacgctttggtcttttacggatacctcaacttcgcttggtgttgctggttccggccagctgagcgggccgatcatgtttcgaatgaaacaaggtgaggtccttgttgcgtgtgtttctaagtttgttttcacgttcgagactgtttccttgactgacccttttgctttctcttgtgcggtaatgggttctcctctcgttggcagacgggttcccctgtcctttagtacactccattcagggctgtccgacgataagctacgctgcggcaatctcgttcgatggttcggatccaacttcggtggtgacatcgcttccttcgtcctcgaatgacacgttgacggagatgctggctagcttttcggccacattaggaacgatggcttgtggcagagacatgtactcgccaatcagcacttgtcaggactgttactttgtttatcgaaactggctttgtggctctttgtttcctcgggtttggcctctttcttctcctcttgtcatggagtttcctttctatctgagcgctgaaagaatcaacatattcatcttcgttctttcatagtgtggcgagactccgtcggcggatgatcccggttcatcgaccttgattgaacgaacgcccagcaatccacgattaccggcgagcgtattatctccaccttcgtacacttaccaagaacttttgccctgcttggaaacatgtcacatcgtggacaggctttgtccggtgttcctcggctttcgctgtccgttcacccaaggcggtgttacaggaaacggtacagccaatctaagttatggggtcgacttggttgatgggctgcatcaaggtgagctggacgggcttggtccgggtgatctaggaatgagcgccgatcgttggggaaataagcggtgcgctctttgggaaggttggtgggcctaagaaagtgttagatttatcatggcgagtatctcaatgttattcgtcggtgaattctgtttcgagcactgtttgacgaagtttcatcactagggttatccattgaacatcatactaaatgaagaccttcgatgggttcatcttccttctgtcttctacaaagctaccatcttgattgatttttgagtgtgaacactggttgtgcgcccaactcgtcaaacgttgttgaactttcgagaagacatcctgaaagactgaacgaacgttctccgcacgaccgtcgcatagttcttccatctctgcgaacgaaacgcgaagagtggtgcgatttgacgaaacgaaagtagtaacaggcaagatagagaagaatcaactagatcgcttttgggctggctggcttggctaagcttttctaagctgagtctggactagacgagccggaacaacggatgacgatcacgactgcggacgtaaatagacgtacgcgagtcgaaattaggcccttctctcgaaataagatagaagaacctctattctctctgccatgcgaccgaactgtcctatgaacccaaaactctaagtatgtttgcaacgagggagaggaagaacagaacccagaggcactgtataggttgatttgaatttcaatcatctcttcttgagcttaatcagtcgatccttcatacaaaaatatccttattcgatcgtttatggttctgtgcaccaagtctttcatttatacgggtttaacctctcggggttccaacccaggtcgagatttgactgacttttcattattggaggatgaggggtaggaaagcaagatgaaaaactcctgatcacctttgtcaccttctccagattgaacaaggggcaacaagccagaaaaagatcgtctatcaaagggaagctatcaacgggccgattagatgggctgaatgttccgaatttaaaccagatctttctgttccgtccagtaatcttcagacatccgtccttactcactctacttactttacttactcaactaactctctccacacacaaagctcgtcatcgatgactggccgggttctagtgtgtttttaacatctcccttcacagggttaacattctacgagagaaatccgaacgttatgtcaattcgaacgttgtttgtttcctttgacgctgaatcatctcgccatcaccctttctctccctccgagctttgatacaagaaagtcctgaaaaaagtgatatgtcaaccttaacttttttttaagagtgatctatagagaggaaaactgatgggttcagacactcatttcttgctaaccagccaagctttcttcggctcagctgactcttttcctggcttatccgcttgctcactatgcctttcctacaagcttcaatctaagatccgaatgacgatcagaccagattgtttataggtgaatcttcttgtttgggtaaaatcaataaatccgactgaactcctgatgttctctttccctttcccttttcctcttcttcttttctttttccaattagcttctgtttcttgtttcgtttttagtggctcacgctttgacattctagtccccatccgatacgatccgtcgtcacattaccccggcatgatgcagaatggggtgaacctaagcacagaagcggacccccaacgtcgtctgcttgacttcacggacgaatatggtcggttggacgagaacctcatctgatgttgggaaagagcataaataggtagctatagaatgggttgtcctgagtttctttcttcttcatctcatcttcactctcactctcactctcactctcactcaaacacacacaagcacttactcttaccctcactctccaaacttacccacacaatgctcgtccttcctgccatggccatgttcttcggagcatcctccgtccttgccgctccggcagctgtagttgaagaccgagccctccttggtggtctccttggcggatcgtctacctctacctcttccgctaccagcggtctccagagcttgacttctaacttgctctcgaccgtgaccggtttggtgtccaccatcgagtctaccgtcagcggtaccgacgcggcctccctcctcaatgtcaacggggacgtcagtaccgatggactcacctcgaccgtcaccggtttgaccagcgcattgaccggcgatcagatctccaccatcacctctgctcttgacgatattcctttggtcggtcagcccctccatgatctccttgagaccgtcctcgagctcgtcaaccagctcggcttggccaatgtcgcttccggtgcgctagcttctggcgcctctggttcctcttccggactcggaggtcttcttggtggacttctcggtggaggagcttcctcggctaccaacctccagaacatcatcacccaggtcgtctctggactcagctcggtctcttctggagtgtccggtgcctctggctccaccggcttgaacgctgtcactaccattcttgacaccctcaaggacagcactgagtgagtttccattttgatttcagaataatctgatacgctcgaggatctgatactcatctccctgctcgtttacagcaccaacctctctggccttctcggaaactccaacaaagtgagtgtgtttttatttgtagaatttttctcattcagaaagatgtgcgcttaaagaccgagcttgacctcttttttcgttttctcttcttcagatcgtctccggcttgctctccactgtcaccggacttttgggagccaacggtctcctcggtggtctcctttccggacttggactttcctctggaaccagcggccttaccagccttctctccggactcggacttgactcccttacttccacccttggcctttaaataaccttcatacactccacaatccgaaatgtcttgcctgttttgttcttcctccgatcggctgaagggatagtctttgaaaggtgatgtggtcggtgacgaccggcctatttttctttcttctattgattgttccaaagcgtacatatttgtagccctgtctcctcttctctcctctcctctccttatcgatctgtttgtccgtttatatagcccctaggcttgaatattgtaatacgttcatctgtcttttcatctagtctatccaattattatacattgcagggtacccacaaaatcacgtgttgcttgccagccacatatttgcatccacaagcacagcccactttcgttaccccggcccgtatagaaacgtcatagtagccaatcaattgtatattggatatcttcatcgtgtgttccatcatcgatcgtcgatcgggcccgttctagcctgctttcttcatccctggctttgtcttgccgccagagttcatgccaaagatgacgatggagcatgattcgagatgaaggcagaagggacttgagtttcgggttttgtataaagatacatctgtctctcagtatttctcctcttccttcttttctctcctcttcttgtcaaacaacaagtatctttgacactacttccttacttcgaaaagaaagagacatgcctgaatctgagaaagagtggagaaactcggcaccatacgtgatcgatgaggagaccgggttgaagccaaaagacttcaacgtccatcggggcacatgtttctgtaataaggtcaaatggggattctccatcaaaggttcgtgtcgatcgccttcctccttgtatatcgttgtcctcgtttggttcatttgtacgaaggaagactgattttgttccttgtgactcctctcttcttctcgtcaaccttgaatctaaactcataaatttctacagacgccttagactcaaaggtatgagcttttgatgagcacaacctcctgtagacatagctcgcttacttctctcttggtgtcgttctttcttcttttatttctgttctcctttatctctcccgtcgttcaaaccgaatagtactgtcactgcaccacctgtcagcaacttcatggagctccctaccaatgggctgcgatcttcccaaagaataagatcttgtttgataaggagtcgatcgattatctacagttctgtcagtctgactttgccctgtctgtgttccatccattcatccgtactgaccgggccgggaacctcttcggtttaactttccactgtaacgccttttccccttgggtctatagacaactccaagactcaggaaaacagacatgatatgccttgcaaggtagcttgctcagattgtcactctcccatcatggacgaaggttcgttctcgctcgtccctaaatttgcctgtttcctccccctggtccaccgccttatttcatccgtgtctgatcggattcaggcctacaccccgataaagctaacgtaaatgtcttgcgaattctggactgacatcctacaggtcggaatatgtgcttggtgttcccaacgttggttgaagggattcgaacagacagagaaacggccaaggcgttcgaagtaaagtgtcatatcttttatgacagacgagtcgagttggtccacgacggtaaaccaaaatgggccgaggccaaggtacgtttctaatgcctattctagtcatttgtcttctttttgcgctgttgtcctgatagccacgcttcatcgtttgaaccgtcggaacacggctttttaggaggactctgacttattggacgacgatggcaacaagatccaggatcatcaggatgctccgaggaagaagaagcgcgatgaagaggaggacaaaaaggaggacaaagaggataaggaggaaaaggaggacaagaaggacaaggatgagtagtgggttgagggtcaattttttctttcttttatccaagcaggttgtaaagggttgaagggaatgggtgtcatgggggtttataagacacaaaaaagccatacgattaacaatgtatcgattagcatgtaatctttcagtctttgcgctttccttctctgccttgccatgttgttcacaattagccattgaacgacggccagaataccacccctcatgtgatgagaaagtgcccagtgttctttagcgatctgtcctgtcctacccgtccaccaaacaaggctccattccttatatcttcactcaagctgggtggaactcatctgcatcaaagctttatcagattccgatccagtggatatgaacgagatcaagatcccgccggacgtaggcaattgactccgttcaggaagtggcgcaggcagccgaagtcgtggcgggatctattctcgttgtatttttgagaataatcacgctactggcgtctacgattactaagagcttccactcaacggtctccaagatgtatgtggatgtatatgagtatgtatatgtgtatgagcacacgagtcgtttatattgaccaacgagcaagtttatttaacaaactcacgtggccttcggtcggttgtaaccaatgggagtggatgtaacaacgcccaaacgcgactaaacacaaacgacgatcatctccgtccagcctagagtgagtagtctgttgtgtatgctgagtgtctgtcgaagaccttgaaagatttagtgatggttcggatgaaactgagggagagaggaagagagagtacttgaacggatcctcatattcagatcaatgggcgcgtcaatctcatccatcatcctctctttgacttctgatccaggtttcccgccagctctctcttaaaaaagtctcggttgtattcaacccaaagaatacacgtctgagttcctctcaaggcaatctgttacagatgtcgaccgttactgtccattcatcaaattcaccaatgtcttcagaaccggtttcgaatggtaaagcacaggagtccgccaaatcggccaagaagaggaagaccagtagaggtttgtgcatcattttgaattcgacccaatctctttggggagagggacttctacttttatttggatccattttcatcattgataccgagcgtttcaaaaaagaatctacctatcagctcactctttgttcttttcttcctaatctctcctttgaatttcgtatctgtgttctacagcttgcctaagttgtcagaaaggtaggcagaatcgtggtctacatatccttctctcactttgtgatgggcagatatcattcctagagatgtacttgactgagttaaccgtttgccatccggcattatcttttctctcttgcctttcatagctcatcttacatgctcggatactaggccttgtgtcagatgccataaacgagacgaaccttgtatcgagggagagaagaaaaaagctcgatatttgttcacgccggaagaactcgaagctttgaaactggccaagcaggccgaagcatccaacggaccaaagtcaaagcgagtcactggctcggcaaccacccaccagacagcttctaaacagagaccgaactcgaaatcgagtttgccaaacaaaaagtcgaaagaggccatctcaactacccatggattgtcgacttgtgctaacgtcgcgcagccaccacctctgacggccggcccgtcgtccgtacactctggggatcaacatacaccgtctccttcgtcgtcaacaaacccttcatccatcccaccttcatcttcccgtgcttgtcagtccacggaagattctcatccggacccatccaggattattcaaccatttaccaaccttcaagcgaagccaattccggacgagttcaaggtgtttgtaggcaagaatgaataccagcgtagtccgaatgatgagaatggtgatcaaggttgggaacatggaaaagataacagaccgagtctgagctcgacatcgggagagcttcagtcatcctcgatgaatcctcagctatccccaccgtccctctcggctggattcaacccagcaagttcaactgatgattttcccagagtatctgccaaaccggctcatctttctggtcgctcggcagcaagtgcgctttccccagatccacttacccctggcttcctcgcgacgctctttgctcaacatcaagatcaccaacacacaccgccgcaaccacaaacgggacctcctcctctccagccaccgtctcaccgaccgttgccacaacaacaacagcaacagcagcagcaacaacaacaattactcggttcacattcagcttaccccactcaatcgaatctgttcggtccatctcaagatttcgctcctcagaaacaccagtttgatccgtccgacgtccgatcgatacctccaacagatccacgggaggaacaagagatcgaccgttcttggcctcgaggtggagatccatcgttctggaggagccagatgtctttacatcaacagcggtcatcacatccatccactctttcacagtcacaacagcagcagcagcagcaacagtcactaccgacatcacaatcacagtcacagttacagccatccacatctgcttcgtctgttcaacccgactcgtcacgcatcgacccacaaatgaatagattctcaacttcattggggctcgattctcaacatgcccccgttgaacactcgcagtcaaaccagtccgcaaactttccttttggctcgcagtcacagttatccggccaaaatcaaccagactcaatgggaaataggacaccaccacctacggaaggtgaaagacctttagacctcttgaaacagaagcatggtttgtaccggccaggcaacgaaggagaagacgacgaccgactcaggacgaatataacgaaaggtagatcaggcaaagaacaaagcagaattgtcgacggacagatacgaaaaccagcagataagagagttacccgaccgtaccaggtcagtgtcttcttccttctcttgattatctttcctcttgcggacaaaacactgaaatttgggttttttcgaattcatcttttcgatttgcctgtttcattctccttttctgtttgtttgtcagtacggaaaaacataccggcggatgatcaaatttgctagagaaaggttcgcccgtcgtgttctcgtcttctgtataactgatcgactgtggtttcttctcgaaaggaatattcgaatctgaccggttggtctgtctctttttatcctgtttacttagatatggtgaaatggatgcgatgagattggtacagagcatagccgagttccgaccaaagatgctctccatgtcgtgagttcaccctataaattcttgtcttgatacctcacaattgatccattgaacgtccttcctctccgcttctcgtttgctctgggctgttgggatccagagcgaatcacacaacgttccaggacattcttctcgaagaagctctcctggcctcgttatcagacttgacgagcactttgtttcccctcacaggtacaccgactgccatctggagacggacaggcgaaattgtggctgcgtctccagagctctgcatcctcacagagtgggcggagggagagctcctgtttggggaccgcgaaggtgagccagtgccagaaggaggaagaatattggatgagtgggaaggaaagcacatctgggaaatcatggaaaagcaaaggtttgttcaggctgtccttttctttttctcttctctaaaacttctagatacgaatgactgatcacgatgtgttgatcactttcgatttggtatgatcagttttttggagtatggcgagctgttcacaaagtgcgcatttgaagggacagccccgtcgttcgatttgacgtgcacattggtctctccagatggtcgacccgtaacttgttctgcctgtttttcaatcaagaaagatgtctgtcttacttccttctttcttgctacttctgagctccatgtgttcggaggctaacgcttttcggtcttcacaccacgtgggttattcgttcagatctttgatctaccaagcttgataatcgggtttgtcctttcttgtctcttgatatgcccatagatgtgattctctgttctctaaacaatcgggtttaatttattttcattgttttttctctggggaacgcacaacaggcaatttctcccgctgctgtgatcttcttttcagccttttcttccccctttgttttttcttctttgggtggctttctgtttcaaacatacgttttccttatcttttttcttcctgcggtctttcaattgagtccgtttggtttctgtggcttctcacgccccttgctttttctctggttctcttcttttcctctttcctctctatctcttttcagatgatgttgtaccgatgcatttctctgatactctcctttcttttctttccgtacccatcttcaattttccacttacttcctccctttttttagcttcccttgttacttcatgttcttcctccgagttcacagcccctctcccactcgctccggcacatgtactctcttttcgctcttctccttctctacttgcttcattcgatcttgtttcatttcatctcatttcattccattcccatcccatcccatctcgtcctctcatcgtcttattttaacaccagcgtttctcaagatgtaaccacgttctcgcatccatgcttccgacctgacatagctcaaaccgatccgttgtgatcgcagactaatctctgacctcgacacaaaccaaggagacagcaaacggagagacggcaagcaggaacacgaaggaaaagaaaaagaccgaggggaagaagaggaaaccgaagacgacaacaaagaaaggatcgacagtacatatgagctcgataagaacaacaacctggtctttatctcggatcatcctcttgcgatcgtgtggcatgtcaagagaaagagagaagaaccgagaaaccgagaaccgaaagtgaagttagacattataaaatcaaccacgcgaggccatttccaaggattgagaaagagatatagagaaagagcacacagaggaaacaaagcgtctaaagtgtatgttgaatgcctcccggaggattcgataggttaatttgaacaaataaaaggaagtaatagatatatgaagaatgaacaagatcaagaacagacatacacgagagccgtagaccatcgagggggaaagagaaaatttgaagtacgcagacaagttaattgggaagataccatatgatgtacaattgttgataagaagaagtggagaaaacaagaagcgaaggaaaaagaatagaaaagaacagagaagacaagacaagtcagagagaaggacgaatttggttctagaaggagccttttccttcgttggctgaatccctctatactgtccgatgaacgataagatctggcagtaattacggttagatagagagggaggaatgtctcaagaatgcaaattagaagcaagaaaataacgaatgctagtttcgacgagttagttcatgtcaacgtcttcatcggcaacagcctcaccatccccatcggcatcggcctcgactccttcgtccacgctccacaacatttcttcttcggctcgaataggcgaggggccgtgctgctgttgttgcagtatccgctgctgcaactcgggagccagtgagtttagcggccagtttcctggtcgagcgatcggttggtccgcgttgttcaacgccgaaccagggacggtgcagagtgcagcgagtgaggtgaagccgattgggctctgactctggtttggatttggggaggccgagggggatgaagcggaggaggacggtgtaggtttggaattgccttgtgcactggcacccatggtcgagggtagggttccacctttcgggttaatatgctttccttgttggatcagtgctagtccaattgccccatgagcacctgagggagaagaacggcgtaatcagcatcggatgatcatatcgcaagcacagtagaaaatcaagaatatgacctaccagagttcaggtaatgatacctcaaaccgttcatctgtcggtaacgcttccaacagccgccaccgacctggcactgatacggtctgctcttttcttcggcttgctcttcggacagaccgttctcaacgccgtcccgaacgttgaaatcgcactggccgactttaagatgatatttcagaccgttctgttgttctagtggaggtggaaaaggacgaagatgacagtgagaacgagaacgaaagcaatatgagagaaagagttcagcgtttctttcttcgaaggaaattcgttcggggagacttactgtaagacttgttgcatccgggagtcgggcagtggtacagtttctggttggacgagggtggaggcggagggatagcaagcagcgttgagggtgctgcggtgtttgtttcgtcctgtactttagaatgttgtccttggacggagaacgagtttggggttgatcgtttaccaagctgggttgcggtcgaatggggcgagcttgccggagtctttgtctgctggggcatagacgagaacaacagagtggtatccaagccagcctttccttctgttctagcgtccccagagatggtgggaggcggaaatttgtactcaccctcccaaaggatgtcggcatgaccaagcgtttgatcgtccgaagggtagtgccacctgtctgttctcatggttgagccgcctctaccgccgttgacaaaagccgctctggcggccagagcctgctttgtcttcttctcattgactgagctcgggactggacttgcgtagaacgatggtgagaccgaaggagatgaaaccgaaggcgacaaagcatggctcgagttggatgggaagggagacaggatggaagtctcaaacgcactgtttccggccgaggccagcacgtctgatagctggagaggtgccgatgctgggataggcgtccgcttcttgaaaggaggcgacgcatcctcgagcgagggtgaacgattggtgatcggtgttgtgagcgtgtaggttggagaggtcgtagccgcctgagtggatgacgagccagcggagaaggagctggaggaggaagacgagccggaagagggcgaatcgtcaaactccatatcaagcaggtctctgtgaggtgccgaaggggacgggaggataatgacatggcaatcttcatactgggggacagtgcataagaaccggcaagatggatgagaacgagcaggatgagaatgagcaggatgagaatgagcaggatgagaatgagcaggatgagcgggaacacaatgatgggaaagccaagagaggtgtagagaactcacatgctcaagtagatcatgcatggaacttagctcctgtccgcagcagttgtagttctggcaataatctgcctcccgattgtctagcttggaggaggagtcttgggtggaatctatagaggtcgagaggtgcatcgagaaatcatgtgtactgaaacgaagaacggatgaataagcggaagccattaaggaggatgaaagagtaggagaccatccacccgtcgataggatggcaaagagaacatcaggacttactcgaccccaccagcttgccagggaaagccgacctccgaaccgacgaacttgcctttccagctgcctgtacgatgcatggtctcctcgtagctgcccatgaccgggaagccaaggccgaaggagcctggacggaggcttctggcaaagggagaccgggcggagaacgagttggacagactgtttcttggtccaaactctggccgttgaggtaaagggatcggtcgggaggacgatgacgacaaggtcgaggtgtttgataacggtgaggcggacggacggccgttcgacctgggcaccggtggataaagatatgtcacttggtcattactttcgtttggcattgtattcatgatggctaccggtgatgtcgtcgacatggatgggaacccaacagacagacacgactaaaggaatggggaaggcagaggaaaccgttggaaggtcagaggggttgatgggggaacgggaaggaagaaaggtacaagaaggggaagaaagtgaacgtgggctgaaagcagggcagagggccagattaaatgaaggaacagggcgagcgggaggggggggagagaaatgggcttaggcaatagacaccagggcattaggcactagggcattaggcactagggcattaggcaccagggcattgtgcgcacagggaagatatgataaacacaggcaccaagcgcaatactggaaatacatcacgtcgccatgcactgcgggtggttcctagaagagaagttaaaacgggcgcccttgaggaaatccaatctagacgggatcaaatggggtatgtggcgcatgctgtgtggagcgctggccaattctgtccgggcctctccacccatgacctatcggccgggatcatgtccggctggctacggtacgggtgggtaccggctctaaatacgatagacaggcactttctttcatagtgtagactacttgcgtgtctctctctctgagaaccagatcgtcaaggttgatggttggctctgtgatcatttctccttactatgagcctgcgcttggtatgacgaagcttcggatcatgtacccggtctgtttgcactcgtgtccttgttgccatatagttcagcccgaatcgtattcattatggcaggcaggcgagcaagatgggaacattcacccagaccaacagaacacctgctatcatctctattggtcattctttcgccacgcctctttatggttgtcatttctctatccgtgtgttgagtggatgtatcggtctgtgcatgtctgtataaatatacccgtcgatatttagtttcttgatcgaatctgcgatcttcctgatccagatactcatcctcttaaacagatagatctagctcatagtccgatatcagtcagaagagaaaacgttaaattggattcatcatttagttgcccatcaaaccccagcctcatagttaatggggcgtcggactgtacaagaaacaggaattagcccgctcgatcggaaccgagcgaacgaccagatctgtagaatatctgtacgggagccgaggacaagcccgaacagagaggcatgacgacagagaaagatatccttgaacagagcctgcgcacgcagaaagcatcgtcccggctcttctccccatccgttcatgtttctgtttgtaatcctgcaaatattcatttctttcacagtcgactatccacataaacgatgtacgcatacacacacactcctatcttctctctgccatggctacacccatcagcccatcgctatggtccttcccgagctccttctttctctatgtaacaagaaaggagtgccccttgtttgcttccactccttctcttctttcctgctatccatattcattaaaaatgtttcatacactaatgacatatgtatggcaagaattgcgataagtatctgatcaggcatgtgtatgtgtgtacgttcagagcccacgagtacacattgcggagttcttcctatctcttgattggagcgttttcttctctctgcaatcagtgatacattctaatctcggctccttttttttcatccttctttatctaaagttcactcatgtttagtttttcagtctctcgtttatcttcttgtatatccttgtgcctttgtgcgcttgtgtccctcataatccttcctggggcgcgtcaaaccgatcgttctcttggtgctcatcaagctagctccctcaccttctcttttctctgcatcacatgtttacaaataactgctctgccatattacgttatcagtccgggatttcccttgtttccctcttttgcctccttcaccctcggaagaaaaaggaaccgaacaaagagctttagaaagggacacaccatagatgactaaacatcgattgactgtcggcgataacggcggccgaggggtaatgaagaagtaagggggtgattagtgtagtcttgttctcttttcagaaaccttatgtttgtccgtttcgattgctttctgccactttccttctgattgttcctgaatatcatcttggtaatctctatcacctctgatggcaaaggaaaaaggctaggaattcttcggaactacatgagtatctcctttccttacgagacgacgagtgatgatgcatcctgaagaaagaaacaaagaaacatctcaagccaaagcctccgactcgccagtggactttttcttcttcttttccttctttccgtctccattggccgtgttcacactcccgtcctccggtcctccttctcggtctcgctttcgtttcttttggagtcgttcctccagtgagacgactgctgattccgttggtgctataaacggcgtctgtcgtttcgccgtctgattcgctagcgaagtttgttcttgctgttgaagtttatttataaggatgcgtttcggttaatcgttcttcctagtcggttcggaacatcaagagtgaaaaataaacgagaaaaaaaaagaatcgtagaagggagaaaccctcctgaacgtacctcttctttctttgccttcttgtccttccattccttgtccttcgctttcaagaagtactctccgctctccaactgaagatccaccttgctgggcatctgtgccggcgggaaaggcgtatacaccttcttctccttcttggttttcataccgggctgtccgatggcattcgcgccggaaggaccgtcccctgtgagagctcgtttcttggatgatttctcggctgacgtcaagtttcgtttcttgaattctacaaagagtgtacaagagggcgttagtttttctgtaccggggaatgagcgcagaaagagctttgcttagtacgcactgggaaggaatcgatcccacgactcgttagccaatgctgggtctttcgcaagttctcttcggatcatcaattccttcagggtaaagagaatataagagtggggggggaggagaggatatatctttcagctgcaaacacaatagacaccgacacaacagccagagacacaaggtagagacccaccttgattcggtagatcggatgaatgttcttcatacagtcaatcacaatccttcggacttccttgagtgacttgaatgggcccatggccgagacggtgtttccttggacaaggacataacagtttgtcaaaagctcaatggcctgtagtgttttctcgaaacacgatcagcgctcctggtcacaactcgagggtaagagaatgtaacgaaccttcaaggtcgaaccattcggcccgacgattcgctgtcgacgcttgatgaaccgctccttgttcctaacgacgtttccgatcttgatgatatcacaggccgtctcatccccgaagatcttcgcagcctgagcaaggttgactcctctcgccaaaagcttcatcaagtctcgcgcgtttaggatggagtatgggtcatatgtttttcgggtcgttcggacggtcatcgaaccttcgatcaagtcgagtgtgcacccgataccctaaaacgttgtgaggttcgactgtgatcagcacacgtcaagcaaaggcagtgccatcttggataaagggaaagtaaaaaccaacctgtccttcgagaaatttggtgacttctccccaattctcccggaggtactgttctcggtacttcgggaacaagatagcgaaggaggactcttcgaggaatgagccggagatattatccgttggtaagaaaggctcgattttccacttccaatattttgaaaaagacagcaacaagattcaaacaacgggacgaaaacgcgcagatttagtcgtctgatacatctctctttgctagcaacaaacgaaatcaatgacttaggctcacgctaaatagaaaaagaaaaatggaagcagagagaaagccattgtttagccacatattggtttgttcaactgacccatttccagaggaccacagacgacgtactggtcaatatcatcagtgtcccatgctgtacaaatcaaacaagatgaatccgagtcagaatatcgagagctttgcaatcccatcctttactccaacctctaccttcatcatacgttctgaacactcacgtttatcctttctgaaacgcttgttcttgttgacgacaggctgctcgacctgctgctcggtgttttcctcggtatccgccatgaaggatgtgtcttcgctaatactagagagtctgtgtttactgctgtaattgaaatatgaagaagaaagcttagagagttgagtggagggaaggtgaggatgagagagtggaatgaatttctttctacccacaggtattagttcgagtgtcttagctatgggggttgggtcacgtgtcgtacaaatttggaaagcggtgctaccatggaccttttctctattctccattacaaattctgtagtcaacgctgtagttcgtttttgtagtcctctctattctaaggccctcgccgaccgcctgcacttcttccgtcctcgcatttcatcccaatctttatctcatcttgagctgatcactgtctacaaggaaaggatggcatggtcaagacgattggcagatgtcgcttttgaaacggttccgatcgttgtatctttcgcccatgtcttcctcgctccacacacaaaagttgaagaatctttctctctacatgccattcatgatctcttgttctacggcccttcactagacaacttgaatttggtttgtttctacctcttcctgctttgttttcgatttattgccgctctactcacagacttgcttctctttgcttctgttgaatctagttcgaccatgtgtcctttccaggcccactccctcgaagtttcatcccttcgctgttgatcgccggagtagcccgaccggtcgcccagatcttatccgtcctaggcctcatttctaccaagtttgacctccagattcttggttcgtattctcatcgtctttgatttttgttgctcatgtactatgcttagatgacacctttgttcttgatcatatacataaagttcgtctggtgatggctgcgatttcatctctctcactcatctacctatcgaggtcaatatccattcgttatggatccatctctggccggttctttctcctcctttgttcgacccagtttcatcttccgttctatatgggccgctcgctaccaaattttctcgctctcccttttggtaagcttgttcaatttttttatatgcacccctcttgttgatcgttcgtcagactgaagatcttttttcaaaaaagtcaacgtcacattggcatggttaatctctaatcgacctggaccagctctggccttgttaacagcgacggcgtcaatcgttagagcggaacttgttcttctccttgcccctctaacgatcatcttgatcttcacaagaaggatctcgataggcggtgcactgggatggggtgccatcggtggtttcggcggaaccggtaagtttttgattgctccttctgagtgatcgtcaacgttctctctctctctctnnnnnnnnnntctctctctctcttctccatgcgcgcgcttacatctcatcgtgtatcctcaatcgtaaacaggggccactttgctcttcgactcgttgtactggcgttggcactttctctggcctgagctctactcgatatactacaacgtcgttctcggtaaatccgccgattggggtgtctctccacgattgtattatctcaaacacctccctctactccttcttctcagtctacccctcctcgtgattacttgtgcccatccagtattacgtagtaaggcaagattggagctgacgctcctcccgccggtcggaatggttatcggaatgagttgcttagggcacaaggagtggagattcgtggcgtatgtggttgtatgggcaaacatgctagcctcggtatcggccgcatatctgttcgccctattccctcttcttctctcctatttatgttcgaaaccggtgataggccagtcatgctgattaaaccatgcctcgtggtttcggctttcaacacagatggaattgccggaaaaaatcctggttggcatcaaccctagcactcggtctcatcggaggaatacttgctaacgtgatggtgacagctgggctgacggtgatctctatcggaaattatcctggaggggatatcatgcgtactctgcatcagattgaagttggaatagatcgtccgggtaggcttgactttgttggcttccatttgtttcattctctcttctctttttcctttctctgctcaaaggggactaattttatgcatttgattctgtggcggggcttccaatgtatagttcatttgtattcgccctcgttacctcttcaaaccggatcgaccctcttccacgccctccgctccccaccgtatctctctttgacctcgactccatccggaccctcatggatctacgaaaagacagagttcgaacctccgtttgtcctaacgccccaatcggctttcaaaaattggacacatgtcgtccttcctgatggtcgggttgatcaagtcgacagctgggtcaaggcagggtgggaggtcgtttccaccaaatctgggtttggaggggttcgacttcagagggacgaatcacgattttctggatcggtgatggatgatggaaacagtctaggggcagaggaagacgacaaatggacgatcaggctgtggggaggaaggaagatcgtttttaagcagagtcaggagcgagtcgtcctcgtccggcggatagggttcggttcagatcatgcgagatgagtatgtgttctcagacgcagccacattgctcatgagaaattgtcatcgatcaccaacgagagcaaacaatcaaaaggaagaagaagaagaagaaaaagagatatatcggccataacaggttacagcagagcatcaattaatcggcttcatggacgtagtgaagaaataagtagattaagtaaaattatcaaaaagtacaatccttgcagttaggctatattgaggactctgaccattattcctcgggatgctcagaagcgaagcaagagaagaaggtcaagagatcaaattagaacttcaaggtggaagtcaaggatccaagaccgagctggttgagcaatccagtgaggttactgatcaaaggcttgagaagggccatgaagccagagatgatctgtggttcattcagaaagaaattgaagagcaaagaaaaaaccattgggaattttttagcgctagaaaatgacacggataagaaagatggaaagtgagagttcaagtggacaaactttggcagagtttgcaacgattgcggcaagagatgcactgatcagaagaaacatcaagaaaagacggaagcttgataaatgttatcgcctttacggaggcaaggtaaagataccaaacaggaggatcttactcggtaggagtcttgagagaggcaaagacttgagcgacggcatcaacaccagcaacggaagtggaggcggtaactcccgagttgattgctggtaacattagagatacaaaacatacagaacatagatgagtttaggaactaaggcgagtgagatttggaggttaaatagagtgaatggatgaatggatggatggatggatggatgatggggacaaactgtcaagagagttgaccacttgggtaataacggactgcaagttggtcaaaactgatgttccaccaagaagactgttcgatgaaagacagagtcttttggaattagtacgattggtaccacagatttttaaaggaagaagacaacctcccacctggcaaggagtccgttagagcccgaagagacgagagaagccgaggatttctgagcggccgcaatttgtttgactacagagatcactttggcaatcaacgtgtacaagtcattgctgatgttggctggcaaattctgaatagcagtcttgatagcgttgaactggtcggccggctgtgtttgttaatccctcaagccatggtcagcatggagtccagccatctctcagacgtacgagagtgagcttacgatgagggtagacaggtcgttgaggagagtgatgagaccggcggtgctgaccgaggcagtggaggtactggaagcgctgctagacaatccggcattgctgaggatattggtcaaaccagatccgctagtggaagtctctgcagggagaaagacgtagaggcatcagatggtgaatacacaagatttgagaacaacgagaaactcttgagaatggtaaaggcttacggatttgagtgagagttggcgcaacactgctcttcaaagtcgaggtaatggcttgaagctggctaaccgttccaagaccgagcaattggtcgaacaacccgcgatcttcgatagcggccctttccacaacggctggagtgggaacagcaagcgcagtggaggcgccgatcaaggcagtgaaggcagtgaaggcggagaagaagaggatgttgatctggtattgattgtgatgtttggaagagtgaggatgagtgtgtgtggagggtatgagtagaagaacatgaatgaggggatcgattggtctccttttatagcctctctaaggtcactttgaggccagtggtagtcagtcgttctcataccatacccacatcgagatggcgtcagtgaacaaaagatgaaaccgagacggcttccattgaacagaaaccaaagatcttgatcagttcgcagagacaagtctgtctgagcagcttgtggcgcgcggagaggcagtgaacagaataaggcatctcgaggaagcggctgatagcccgtggatagtttgcacgaaacgaatggaagaacagaagaaggttctccacacaaagatttcgataatgtattaggaaactaaagtgagatgacaacgacggggattgggatgtgaagagaggtgagtctaaatccaactggttaaactcatcatcaggtggtatactagctaaaggctgaacgggagcaaccatgagtttgataatattgttttatttctgaacaaacaattgaaagaataagtcggctaaactcagtcaagactcataacgatggatcagccgtcagttgtcggtcatcagtcgtcagtcttggtaagaacaagaagagggaagacaaattgaaacaagtctgccgggtctagatggatgacggacgatggatcgatggacggacagagagtcagatgggtgagtacatcagtagctgaacggtcattgggtctcctggtcaaacgaaagagtctttgagaaagccgagtccacagttcgtacactcagacattgagacatccgtgtccccagccggaacaaggattctacagaaccaacgaagcaggacaagtccactattaatgttgtcagtgagggtgataaggaagaataacgttgagatgggaacaacaagatggtccgaacaaacattatgtttttgccatgacttggcgagaactcaaatagaattaaacatcgcatgtctcagagaaggctaaggatcatggctgcctcaagtctagaccggtgggctcgatcagtggtcttgttcagaaaggcaacctattccttacaactgaaagttcgtacagacaaacaacgtggtgataccataccgaagcttcggaagttagccatcgtcagccatcaacgccatgaattccatggacatcgtgtaatgccatgacacggttaggtcttctgttcaggcaggtatacaatggttattccatacaggactagaaagaaaaatacatcgtgttctgaagaccagctctattacgggacttgactatatatgataccacaaagacggatcgggtttctccctcaagttgatgttgttgccgtcgtcggtccatcctcaaacggaggtttcgatttgtccgctcgcctggtggagtttatttatccgagagacatcttcagtcagtcatcactgtacccaccaatgtgtttgcttgtctgcctgaacatgtctgcagacagctgcctgatagacaccaagcgagtgttggatagagcacgtaccatgatacccagtgttcgtactgagcgtccgctagcttttgaacgagcgcatggccttgggtcttgagagcttgtctaaaaagtggtttgagtaagagtcgacggtgatgaagtgcatttgggtatctagagatcccggggttcatccgtattaggaaagaagaatatactgagcaaagacgatcgtcgtacaatacaatacatttgggatgagaagaagaacaaacatgatgaaccgggcaaattcaggtttctcccagtaggcaagatattcaacaaaattcatgaatggctccgagtcgagatatcctgttgaggagagctccagcaggtagtgtgggtttgccagcgagagcatcatctgttgaaggaggagcatccattttgaacccagacccagagtgtaccaagtcaagagaaatcaggaagagatgatcagactttatgtgtatgtaacataacatacctcgagctctaactcaaatttgactttgttagcttttcgctccagcgaggatgcatctggtatgtctgatatcgatgtcgatatactcattgttgcttgagatatgatcgacgaggtgctgttggttggttggacggtcttgtcgaacggatggatgattggatcgacctgcgagccgtttgaccccaactcccatccaacttctcatccccacctccaatcatccactcaacatactcactatggcctctgttccttcaattccgataacggtcgggtctgtcgcaccatctgccttccctggagcccaattgttaacagagaaaccagctccgaaaaagtcggagactcctctacacttccagtatgcgccctcgccagacggaaagaaccgcaatctgttgatctttcttcatgggctgggtgagcgcaccgtctgtctttctcttgtgcttttctattcacaagaacggatacatcgatattatgaaagccggtgaaggctgacacatgttcttgctataatcttcccttcttgggtctcttaaccaagacaggtgatactgaagcccctttctatgatcttggtcgaaagttgaaccttcctcggacggccgtgctttctatccgagcacctatccagttcgttgaggcttcttcttgtttctttctctctctaccatcactcacttgttctttatgagatgactgatctttcattgtcaacgcttgaattatttgtctatatagaatccctctgcttgaagaaccggctttcatgttttataactctttcacctttcctgatttcatgcccgagcctaatcccaatccgtccgagatcctgagccagctgagctcctttgtgactcatctaacgaatcctatcgacaagaagggctgtaattggtcgctctccaacatccactttttcggattcggccaaggaggaagcgtcgcttgtgaattagcactgcgtctacaaggatcgtcaccatcaggctcccgtttaggatctctagttaccatcgccggaccgttactctcgttttcgacaagaaaacctaaccagacgcctgtactagccgtccatcgacctagtgttctgttcaagctttctgagctcaatgcgttaaaaaaggcgttcggtcaagttaaagaagtcaaattcaaaacaggcgaaggaatgccgaaagggcaggctgaatggggagtgatcatgaagttctggagtgaggttttaggaggagagcagtcgatcggtgggggtggcgagatgtacgaggtcttgcaaggtggaccgtctataccgagataagtacatgaaatgataaagttgagaatgtatcttcttctcttgccttctttccgaggttgactcggtctttgtcttgcagcagtagcaatgtctacagatcaattcttgctgacagagaagaacaagaaagggttcaaaagagagagagagagagagaaaacgaggtgaaaggctccattgccattttcataatgcattccctatttgagaatacaggcatcttcattcggccggccgatcagtcgtcaacaatgcctttctcctatcaagcaagccttcaatcatcttctcctgttcgtctaatagcgatcgttttctggtgatgagcgcgtcaatttcttgagcggccgatagcggacgcgcgacaacatgggtgtctaacgcttgagatgtctgagcctattttttttattaaagtcaatgacccattaatgatatgagagcagatgtcagtaaagccgaagatagagggatagataaaagagaatatgtatatatatgtgagaatggaaagcaaaaataggaggaaagacagacctggagatcagcttccaatccatcctctaccctctgccagtcgacccagaactttttctgcgctttcgcccactttccttgaccccatctgatacccaatccaattcctaatcctacgaacccgagtccggttccgacctcgcacaaaccttcgaggtagcctaggtaggcaccaacgacggccgatccacttgtcaagtatgagccaaggacagctcgctgagctcggagttgaaagtacgccagcgggcctgtaggggaaagcaactgggcctgacgcgaatgcagaggagaaagaagtaacgttggccggactagcgcagggctaggaatagagttgagtaggacaggagagagaagtgtaggcgaaggaggtgactgaaggagcgcggttgtttgggcgtccagttgagtttggatttggttgagtttaccggtttggaagattaactgaaggggggaaaaaattcatcagaggtgaggttagcgggaagataacaagcgttctagaatggatacagaagagcaccaaactaaccagtcgttctccttctccaccccatccatctctgacagctctctcgagctcccatactaaatcatcaaccttacctgccagaagcaatcgggcccacgtgaaccttgttaacgcagctaccacattcgccctagcttttctaacaacctcgcccgctatactctccggatgcacatggccaacctcgccgactttcggaggcaagaccaacgcgtctcgaaggaatgactccctcgttgtagccgccaacgttcgcaagtccgacgcagccgaagcaaacgcatcgagatgggtagaaagtacgagaagctcatacgaagctgatcgaagggctgactttgcgaggaaaagtgtggaatccaacatcgggtcgacctttggagaagacgaaggggagagagagatggatttggcagagagttcgaggaggtcttgtttgagggccgacatgtttgacgcaacggattcgttctggaagtagtcgatcttgttcacgtcaactgtctctgctgatgtactgcttctatagacatccaccgctcgaaggcttctcttagcggctacaaagacaactctggatttcatggtctccatgatgtgcgcgtctcctccagagaagtgatcgatctcctggaatactcgagcatgacacgccgggtctaggtcagagatcatgttcaccacaattcgaaggtttggatgtcggagaagcgaaggaaggagaggagctagcgaaggctgggagagtagtcggaggttgtcgatgacaagaattgggatggttgagaagagaagctgggaaaacgcttgcttagatgaggttgatgctaagattgagaacaagtttcatcagtcgccatcaaaagaaagtcgtcagtcatggaagacgtatcgtatgaaatccgtcagcaaacgtaacgagaaggaaacacccacaaggaatttctcggatgtagaaccgtcctaaacttaagaaatcagaatcaagaacgagcgacccctccgcttccacaaacggcttttgtccatgtctttttatgtagcggttgccccatcagataatgcatgctcatcagtacatggtgtgtttaaaccagaaactgacaaaaaggaaacacacctgatctggagagactggtttgacggcccagtgattccgttgcgtcggcctcgaaggatttgttctcggacggggtcagtattcaaagggtcttcaaggagtgcggtaatcacatccgatcctccgctaagagacgtcgacaaaactgtattttgatttaggttttcggcgaaaggaacgcgagattcgggtttgtttccattccagagataaagagaagagagaagcaagtgatcaaccacaagagaaaagaaaaggagggagaaagagtaaaagaagaagaaaaagagactctaagcataccagcgatttccatctcttcggacgatccctctaaatctaccgacttggacttgtttcttaacaacgcatggtccagtctagccgaccaaggtccttccttagccactagtctgtcgacctcgacgacggtttgtttaacggagcttaacaggctcgaaactggggtcaagtttgacggaatgagagccgaagtggtcgtaggaaccgagctggaggacgaggcagaagcagagacggtcgatagccttcgaagggaggcgcaagcggccagagatcgggaggcaacaggtccaagaacacggatgggagccgacatgatgatcgtctactgcctatgccgaaagagatgatggatgaagcgagagaaggaatctgaaatggatgcaacaaggaaaaagggagggattggaaaagcgcttatgtaaactagaaatctgattaggaccgaatacaaacatttcctaatcttttttcggtcgtcgcggtctcttttcggtcttctacaccacaccagcagaaaacgacaagaacataacgggaagatggatcatctgatacattataaattcaaagcagagcaagattatggttgtaacgatcgagcaagataggaaaggaaggggatacattgatgaacgtaaagatagattaggcaaacaaaaaaaaattagaatcaaagatacggattaagttctgacataataggatgtgcaaggcattaggaaacgttctaggcatggatgaaccctccacagatgagacataagcagatctacttcatcgtagccagcttctcagcacgctctcggtcatcccgggacttgttttctctcatcaaatcactgaataaggagacatgagattcgtcagtcaaatccacaacacgttggacggaggacgtataagagcacgactcacattcgagcagtctgctcctgaatcagtctcaggtgtgtggcagaagcttcctggttgacctggtgctcagcctccctggatttcaggtcagcggcgacttgatcataccatgcctggacctccaaaagcttggcgtgggcctataggagagaaaacaacatcagagcgcccgtcagtcaaaaatcctttacagagacataacacaggagatcactctcaccttctgctcagctttgacgccctcgaggtggaactttccactcttggcctcgatgatggttgactctttggccgacttctggagtcgggctaactccttgatggcatcatcgagcctcctctgctcctccttggcctcggacttcatcaccttcgcgagtttcttgttgtccttgtctataaaagtatccggtccaaagttaacaagtgtaactttgttgagctatcgactatgataaataaacctatacgtacgttcggccttgttgatcttggccatctcccgggcactaatcaaaacctttggttcctcctcaactactggcacaggaggaggaacgccagtgtaaatgttggtaatcatgggcgctccgttagcagggttaacctgactgaaagtctgaactccattgggtgaggtcgggctggcgacgatcacgctgctgggcgcgggctgggtgttgataggatacaaagcttcttgtctgattgtttggcaaaaaaggaatcgagagaacgtgagataaagatcagtaaatcaaatatgaagaagaacgaaccgaggggcattctcgttcatgaatgtgccaggagcagactgatgcgctccaacaccggcgataccggcctgagtgtagtctgttcggaccgaagcgtttcgctgaaggctgcggttaaggaatcgatttaaaagatacaagtcatggttaatgaaccggttggtgaacacgtgtaaagactgaaaatgctgggaacgtactcgctctgattctcaaagcccctttcctctacagcaacggcggccaccgcaggaacggcgacagcagcggttcgttctcgctctctctcctgctcgagctccatctcccgttgctgctcaatctccttggcttcaacctcacgctgatgctcgtcggcggctagtcgagccttttcctcatgagcaaagactctctccttctcctctcgagcgagttgttcctcgtggatgagtctatcctgctctttcgcatgctccctttcaagggcagccaacctttctcgctccctttcctgctcgagttcaagagctgctaatctctctcgttcttgctcctgttcaagctcaagagcggccaacctctcccgctctcgcttcgcctcagcctccctttgaccgggaagaatgatgtcatcctcgattctgtcagagatgaccccgctcggactagcgtgctggtagatggctccagggtaggtgaccacaacgggctcttcagcgccttcggtagctagcttggggttgtactccatctccttgccgagtccagtcggcccacccccaacaatggcagactgggcaaccggagtctcgttcgactcgagctcgttcttggcaggagaggacgctcgctcaaaagcagaagtaggtgggattgggttggactcgagccgagcatcttcagcagcctgagcagcctctcgttcctcgacagagtgaagcgaaatgtccgatcgaacggaagaagcggtggtatctcgagagataaggttaggagcggtagagggaacgagagattctccggatggtacctctgaccctacggacctttctttgtgaggctcgaccgcgggaacggcctgaacaggtggctcagagtatggtgcctgagaagcaagcaagctatgggcctcagccggctccgtagagtcgtgtccgtccatgtgagaggggacaccggtgttggtaggagcaggaatagcgacgacagagtccaagattccgggcttgacgatctcaggagaagtagcggccgtactgtctctgtctggctgagggttcattccagaggtaacgggagcggacttttcttccgagaccgtggcgggcgcgttgccgttggtggtagcgacagctgtctttgccgccttgttctttttattcaaggaaaactttcggaacatctcgtcgttctcgttttcgttctgttcgccggtaggagtttctggggatggtgaagaatcggtcggtgtgttggcgctggacactgggatatgtgaagtggccaggagagagatgagaccgatctgagcgattttacctgtagaaaagatgacgataaaggaaaagaagtttttttttggttaagacttaaaagttgactcatccaagcgggtcgacgtcatccaagcatcaccaagtccaactcaggacctactaagagattccagtttgacttaggcctctgaggcgacgtacgagagtgtgtgatgcgttgaagcgggagtgacgaagaaggagaagggagggaaacccaaatggaaaaaatgtcctagacagttgagatttatagcgggatgggaacggaaccttcagctagggttgacgtcatgggctgaaggctgcgtaagggcaggcgatcagtcacgtgactgacgcgtcaacgcgtcaacgcctcgacgccacgatgccacgacgcgtcttcgtccactgatctttatggtgtccatctttttccgcttctctcatgtatgacaatcgttgtgtgaaccattgagaatgaggttcgttggactgtgctctggtggttatccattggggtcgtgctttcggctgatttctgtctcttggatctgatgtttctctttatactcaacgcatatctagcaaacttcaagaaatccttcatgaaaaacaacaagaaaccttgctgtacaaacagctcgtcgccgtgtctgcctctctgaccgaacaagcccaacgattggctgactcggccgatatcatggccgatggtggtgtcggtgagctcttttactactcctttactattccttttgcccgttctcttgtgtacgttttcaatacatacacacactgatctgtgtgtatattacatctggctcagccgtcgcctccgtgatggccaactggggccaagtctttcgaatcatcaacgtctgcggttagtcacattcatcgtatcttactcctcatcatgtgcttcgactccaaaaacacagctaagccaacacttcgtcatcccctccctcggcttcttcctttagaccccatctcgaatcctccacccatgcaagacgcctcttcttccaaccaaacaaattcccacctggaggcagacgagtccatagcgaacgaatcgttgaccggtcgacctcggaggacaagcggaagcactggcgaggatgaggaagttgaaccagtcccgatgttggttcggatggaactcgaggcagagggtgttcagggcgaataggtagtcatatgaagtgggcgcgatagagagtcttcgagtctgattgtgtttcatggacgggctgttccgggtttctttctgtttcttttcttaatgtctaacgagattgatgattttgacgatctatgtggaaatcttctacgaatcaagacgaggagttttgtgagacagtatatcccttgatcttatacttctggacagaagaaaaaataccaatgaaagactcacaaccaaccagttccatagtcgaccttgacgatgctcaccattgcactcactctccccactgaacaactccactaacccaatattcctttccaccttccccctgatcgtccacccagccaagtccctccctttcgaccatctcgctctgcagcccggttctgactctgtccgccgtccaaccaagttctctctcgacctgagcgggaatcagtcggcctcccgtgcccaacgccaaggaaatcaacacggagagatctgacggaagcacagaggccgtggaccggagtgcctttgtctgctctcctgatgagagtgagcctccagaacttagattgacaatttcccaaccgtgtccgccaagatgatcgcccatggtgtcgacagctcgtttgatgtcttcttccgagatacctcccgagttcggggcaagccctcggattcgttccagtcgtcggatcaagtctcgaagagggagaagtccgccattgacggatcgtgtggagattgcgatatcgactatctgggtcagtagttcgtacgtccagtctgacaagggaagcaaggaagaaaatagcccggatattgatgtaggtgaaggaccgtgaagtggtccggataggggatcgatcgatagatgagagcacattcgctagagatcatgaatcggaacagaaacaaaacatcaatattggtattcatgcctcctctttttcctcttcttcgataaatgcactgtatattctttctcgactggagaaaaaggcagacgctcataaggaaacgaaacgaacctggaaatgcatcctgaacacaggatccttcctaatctcctctcgatgtttgctcgcaaactctctcaggtttgaccgaaactgatccatctgagctcgtaagctctcgacttgagtctgagatatttgactcgaaagagatgagtatgccttggattggctctgttgagcctggagggaggagatccccacagatcgacgcctggtgtttgagaaatttaagaacgagtcatcagcatcagcagcagtgttttcagaggggaagaaacgcattacattattttctatcagaccaagagaaagaaagaagggagagagacggtgagtcgagtacaaaatgggttgcagcagagatggttggaggatgttgtgtagaaagaactgagcagcggcgatctcctcctgattaaaccggacatacatcatcaccaataaacccaccgagcatcagcaaaccttgtccgtaaactcttggatcgattgaccatccggtatccgttcgagacttttcacctcatccatctcttcacgttctctcttttctatcccacttaactctctgcgtatcaatccaacatgcctcctcgagcagggtttgtcaactttttcgtcgcgtctttgtttgtctcacaacgtcgttgctgacttacaaatgccaacggacgaaacacatacccacaccattctgttcatctatccatccggttgatatcttgggtcccttctgcggaaattaaacttcttcagtacttcttcggatcagatctatgaatcacagaatgacgagcagttgaacgacttacacggcaagctccgagccttaagaggggtacggcctctttctttgcttttctgcttgatagtggcagccttacacgttctaatctcgcccttcttctgcccgtgcttgttctcctctcttacgtttttgtactttggcgtggatgcatgatcctggcctcatctttgggtctgtggcgcatcgatacaggtcacgacagatatctataacgacgctgagcgacaaaaccttcaactagatcaaaccgttcgttctctccgtcagttcgggcgagattccctcgaccgatacatatctgaccttgctttctttctttctcatacgtttatcaatcttgcgttttttttgtttttttttgtttttttaacgggctacttacctctccctctccgtgtttggtctttcttccttctttctaacaggctaacactttcgagacattcaccacatctttccttcgaaccaccacaaattccgcccggacattcgccaatagttcaggcgtcaaacagtacaagctcacactctatatcgccggagcctttgtcggggtgttccttctctggaagatgggaatcgcccattggggaagagaacccgagggcccgccatgagtttgaagggaaggggtatagtggggtgggatgaaccgtgaaggtagattcttgggaaagtaagagatgcaggaactgtatggatgtacaatacgatacaatacgacacgatacaatacaatacgatctgacgtggtgtgcctggtgaactgataaatcttttgaagagaatgatctgacctgtctctgggttaaatcgaaaacaagatcaacaccaaaggttttagagaaatatgaggcatgtatttgaaggttctctatatagcacagagtcgcttggatgtcatcaaacagaaaagaaaggataaagagacaaacgacgagacccagatatgaaacaagaaacgcacggaacctaatagtcgggcaaggagggacagaggaaaaattagggaaatacaaatttatacatgtacatgaaggtaatcctatttcaagattgagagagcagaagcggtgattcatcggctaaatgtaagcaactggatgatcccacctaggttttcaacacagccaaacatgatgcggtcgatatggatccaaagaaaaaaagaatcaccctttcaatacgaaagtgggcgagaaatgcccgagactagaacgagcgagacggatagacaagcgcggaaggagatgggacaagacatgatgagaatcaacatttacatatacccagagaatacgtcatgggctgttgtgtattttttccccgtgtattgtcgaggttagctcgatgaactcattcgccaatattgccagccagaccgtccatccgtcttcgaagatcgcgctccaccaactgcagacatttaatcaatgtaggaataaccttgttaatagtagttctctgtaacctcatgcctagaagacaagaaagatgtaagaaagagaaaggcacaaagacttaccagataccaccccgtgaggaaatatcctaccaagtttggccatacacattgcctcaacacgcttccccagttcatccgtctctttgttctcaccatgcccttcaccggggtttctcctccgtttccgccggcaccagatgcaccaccttcggtcgtcccgcctgggaacccgactgagccgtgaccgaaatcttcacctccgatgacggcatccacaagagtgtttcccacctcccgagctctcctcgagaccatgacgacagtttgagcgaagacctgtctggacgatgaattttgcgtgactgacgaagcattcgaggtcgaagaaggtgtaggagtggaacctgaacgaccggtgtgggtcgaattgtatgtggtgatgttactggtgacgtagatcctgatggtgttacacaaactagtgaatgtcccaatggcgacccaggcgacgagcggtcgggaaggcccgagaagtcgaagagtgatggatgtaagaggccaacagatggtttggagagagagtaatcggacgagcgtcgatacaagtgggtagtatgccaaccaacgcctggttagtccagaagtgaggagaaaacattgaagagcagtcaaaagggactgagttatgtagatcgcggacgacacgtaagcatacatgcgtaaggttaatatacacatcaaagcaggagaggaaaaggtgaaatattccaaacacaaaaagacgaacccaaaaacaagccatagcgcactcgacccgactaccttcttccgttccaccaggtctggccgagccaaacccagcgactcggcaaagcagatacagcgtacccgccatacttggcacgacgctaagcaatctgagcatgaacaacacagaaggactggacgcaaaggtctcaaatttggaagtctgtctgaccgcatgggtatgtagtcgagctgtcggaagctaaaaatccacgtccagaaagcatcttgtaagctggtgaggccaaatttcttctgttcttgtctagcagacatgagcacaaagaaagagggaagaagcaaggaaaaggagacaaataatgaaggatgagaagtcttaccggttcctcgccgtcagtgctcaagaagttgacatctattccactttctacaccagtctctacgacgggttctgtgtttatgttgacgagtcctaatatgttccccgcccccatcccctctagagcagtggtcgaacctctagatctcagcccgttgaaaataccgcttcctatcgacctgccaggtgtcctacgccttcttctcggtatgaagcttagctcatcatgtctgtcatctccaagcgtcgtgctggcctcactgtcttcgtcgatgtcattgttctgctccacccggggtgcagataatatctcatccagaggaggagcgaaatgagctccatagtctggcggacgatcctcttgtgcgggcaaagctccagctctggatgttgacggcggtaggggaacatgcaatgacgttagtggactcagaccgttaatgaacgaagctctcggcgaagagggttgagagtgctggcggagtagatgtccagcattggtaagattactatagtgtgaggagggagatgatgaagcggcagcagagggaaaggcagagtagtccgggggcaaacgggtatcaagcacggggcttctagacatgtatgctggtgcatatatcgatggggatgaataggaccgatgggaggagaaatgagaagtaaagtaggacggagaggaaccatcttctggtgattcctccaatcccaaaggtgaattgtttgaagaagacacggttgatcgagtgattcgagaaggcaaactcgtggatgctatgggatggagaggtgtgaaacttgagattgatgaaacagattcggttcttcatttttttgggcatcatcatacatagaaggaggtagtgtcaagtcagtttgtgggcaaagtaagctataggtaggatgaacgaaaagaaaacgtatgcagacaattactgacctttcccggttatgcttgttcttgagaggaagattggtgaatgagcctcttgatggagacctataaagggataggttctctgacgatcctgcttgtgaggagcttccgttggcagtagccgaggtcggaccgcacgggacgagctgggaatctggcctaggcctgagggcagtgaaggggtttatgggtgaaaagttgaaatgatagtgttccggtggagtcgtcggtgtggatgtagatatgccaagagtggatgtatgctgaaatcggtactgtgctgaaggagagagggaggaggaggagtacgacctctgaggaaacgacgttgatgaatcggaggctcgaaaatcaggcgatgaaggatagtttgtcgagttcggagggagcggcgtgagtttgagttgagccgagttgggtggagtgaacggtttgagggcaaatagagggtcgtagaatgtagaggtcgtgtgctgttgagaacctgttgttattgtcgaggatggggaggatggggtcgtggcttgtactctgttcaaagggaattcaatacatgactcgagttagcaccagcacacaatagagactccatgcctatatccagcacctatacatggagatggactatcgagctggctctatttgatggactaggattgtatcggtatcaactttaaattcgacaaacatacctggaactgccagcaacgttgttgaggtctttcgacacgcttggtagacgaccagaacaatcttcaagagagagctgtggcggtgcacgaattgttgatcctgacgctggagaagatacagaaccaagagactgagtcgaatgcctcgaagagaatgatgaaggtctcaaagaatgaggtcgagggggatgagaaggactatcgaatttgggaggagaagcggaggagggcgaaggaggtaacctaggagacgacagagaatgacgtggttagtacccggcaatccccgagatggcaagtatctatggggtgtgtgtgtgtgtgagagagagagataaggagggagtgaagaagatcaagggaacgtacgttgaagaaatataggtcggggagtgagcagtgcagagtgagcacattatacagatgggctttcaaggttggcacgaccttcaagctgggatagatgagataggatggattttattcgtccttctgcctcttcgggcgtgattatatgattttaagctttatcaaaagacttttgttccaggaacgagataggaaggatagctagaaggatcagataaagaaaagggacaagcagactgaacagtgacaagataggaagcgaaagaaagaagaggagcagggagagaagaaggtcgagtcgagaaggatatgtgcaaggtggaaatagggaacgaaggtatagttttgccggcggtcccctccgttctctgggatatatcaacgtatggtttattttcttttcctttttttttaatattctttttctccgttgctcccttttcctagtcgtactactgactgtaccacgttctagtttccaaagatattgaatgtgggcaagaggataactagatgcatacgcttcaggtagatggatgaaatatagtgtcttgccgaatcttacctggctgaagagcatgggagagggaggtgtttcatccgtatgcgcggtaaacattcctgcggaaagcctctctgctcatctctccctctcgtgctctgctcaatcttggtggacttgcactttgccttctctttttttttcttcctttgagatggaatgcgtatgctatcggcgtggagcataaatctcgccgcgaccaaaatcgattagtcagccacctctctctacagatggaggaggtggatctatagatatcaattaaacaaggtttgaatggttgtgtgtaaataaaaggaggtcggcagatagcgaggcgttgtttcgtcagacgtacagtcgctgatgaatgagaacatgtacatccacggactatatccgcttccgccctcccaaggaccaagaacaaaagaaaaaatcactagagggattcagctgttggctgtccatgagagacatgttgctccgagtgatttgcataagctttggctgtgtgttatcagatgaaactaacccaccttgctctcattcccgctctcctttcctcgaatcctgcaacgaacgcacacttggaagacaggtggtgcgctcagatcagatcggttcttgcttagtttgacgatgaatctacgtgtcccgcctctttccgtccaactcgtacagctctgaaaggaaagaacgtttcgcatgtcccgcctcatcttttcgtttgcttcaatcgtctgcttatcttccactcgtcatttatcttccacgaatcgtcatcctgatatcttttaatctggataacatacaatctagaagattctctggctggcagactcggtggatgcaagcttagattgtctgggttttcctagaattacaaatgattttgtcctgttaacctgtagttcgaccgtgaatgaataagatggactcgatcattcagcaggatacgatgatacgtatcgaagaggatgaattctgtatgtcacaccggactcgggcctctgggtacgtgcccaaagtatgcgatccctatcatttagacttttctgctatgtttcgtaaggatgatctgataaacagataggtttatagataggtaaacaaactttgcaatctggccaaagaccacagtcttgtttgtcttgacgaccacatcccgtcatgtagatgggttcaaagatgaaacataaagaagaccgccgtctcgggggtgaggtccaaacgcatttgccagaaacaagtacctcgagaatgattttcttttctcttctctgttcatttagagtgtgactctcgttcatctcagacagtgtcgcttccgccgcagtagatgcaagctccttggccagtcaaacgactcttacacccctctgtcttacccacccagagcagaggttgaccaaagaacagtcgaaagggatatacgaataaacagtaaacagacagacgaaaaatgaatgtggtatatattcaatgtgtattgagaaagggaagaagaaaaaaaagagaaaaacatttgagattaaacaaataaaaggggagaaaagaagaagaaaagcaagaagagaacgggtcgacgaaggttgacgagacatcagaacgttctcatcaaacaagctgagaatacatctatggaatctgtttaagcagccagaactgtcttgatgaaggcctggagaataagtattcaagcgcaaagaaacagtcaggacagatggttccacaagatacaagagaaacttagaggaagaagacaaacctcgtagttgacttggccgtcactatacaagccagatcgggattaaagaaacagtgtgttagggttattctgtgctgcatctgggcgcgcggcaaatggactcgtccaacaacttgcttcgttccgtccgatttggattgctccacacgcaaagggaacccttaaaaagaaagaaagagagaaagagagaaaataactcacggcgtcacactagccatcttcaatagctcctccacctcactctcctccatcttttctccaagctgtgtcaaaatatacttgacctctcctacggcaatacgaccagagtcttccttgtcgaacactttgaatgccttggtaaactcagctggtggagagcagagcatgatagcttcgtgagctgttcgtctcaccggtggtggttggacacagcagaaacaatcaaatcaggtttatagacataccaagagttcctgccggttcccatcctccaggccgattgaggatttgcacaaaggtattgtagtcgactggaagcagacacacattgtgtttcaaacatggccaatgaaaaagtagagtgagcttctttgctgtcaacacaaacagccgttcacaagtgaacccttcctgagaagcattacacaagcccagctcatcacattcctctctagttttcaaagaaaacagtacaagcatactcataggcagcaaagagagcagcaagacacgaagaaagaacgcaaacaaacacaaaaagaaccaacgtaccatcacttcccactcggctcgtcaattgtccgacctccgcctgagtagggttctggcctagtgctcgaagaagatctccaagctggtcagccgagatgaggccccttccctttttatcaaagagaaagaaagcctctttcgttgaatcttgagctaacgtctcaagtcggaccgtcggaacgggtagaacatagtgagctcatagaggaaacagagggaaaataactgatgtatatatgcactcacaagcagactgaacatcaacacagaatcacagaagaacgaataatcaacatgattaattttaaagtgtcaagcaccaccacactagcgaacagtgctcaccatgttttaaagatataatagaaaggacaaaagaacagggggagaggatggctgtgagtgatggaaaatcaagaagagacgacaaaagtgaaaacaagacgcgtgtagaagaaagatagtctgtaaccacacgcgtaaccaatgtaacgatcgttcgccttctaacccattactctcccaattcccggtagaccattttcggttttgtcatattcgtccttcatctttccactcgtcttcttaccgtttgctcttctctggaacaggatgtctgctcaatttatcaactggtcagtccgtctcttggcctgtgaatctaggaatgggtcgacagggtcactgatcttctagctctttgttctctctttcatctctcttttctggatcactcttttttcctgatcttttttcttatcctcatttcttctttttcgtcgtcggacatgaaacccgtgttgggttttcttccatcttatcgtccgacctattgccaattactgttttctatgtctattaccacccaacaggctcaagtcgcctcaaggccgagcttatttcttctctacccacttctgtacgtacttcttcctgaatagagtaaacggagaatccaattcactcaatcttgtctgatctttttggtgtaatcttcatataggggggcccgtaagtcttttcaaagctatcgctctgtgtgccaacgtctcttgagcaaagccagtcgttccttgctctgattctgacggtgaacaccctgattactctcatcttctgggatctatataggttgccaactggggtcttcctcttgccgctttggcagatattcagaaggatgagactatgatctccggagtcatgtctcctgtcatggccggatactcgtacgtctggttctgctattcaccctctgttgaaacgttcggcacactgattgccggcttctgatatctctatctggcagatcaatctttatggcttttgcctggcaggttcagcctagaaattagtacgtatcctcttcaactcttgcctttttccgatctacttcaactgatttcaccgattctatcatacgctcgtggaatccttttcttcactgaattttagccttctgttcgcttgccacatgacaaacgctgccgcccaggccgttcagacttcgcggtttgtcaactactggtacatgggaggtaagttgaaacgctttttctgcagaaatccatatcttgtcttttcagctgctgattgtattgcatgtaaacatttatctgtgaatccactatcataggtcgagagaaaaagcttgctgccgcccctgagtctgccatcctcaacgccctcgaccaggctaaggacgccgccgcttctggaaccgctactgttggttccgccgtttcgaacgaggctgccgccctcaaccgagctgctcagaacgaggccgctcatctccgagaacaagctcgtgtgctctccgtcaaagcccagtctgaggttgcccagcttgctgagaagaccaagagcgaggccgctgctttgctcgctcgggcccagcacatcgattaccagggatctttggaggctgccaagaaccatgcggccgctggcggtgaggatgctctgaggagggcaaaggagatcggaatcgaggccaagagggagttgggagtcgccaaggattacgtggagagcaaggttggagagctgacgggcgaggttgtgaaagaggagaagaaggctaaaggatggttcggatggggcaagtagatgaaattgacagggtcgcgcttcaagcttgctcgtgtcaaacaatcttctcgagaataccatctatcctcttttgtagaaggacggcttgttagacacaaagatccccttgatatatatattcgcgggaacacaagtctttaaaacggtctctctgttcctctttgtcttctatctttgcctatcttacttgatcttaatgtatctaaaaccattcatgtcctctccgtcccttgccccctgtggctttactctctcttcaaagaaaaaagacttcatcttatcacacggcaagtcgtactggcatgtgttgtaaccaaagcgtaaccaaggttacattcgaagttcacccatcatctctaattctgattctattcaaaacgctctatcaaccaaaatcaagtgttcgagacattccttctttgagccctcgacaaacagatacacacgtacatatacacccacatggacgtggcttcttcgtcagcagagccgttccaggcttttgcttccatactgtcatcatgttcgctggcaggaccgtcaggtgctaagcaatcctctccagaactggacgatctattggatgatcaacgaggactcggtatacggtttgcgagcgtgttggaagaaatgtacgtgtttaataccctttctttcttatttgggaatgtgaagctttataagaaaccaggagagtcagcctgtatggatagcgtgacgaatcaggtcatggagaccagatccatacaccagaatgagccgattcttcgtcttgaatcgagacttataaacgctgcttcggtgaacatgagggctgatcaacactcatcggttgcatacggttgatcattgggaattactcttgaaccaaaacagggtagcagcaaagttgtctcctacggctacacaaatcacgacggaggaagagattcaatcgctctcactcgaactatccgcttggaagttgatgcattcgctcctctcgtaagtcctctcttcctccttctctccttccgagtctgttggggctgattcggcgccttcaccggtggtcatttggttctatttcaatgtcatgcaaataaatcaaaaactagggatcgactccgaccaccatcacctacagtgtctccccaagagctcctcaaccacaatccttacacgcccccgctaactgtcatccaacacatcatctctgaagacaccgagctagctgaatgggtactcattcatcgtcatttcatgactcctgatccatggagaagtccgttcgggatggtcgaaagaagagaaggcggttgggttgctagtaaggcggcgctgaagagaggaaaagtcaccgccggcgggcccaggcagaaggacttggtcagggcgttggatccggatgcgcctgttcgacaggttggtgtcagaggaggaggcgagctggcgcctgaagatcatgtaagagctttgttccttcatcgtcgttgtttgtcgtcagtttctgtaggcttctttccgaaaacggctagcttgcgtagctctagacacaccttatcggatatcttgatgcgttagagtgtctgaacgtgatgattcattgccctcgtctgacatcttttgtttttgaacggacgctcggtttgcttgtagaaccacaccctgtcgctccttcctgccttgttcacatacctccgatacggtctatccgatgaatgtgctgctctgtgccgagcaaacgatcagtcatggctgggagctagcttggtgggaggtggctctggatggtgggttagcggcctaagttagtagctcttcttttgatttcgcgtcagaatcgtacatgttcaaacgtcaacgctgattgaatgccactaattcactgtgggggcgtgtctttcggcgtcttggttgaaaagatgaaaaagatgaagccgggatggacgtagaggatcaagagattcagggtgatatgaatgatgctgaagtcggaaaccgaaatagaacattgtggaagaagattggacgcgctgtggctaccaatgtgagtataccgcacaacaatcaaccagagccagtcggttgatcgtcgcactgtcgttgtttctgtctattaggataaactaccggtatatgaacgagctctatatggcatcctgactggttacctgcccgccgttctacccgtgtgtagaagctgggaagaccatgtctgggcacgaattaatgcacgaatcgaggaccggtatgttctgtccacgagtctcttttcttgtttctgtctgctcgtctgcctgctgaccccttactcggcaccgattgttctgttctcgcttacggcgcggcgaacagaattgatcgcaagttgaaggaactgggagggttctgggcggaagagttaggtgtgctcgagtctggcgaaggggagagcgaaggaggaaagtcatcaggattagaggaggttttcaagtctgtcatgcagatagaacgtgatggcgtcgcgtaagctactcttcttttctcttctcttcggtttgatgtctgattctgtgtctgtgtgatatggattaatcaaattcgtggctgttcattcctctgttcatcagcgcggccgcgagggatccttacaggatggctatgatgtacatcatccttggtcggacggacatcttgttctctcagtttgcagattctgttccccgtatcaaacaaagcgtcgctcctcagtaagggatttacttgtctggaacgattcttagtgttgcgagattgtgtgacccaagctgacatctgatatcaaacatgggtttaaaaagcttgtactcccaactacttcggttctttgcccatctcgttctgtaccttcgacttctagataaatcacctccagttgagtttgccaacataatcctccaagcttatctggatgtcttggagaaagaaggccggaccgagctagtggctgtgtatgctggaagtttgggcgagagacacgcggaggagagttatagtcggttcctcaagggtatgtgaccttacgcttgctgtttttctcttccaagggaatttgtcctgctcacatttgttttctttgtttcgtttttgtttgcttttttctgtaaaatagacatgaacccgagggtgtctaaagaagaaaagagtgttgctcttttccgagcgaaagagaatgggctggatctggtcgaggtggcgaagattaccgtcaggctcatcatgggcgaagcattcatagcgcttcccggactggaacatcccgagcccgatatcactgatttcgatacgaatgtcatcgaaggcggccaagattggattttgatccgatcgttggaatggttaacagtcagcgatgagacattccccgaggcgcttatccagtcgaatgcgctcgtccgatacttcttgggtacgttcctctctttctttctttcttttacagttgaagaacttagcgatcttgcacttttgtatcagactgacgctcttgttgtttggtcgttcgttcgcgatagcctctggcaaagtacacgccgcaaaagaacttttacttgagctaccgagaaagcttcttgatttctcgatcaaacacgcatcgtctccttcatcttcgtcatccgtgttaggtgacgaaccggagggagaaagtgagttgtcaagtttcgcaaacgagtacctgcagcacatcgaactgtttgaggttctaggtgcgttgacgaagtgcgtggagatgatgacgacgcggcctcgggcagggtacgtttgtgttttctttccttgtccggatgtgatggatacagaaaggttgactgatgatatttggttctgtcgataacaatgtgatgggggccatacagaactttgaagatcgatcaacttgaatggcagaagaactttacagtgaggatgccttatcgtttcagttctcgagagagattttgtctaaatctgagtatatctgctatgcctctgtctctgtcttcattatagtctttggtggatagggcctatacatcgacacttgatctcctcaaatcggattggctccgccttggactggatgccgagagcgaagaaggtaagagataaccacgtggagtatgtggattcattggaaggaaatgactgatgacttgaaatgtttgtggtcactacagaatcacaacgatccatagagttagctcgagttcgacacttgttcgttccagagcttgtgttcagagtgcataccctgttggttgatacccgagacatcattcctcagtaagtgtttccctttttttaaccctaccgttcgaataaatggcaaagagatcatccgataactcaagtcagttgcttgtaataatctttcatcaaaatttataggaacctcggaaaggcgctggagctgcctgttctattggcgaacgaagagaccaagctctatgttgagtgagtgtgcatccttctgggttcagccatctctcatctgacatgccctacgatttcttaccgtctcgtgtcttactttcaatccgtcttccgtttcaggttcattcctttgccaaattccaacactcgcaaccgattggcagactatctagacttggtaagccagacgagtatggcttgtctgcaagatcaaaagccagacagagaaggacttggtggtccgagaccggacgatccgtttcgcgctccattaagctttgctcaggtcgtcagaggtctttcgtcttgatacaagtatgcaaatggtcaccatccaagacgcagtcgtgcaagaggacggcaagtacgaagcgtggagaagcacgaatggggcggggagtatgaatgggattgagagcattgaatgtacaaagtgaatgtatgcgctcattgtttactgcttagtcagccaaatgagaaaaaactaagaatctcgtgcaatctctcgatgcatatgctcggccgccatcgtgtttttaacattgcccatctcagacatcccgctcttctagttgggtcttgaacatccatcaagcctctttgttttttctataagaaccatcgttagctctaccctaatctctattaccactaccaccaccaccaccaccgccaccacattatttctggaaccaacatgtctactcaacctcagatcgagatcgtatgttttgtcttgtttgtcttgttgttcaggcgatcgaataatcctgaccgatcgattttctgctttgcgttcactcactcttttccccaacaaaaggctaatcctattgccatcgtcaaggctcagtacccttctcctgaggagtacaggaagcgaaaggtcgcgttgatctctggtgagaatcgtttcctcattcttctccttcagatccagctgggttgtgcacataggtagtggtagtcagcagtattctcggattatgtatctcgtaattctgttgaacgagagagagctatcggcctgttcactatcggcaatggggctcaagatgatatttgacgaggtcaagtctggtgaacaacgtagctgactgacgagacgtgtttctatctcccgctggtctttctgatttgtctgggcttgggcaggtatcaccggacaagacgggttggtcaccttctcttcatcattccacccattgtggaggatttgctcattgcgaggcccgtgattgagacaaatcaggccgagaagctgatcttggtttctttgattgttaaacagatcttaccttactgaactcttgctttccaagggatacgaggttcatgggtaggcagcgttcatctttctaccgccggtacagatttatgtcgtgactggcctcatctttttatttccgtttttattttattttatttaaaataccaaagtatcatccgacggtcttcctcgttcaacagtatgttgtgtctctagctcttctttctcggaaattcgctgatatacaaagctaatcgccctgctgtgtatttcactcctttcttctctgttcaaacagccggtcgacttcaccacttgtatgccgatcctcacagcaagccgaagatgatgcttcactacggagatttgaccgacaccactaacctcgtttacgtcatctctcaggtcttggtatgtcgactgcttccattcatctctagattccgtattcgattttacttgccccagtgccttcttcctgacacgtttactacttttctagccgtccgagatctacaacttgggagctcagtctcacgtcaaggtctccttcgagatggcagagtacaccggagatgttgatgggctaggaacccttcgaattctggatgcaatccgaacggctggtttggaaaagcacattcgattctaccaggtatgtctttctgcttgttttggtggcgtgcagatgaagagattgcttcgagtgcttacatatatctcttcctctgtaattcgcttcgagtactaggcatctacctctgagctctacggaaaggttgttgagactccccagaaggagaccactcctttctaccctcgatctccctacggtgttgccaagctggtgagttgacttgaccatcaacctactgggtcgaccagattggctaacgtgtttaaattgatctaaatttgcaacttcttcagtacgcattctggatcgtcaagaactaccgagaatcctacggcatgtagttcgtgtttttgtcgcctgtctttttcttccttctgtctgtcgatcccagccacgcacctattctgatatggtttgttcttcaacttttaatagcgcctgcaacggtatcctgttcaaccacgaatccccgcgtcgaggtcgaacattcgtgactcgaaagatttctcgagcagtggccgagattgccgccggcaagaccgagaccctgtacctcggaaacatcgacagtgtatgtaacctcttcctcctcctttggaaggcctttccaccagtggcctgaccttgattgcgctcgatgggcgattgctagtgccgagactggggacatgccagggattacgtggagggtatgtggcgaatgcttcagcaggacgagcccgaagatttcgttttggccacgaacgagacccacccgatcaaggagttcattgtaaaggctttcaaggtcgtcgggattgagcttcggtacgagttcccatttctctgaatcatagttcggcgaggatctttagaaaatcggacgatataacttatgtgtttttgcttgttgactggggtttgtaccgtcagatgggagggcgagggtatcaatgagattgcttacaacgtcgcgaatgataagccagttgtcaagattgacgagaaatacttccgaccggccgaggtcgatttgctctggggagattgtgcgttcttctgttttcttcttcctttggtctcactgttgtcggtgtatcaccgcgcgcgtctgccctttctgatcatttgagacgtcaaatatcgatactaaatatttcatttgccttcttttcttcttccttttctggaaccgacagccacaaaggccgagcagaagctcggatggaagaggacagtggactttgacactcttgtcaaggagatggtcgaggctgacgttcagggagtggctcatcctatcgaggatcaggtgagaggcatttctccttcttgtttctccattaaacatgttgaacgacgttgattttgaacaatctctttgccgtttatctttctgctctagaactaaacaatcccagaattggcatttcttgcctcggttcactcgacttgaccctttccaaaatatcttttcctctctttgggcttttgtttccctccgattcttccttctggttcaggtaccttagctttcggtctccattcataacaagatgtagcatgtttttttactctgtcttctcatatttccccctccatcgtctctttgtcctctcatcccatcaaggccggtctgtagaggtttcttatccatttttttaaaaaaagaagtcttctttcccttttttccttccattctcttaatcccttttcgaaaggccctgccaatcttgtcgtttgctacctcactctcggacatatcgttataatagatggtctgtctgctcctcacgaaagacgagacgcacgagcttgtttgttctcttgttcagcttttttctacttctttcgaggctgcggtgcagacggatgagaatccaagttcaaggttgggcctgtgcctgaattatattgatgaatacagagtaaagggtctattaatatatatatatata

SEQ ID NO: 2094 - DNA, 2381 bp, Xanthophyllomyces dendrorhous
tatatatatatgtatataaagaagagaataagaagaacagggaacgatatgaagcgaagagtacagacgttgggagaagaatggacacgttcgatatgcaaggttggagtgatgtgggtgatagagtgtgggactgacggagtgatagaaatcgatacagttgagaaagtgaggatgtgggttccagcgaaagaagaggaagacttggatatggaaggaaacacacaaagcaaagaagatatcaagtaggaagaaagaaaacaaaagaaccaggaaacgagaaaaaaaggaggagaaaacgagcgagagtcggatccattcaagcggtcactcctctggagaatgccggaaagtattcttccgcaccatcagacccggatccgcgagggtatggacgggaacgagaataaagttgagggtgtttgggtgaaaagtagatcgagccgtcttctgtaggtcggaggatagaatgtgaggccaactcgagcgagaactgagggcaggtgtatgtgtgtcgatccgtatgctcggtctgtagtcgagaatgggggaacgacgaacacggatctgatggtcctcggtttgggttcgctgaggatgaagggacaaatggactgtttgagcatgaagagttgatttgcgcccagttctggtgtttatttatttgtttatttattcgttgtgattgttgttgtcatccaagagcgagaaagaagaagaagaagaagaagaagaagaagaagaaaaaattgaataatacagcgttaggaacgggaaggcaagagtctctgagagagaaggattctgtattgcaacaaacggaaacgaaccttgacggagacgggcagcgggaacctgccagattcgggtgacgaaggacaggacaaggttgagtcgaggctcgtgtagactgtctttgttcttcggagaggcatctctatgattgagtagggatcaagtgtttcttcacagaactggataagttgaaggaggtggtctgcagaaagacaaaaaaggaaacagaagggaacgtcgctcgcttgttttttataccaaagcggcaaggagacaaaccgacgaggctgaacacaagggaattaccggaaacgggaccgtcggatcgattctgcgggaggtattctattgatgatgtattcactcatgccgtttccccttgcgctcttgtgctaaacaagccggatgtatccgatgtatccgtttcattaatcaacctgatgagttagtccatctgatgttctccttcttggccgtctccaggagctcaaccattaaccgtttacaaccttggttgcatgaacatggcactcaattaacgcctgagttcgatggcgagagccggccggtcggtgaatctccgaatccaaccggtgagcaggatggcgctcgacgcgccttcgcgctttgctcggccgtccggccgcccggcagcagccagttcacacgccccacaggcaccagagtatccatccggatcgagagccgggtctgaccggacggcgttgggtttggctgctgtgcggatgatgaatcgcacgtgtctaacaaagttgctcgagttcacgtctgtttcttcggactgcgcgtctttgtgttagcgacgcagcccgggttacacttgattcgtaagccgtgacctattgacctttcaattccgctttcctttctctcttacttccagtgcattgtactaccagctcatttcacacaatattcatagtgtctgagaactgtatacaagacgggtattctcgaccagttgtagatgagaagaccaagcccgggttctctgttgctttctactttctgctttctccttctagccttgttctgtagtatttccatcaacctcgttttccttgttccaagagtctgaacttctcccttgaaacccgacacccgttgtgtggttactccacttgtaaccctgctgttaccgacccatcctccgcccctgatgacttgccccttttttcccactgtcattctattgtctgttcctggtttcacctttgaccatctcttttgttctccatcagtctttctctccctcaccaacaactttatccgatcgttgtctctttcatgatgctccgtcttctgtatccgtcggcgtcttgtttttgtcttgttttggagaacaacatagactgtctctcctctctttgatcgtcatgaccgttgttttgctttttgttgctgactcaccgtctgtgcgctctttgttgcacaccgcccacctgtccttcctttgatcgaccgagactaatccccgctcttcttctccctttcttagggaaacatcctttcaaatctttatagttgcgttcaacttgctgaccgttttttttcttttttttttc

SEQ ID NO: 2095 - DNA, 11157 bp, Xanthophyllomyces dendrorhous
ttttttttcttttttttttctttccttctcttcctcgatcaactctccgtatattcgttaccacctctctctccctcctcatagcctcgtggcttggtcgtgttcttgaacactgttcatcttccttctcgaacattcgcaacatacgattcagttccaagctagtctaaccatgcagtctaccttcattcttcccgcttcatcttctccgtctcctcttgatcatgatagacattccgctggcgaccccaatgttctctcacctattgcttcgccttcaatcaacacgagtccaatccagaacagacgtccagctagccatcgacagccactcactatatctacacgaacccagcccctcaattcctctttcagcccttctttcagtccttctttcagcccttcaagcttccgctcattgggtatacattctgccggtcgaacacgtaccaccgctaggctgaccaaattctcctctcgatctcctggcacgccagcatcaagaaggtcaagcgcggcctctgtcaagagttacggactctctccagtattgaccgacgttcgtcgacgttcagcttcgtcttcagtcaacagatctcctgccggccgaccgagaacacccctgccgatgagttcatacgcatccattgctcagaccagaccgatcaccccagagatcgtcgttctgtacgatgaagagtcctatatggatcgaagggcagctcggaactcggagtgctgcctgtctctagggattgtcgacagtttctctgcacctttcactgtgaatctctggccatcgcctccttgctcgcccaatccatcacccaccaccaccttgtttcccccaatcgtcctctctcagagcggtcattatcggtccagatacaacggatcggacgcctcggtcgattctttagagaaaacatactgtggacagagatatcagacaacggcttccgtgagtagaagtaagtatcaaagttggtcatccaaacgagcaccgaaagaaaccaaggaagaaagagcgaggaggaaggcagcggaagaacgaaggaggcggacagaggccgatagaccattgccgtattcgaagaaactcgagattgacgagtttttcggagatgtagttcgttcctctgttgtttccttcttctgtctttcctcgccgtaccagttcatgtggcctcagttctgacatttcataatcatccgattcaactatagcctgcgaaagaacgaaaatcaaaacgacggacgacgatgatgacaacggtgacggcatcaacgaaaaacagcacggcatggtcaagtaaacaggccgacagaaacgtcggtggcggtttccaagtcgatcacgtttcacaggatgggaccgtttggctagatgttgaggaagaggttcgtcgttcgctttctctctctctctcttgggcgcgatctctgtctcatagtgcatcaacgctcactgccaggaatgaaaatctcatcttggatcttggtgattacagcaagaatgggcttggctcatttcggaaagtgagaagcacggacaggcccttcctagttggccacaaacgttcacctcccatctcttcaccaccaaaaccgagagtggcgcgagcgtgaatgacccagcgtctcctcccatttcacctctttcgactaccttcgagcgtccgtctatcaacccggtgaaaagaacggcaagaaagacccactctcgttcgttttctcaatcgtttacttctctcgcggacccattccggaaggacgatgactggcacacgagcgaacggacgaaaccgaactcaagcccggctttgtttgcaaagatgtttttctcggatcctgtcggaactaaaaacgaaaagacccagtctcggttccattctcaggcttgctcgaggtccaactcaggatcaggatcgactgtgtccgacgaaaggattcagcgatgcaaaaatcgaccgaccgggtcaaaatcatcttcgtcatattcttccagttcgacctctgcctccttgtctgtcaaacttgtccctggtgagattaatgccaccaataaacacattcaagaaccttcttctttgccgatagctagaacgccgacatcgtcttcaacatcaacaacatccacagcaacatcaataacatccacatccacattggctagctcacagaaaaaagtcggacagataacaccatcagatcaatctgatctcaaaaagagcttctcgatcaatatccttgaccttcggctggccgatcaggttcaagtagagaatggtggtgacgataacggtgatgagcatctaggtttgagaaatgaagcaaaggacgagaagcaagtcccggcttcaaagaaagtcacaagatttaacgggacacataaaaagtctgggttcaggagtgctctcaaaagattcctgaaacccaagggaggaactaactcggcttgaagcgatctggtttgagctgagctcaaactgggattgaggttgtaatcaatgtacttttactctattctttccaaccattgcttcttttccgtgatgatgtctccattgtaagagaagaacagaacaaacgaatggagaaggaaacgtcgattgtacaaaacctgtcggtatcttgtgatctgacggagtggaagaagggaaatgaaaggcagatcaagaagacagagagagaaaagagtttataatcatttatcggcttcggcttcttcctcgacatctccgttcgcaagagcctttttctcagccgccaatctttctttctcttcccgttcttccatctctacgacctattcattcatgatggatgaggggaggacgggttaaggcgtaagatcaacaatttacggtgagtgatgatgatacatataaagattgtaaaggtagaaaagagacggaaatcaaatttgaagacggacctctatgtctagtgggaagttcaagatagctgctacacccgttagttgaattaattctgttgggcaagacaagaatcaacgacgtgacgaaaaaaagaaaagatgaataatatcagaactgttggatatgatcaaagcagggaggggggagagacaaaagtaggaaaggaaaggcgtacgttgaccgctttcatgcatactggaaaagatcaaagcttccccagatcgttccctaacatcgtcaaccatggcgacatatcgctttcgttggttcacgtcggatgatctgataaagcaagattttgttatgttttcaaggtcagcaaaaaaaaatagttggttcatcagcatttctttctttggattagacagaaatcagacaagaacaaggaccaagacaaggatggatatatacatacctaaagagctcatcactgatcatcaatgtcccaacagctcctctctcaatcgcgagcgccacatgatcgggtccgtaccacgctcgaagctcatctgttcctagcattttgtggaatctacaacgataatcaagccgaagataagtcagttttggccttgtttctgtgacgtcgatgagatgagaggtacaactcacttgtcaagcatctgaccttctctggcatactttgttccagcaagtaaagcagtaacctaagccaacaaacccaccacgtcacatcagatgagttaatcgacaaattatgacgaagaaaaagtcaagggaaagtatctacttcggcgctccgaagtgcttcaacaagagcgtgaacatgcgaagtcgtggtgtgtacccgaagccacttgcttctactctgcgtcagtgccttgtttgatgcacgaatggcctctgcaaagattgagtcgaatagctatgttgataatcgaaaatgattatagatatgaatcagacgagtatagttcatgtgaaaacaagaaaaacaagatgctcacagcgtccttggtgaaaccaggggaagcgatgacgatcgctttcagtgtcgtaaacggaagatgtcgaaggacagcctgatacactgtttggaaaaacttatccatagcctatgagagatggaaatatttacgtttagaatccgcattcgacgctttcggccaagatagatagaagaagagggcaccttgtcatgcacgcctgactggccttttcgtttacgaggcacgggtacatcaattcgttgtcttaccaccgtcatatgctcggtcaatagacagacggtagccgttccttgataatcaagtatagaggtataaaattcagtagatttcccaaaagtaaaagagatgcttcaacacttgttgagggaatggcaactcggacagacaaaccttcaccgcaaacaatggcgcctacctccgctcctcgtccctcaaccgtggcttcctcaactcgaccaagcgcaacagaatcccaaccatccttcttccaaatatcgaaatctctattggctgtcaggatacatcacgtgcagatcgaattgaaatcaaccggttaagagaattagacaggaaggaaaatcatttcgtcaacgggctctgctacgtatgatcagatgaaaagaagaacatcctcaccctctagatctaaggtatggaatgcgcccatcttgacatgcggattctctcttgttactcttccgctcagatgaagcgcacttgtcggttcggctgatcccgaaccgatggatgttgaagccgccggtgcggctccttggacggagggagagaactcggactaagagaattggattcggtattttactttaagaataggtcttggcttcttggattgatgaaaccacaaagtatgaagacatcaagaggagagaggaaaagaaaaaaaacatactttggtgacttcgagggtcagtgtcgtccggactctatgggacgccgtcgacccagttgaagaaacgttttgcacacgtctgaccgcctgggctctcacttcatctccctttgggtgtgattgtcacacgattcaattttccgacataggccacttcagcttatgtctacctaagatcaaaaatcatcaggttaagaatattctacttacgacagagactagattatagatatgccacatatcctcatcgtcctccggctgaagtcggatgtaaccctgtgtagttccaagaaagatcgccaggcacaagaccacccatagcaagtttcaatgtgaacccatcaatcgtcaatcattccgaaccgatgagtgaaggacgttaggtcccagaaagagaaaaaaagatgagaacggtgggaatgacgtcagatatcctctgccgtcttctcaagactagagaccgcattcgatttgagttttctcaaaatgaatgtagatatggttggatacgtacggatccatccttctcgatttgtttcttgagaagtttcataggtgtaagtgatactttgattgaaacggtggtcgactcagctgaaagggaaatcaaagatggtggttgatccaacaaacacgggattcaaaaataaaataaattcagcaagcggcgattcgatagtcttaaataacagcagttgtgttctcaaaaatcgtatcggaccatgggtctctttatcttcagatacgatgggcagttgtaatggcattataaatctacttggaggacccgagcttcttcctcttctctttctccttcctgtgcctttcttcctcttccaacgctcgttgatcttcgagcctggccagcttagcacttcttctctcttccctagcggcttgagcataggagacttccatatccgagtcgtcatcgtcggagatgacgtccttgccttcgtatcttttgagtacaaggcagagaagagatgcaccacgagagaatgcccatctgtcagtgacacaattttccggctagcacgccccaactgctaggcaatgaggaaattacacttactttctccagtccattcccatcgcctcgtagatcacgctcttcattgactttccacctccacctccgcctcttctttgcctcctataatcatcactatcactctcgctctcactctcgctgtagctcctccttctctttgatccactgctgccacctcctgatcgtcggtctctgtctttgtgccgatttcggtctcgcctacgcttccgatcgtcttcttccgagtccgagtccaattcagaagatgagattgacctatttcggatcctcttggattctgtgtgcacagaggatttggaactttgacttgctttggatgtcgtttttgatgtagtatttgatgagtgagaatacgagttggaagacttggaagaaggcccgtttgatttgtgatcagacccactgataggtcgagaggaggaggcagcggtagatgattttttgagcgaagtagaagacgtagatggtttgacagagggtggcaaaacaactctttctgggctacaacttctcgtcaccgccggtgatggctttagcaacgacggcgccgttggtttctttgaaaaaaatccaaccttgcccacgtcttcttctgaagctactgcctgttccctcttcttccgttcgcggatatctcgatcgatctcgtcgatcgttcgcatatcccgcttttccttattgagcatccgaagtccctcgcccgccatcttgttccttaacgcgtccttagtcaagttatggccagctttgcctcggaacgacttggccgaggttgctagattcaaaggcttggtgattctggaggctggaatagaaaaccgtttagtggagggaaaggaggttgagggtacgggttcgttcattgctcgagccgatttgatcgctcgaagttcctcccgagtaagctcctcctttggcaccttgggagatgtcttccgttctttaacggcggaagatgatgatgaagagggagccttggtcgatcgagagaaggaagatgatctagatgcagaatctgcgaacttttgacgaagattactcatagcactgctgctgtcgcctcgagatgacaccgaagactacccaaagcaagacgcgaggtagatcagctagacgtgtcatgagcatatcatcgacagacgagtcttaccttggtaggcgcagaggctcgcttttcctgatcccgttttcgctgttcttctctctctttggcctctttctcccgcctctctctcgcctttcgaacggcctctgctacttctctagctcgaagatctgcctgtgagggattgaagacaacgcaaacacctccaccagagtcagctcacatcgttccaatacgaagtatcgcagagaaacacgctcctagatgcttgtattccttgtataaacgataattcgaagccaacaagaaacaaagcaagcgacgaaaagggttgccgaaaagaaactaacctggatccgttcttgtttgatcctctcctccttttctttgacggccctcgctgctgcttcgaccttttcagcattctcctttgctgccagctctctttgacgtttgtagtccatcggagctggagttgaaattgaacaggatgtatatgcgagtgaacaggcagtcgggcgtatgagtgtgagtgtgagagatcaggcaaaagaaaacaggaaatctcaacgtcactgctgaatgcctcattaggggtttctacaaaaaaagactacaaatccgttgtaatgagatgctacagaagcgctctgatgtgcaaccaggaaaagactaaagaaacgggttactctctttgtcagatccattagagacttgtctatagagaatctctgaaaacaccagctacttgactacaaacttctgcagcttccattacaaatctcgaggaatcttacgtggaaccgaccccatccgatcgaatgctgattaaccaactgacctccactgaccatctgctcatacataaatcgttcagataacctggtgaaatgatgaccagatgacaaatactcacatcaaatcgtttattcacttgacaaagctcaagtattccgagaaggcgttgcctctgctggagaagatcgcgtcattggtaaggagccatagaggcagtcattccatgctgtagcattgaggtcatcacttctcttgctgatgatgtttctgctttccatcttcctgtactgaaaaggtcaagccaatcatgaataaatatggttgggtattgcccgttctcgcggaagtaggtgtctctctgttcgccacccctttcgtttgctgcattgctgaacgtcgtccgttctggctatactattctcactgcatctggaatgctctcgatctcaagtttcttccggacaacccaagtctattagggctgaatgtcaatggcggccagaagattctcatccgacttagacctcaacacgctcaagacacgtttctcgatctggatgatctcataggtaggtgtattcatccattttccctttactcgcttcgtccttcccatggccagtgcattgactgaataaaccgaacacaggaacgatgctccacgagcttgcgcacaacgttcatgggtctcatgacgctaaattctatgcgtttctcaaagggctcacagatgagttcgatgccctccaagcgagcggatataccggttcgttccagccctttgccctcgtggtacatacattcaaaaattcacagcgctcatctatgtcaactctctcgcttctggtgccgaaggtgaaggattccattctacaggtcaccggttcggcacatcacacaaccttccaccgcacttggcaaaactgaaagctctggccgctgccgaagatcgggcaaagaaggcacgaattatgggacctggagggagactcggaggagctgtcacagtaggaaaatcaatgagggaactcgctttggaggtttgtttggctttatcttctgcatagcttatgttgtcatgaacttatcgagccttcgtgtttgatttcaattaggccgcgaaacaaagactgaaagatgacaagacttgtggctccggaccggactttgacaagacaactgaagtcatccgtgtccaacgagaaggaactgtcgtacctaacacgccatcctctcctcatatttccttcccccctcctgcgcattctccaccttctgcctcctctacctctcctatcaaccttgacgtatctgcgccttctgattcgaacggatcaacaccaagtacagaaccgggggttttgaatgtaggatccaatgatccgaaaaaggaaaaagaacttgacaaagagatcatcaccatcgaagatagcgatgaagatgaaaatcctcctatctcgacgaaaagcattcttcctcctcactcgacacagacggagcagaccacgttgtctgacgatgaaagaccacgtccgacgcctgatcggccggacccagaacccaaacctcaaagacaacctagattacaggccgatggatcccagaagagccggatagagatcaagacccagcaagagacgcaagcacaatggccatgcccggcatgcacatttctcaactctcagattcttccttcttgcgagatgtgcgaaacgcccagatctggctcatacccttatcaccagccacaacttcagaccatgcctggctcatcggatgttgaagcagaaggctggtactgtataacatgcggggcaggtccgatagaattgaattggtggtgttgtacgaacccaggctgttctggtgtccgagggtggagttgagagaggacttctactttttgaatatctactttaatgtatatgtgagtcttcagaatgaccttcgttataatagtcattggaaacattgagtgttgatacagagactaaagagaggggttgtgaggaaagaagaagaacaaagagcaatcgagattgtttacaaaatatatgacaagaacgagaacatgcagcagggaagatctatgaaacgatcctggaaagatatataatagagagaataaaagcaaaagattaaagacatctggactgcaatttaggcagttggaaattaagacgatgagaatgaaaagaaaaagaatatgcaacttgagggccctggaaaatatgaaccaaagaaacgagaagcaaaatcaaacgacagaggtcgataacccagagaaagaaacagagccccaaaccggagagtaaatgaggtaaaacaaggaggcgatcggatcaaacatgaggagaagaagacgtgaacgaaagagtgtgcaatagaattagcgtcgaaaagttgaatggaagacataatcagacaaccgaatggaaattgaaatccagaaagagataaatcctttctaatatataaacgcgcgcgcgcaaaacgaactatcagttcgccaatctctatcgtatattttctgattagacacttactggggcatacactaattcactcctgagtaccaaccatggatactagtgtctgtagccagcttgttttcttcctctagtaagcataccaaccttcattggtaccggagcaggtgccctatcttgagtcggagggctcatcaacccaaacgacatggtcgttgacgtcgacatctcatcattcgcactgcggccgagatgttgattgttttcgaagtttgcgctaggttccatctgactgagtccaaggatgttctttgaatattcaaattcagtcatgtatcgagaaatggcccgtgagattgtcgaagtgtcgatactagtcttcgaatgaatctgcctcagaggcaaggcgtaggtcggctcgttcgatctgcagtcttctcctgtgtaagaagacccggagagtgtagtgaccgacgttgttagagccggaatggtgtttctattgaaaagactaggaatcaagcccgatggatattccgaagaccgttggtctgatccgagagagtaccagtcatcgaacgactgtgtttgcatcgtcgattcttcatctaaagtggagatggggtacttcaagtggcaatctaactggtcatgatggttagaactgtacaattgaaattcatccagctcataaggatcggtccagagatggttctccgatatgggttgtaaacatggttcggcaggattgaaggcaaacgacatctcaggggatgaacccccattggagggaatgagaggagaactggaacatgagctagagggaatatgatctttcggatcgaaggaaaagagagagagagagag

SEQ ID NO: 2096 - DNA, 8529 bp, Xanthophyllomyces dendrorhous
agagagagagagagagagagagagagaggagtcagccgcgggatcgaagggtcaatctatggtaaagatcgtccaaatgacgaccgaagtttatccataaacatacttttgtctccgagaaaagtctcggcttgccattctcggggcgagccgtctttgccgacacccatgtctatattcgcacctctgtggatctgctcagcctctgttctgccatttccacgtctttgggagctcacgatacctccttggaagtcggtctgatatgtgggtacgcagcttgctgtctttgaccctttattctcctttcggagttcactgatgagctcctgaagttccttggtatggtccaagagagcttggtttttcgattgaagcgcctgattattactctgcaaagattcaatcatgtttgtttgccgtgctgatggccgagtatgacgttataaacagaagctttagtgtggagaggatggctggtatcaattaacacattacattcgcttacctctgtattttcgctatacgcagttgcaaaagaatccacatcaattcgtgatgagaattatctttaaggagaaggaaatctaacgagaaaaaggatacagcaagaataactggaactcacttgtttcagtcgattctgcaaatggacccagtgggtaaattggttttatttttttattttttaaatttaaacaacaggtagccagtaagcctatctatcgctctcgtgcgcaggtgagtcttcaaagagtctaaagaagagatgaaaggtggcaagaagaggccatatggttgataaaacgaagacgcaaagaaagaattaccttctcccttttatctgcaaccttagtcgaaccctgcgccttagcctttgacttgatcgaaaatgagtgggggaagtactctggagaatcttcgtcatctgaaggaccatcgcacgcatattgagaattcagtatggccgctttctggtgaccgtgttgagctgagagaagagttcgagaggatcccatctgaaggtttacgttatggatttaaatgttcgacacaagattggtaagaagatgaccgctgtagagcttgaagtgatcaagttgaggagagcgaggtagatggaagagaaaggaaagaaagatatggtaagagagaaacgaacggactaagaacccaagagaagaagagatcaggatgccgagaagcataaacagatacagaaaccccattctcatagacactatgatctggctagagcgaacggcatgaacgaggcgcacgaagtcggatcgaccgtttcatactctgacccttcaatctttaatttgtccagagcatgtgtatgtgtagctcctctcctgcaccgaacgatatatacatacagaatggagcaaatatagtttgagcattaaaatccgccgccgacaatggctcctcaacccccccgctcagcatttcaaatccttggtcatccatcgagacacgcgaaacactcgtccagtaattctccgggtgaatttccatcaggaaaccagctcgtcggattcttgcttgacccgaacaaccgtttcactggaatcacatccaccctgtctgtcgagtatgagaccaaacacgcttcctccggtttcgttctgctcgttaccctgcctctccatgttcttgcatccacctctatttgtccgttctttcttcattttcctgcggttcaggtctttctttactctatttccctgcggtccagctcgttctttccgtctgcttcactttatgtaatatctaaatccgtcagtttagtaaaagagagcaagaacatacatgaggcattgacaagaccgaggacattgtatttaccctcatcgaggaagacgatcatgtatctccctgattttggctattcatcatttatcgggggtcgatgttattctggttcaatttagatcctttctcttcccccaagaatcacggagcaggataaaattttaacatggtagcgaccgatccgcttatctcaagcagtacgtcagtccgccgagtcgtctcgactcgacagagaatgaaccaatagtgctaaaccatccctgccttccagaatgtattgacccgagtacggtcgatatctctcatgagatcattgcgatggctgctcgagacccgagtaggaccagaggagaacattaaatgttctgccggcgctgaattcaaaaaaaaatgcaaaggcttggagttcactcctacttcatggatccttggcctatctgtgatgacctttatccttactcggcacgttctgtctacatatatgtccgcatctcattctcgaccgtcggcctcgggttggaccgtacgttttcaaaacatggaagtgataaacaattagtacgggatcataaaacagctgtagcttatgtcgttcagtccagttgcctcaaatgggtcaacgcataagaactagcttcaaagggagtctgaagattaggtcgctcaatatatccgatcgaggtgcatgacacgttggttctattgatatcgtggaaccaccacccggagcattgcgttttcgtttgattgctctcgaagccggcgacgtgggtattctatatcatccgcccccgaaaagaatatagagagcgccggatagaaaataatagagatggcggcgagaaaacgtggggcaacttgaaacggctctgcatccacccgtccaatttcaatcttcctgatagcatatcccttgcgagaaggtaagttctcttgaatcaatttgtctacttcatatctctcatgcggacttgagttccttcatctgatcatccatccatccaatcaatctctagttctattttggtttttacctgatggatcgaagcctttgacaaccagagttcaagaggctgaaaattaatcaacctaatgaaagagagaaatgtgtgtgtgacataaagtcagtgaacagcttttttcaatcagagtttacaacatgttgggagaccaaatttgaagagctatcagagacagaatgaagggaaaagagaccgtccctctgaatatcactttgctcaggatgaagatcttgatgaggttcgcccttttccgtccttccatatcattcgctgattctttgtttcttttttttgtcttccgttgtttatctgaccaatggctgattctacctcagctctgtcggtcgtttatggttcgactgcggtttcataaaagagttaataagtctgatttaaacgcaaaacagactcatctccatcatttaacattatccttatttctcttcttgattctcacatcatatcttctttgtgttgctcttggtagtcgtctgtctgtcgatgcctattcgtcttctagctttatatcgtcgaaagtgttgtcataattctttttcttttgtttcgttttctctttttttttgtgttaaggaacgcacgtcgttcattacaaacgccatgatattcaagatctaccgaagaaaacggagaagacagaacctgacatgtaccatatgagatgatagcaatgcagattcacatgataacataagcgagaaagcatagacaggcggagggagaggtcattctgttaagttctccttctttgtaaagtatatgtgtgggggtggaggaaaagttaattagggcattggacaaaacgcgagagtagtttatcacaacgaccactactacagatagcaggacgtaaaccagaagaaagaaaaacctgtaagagaaaacatccagaatagcagacatccctctctctgtaatgtagacctattaagtccaccgggaaagagcggaagtgatcgatcgaacgggtcgaccttgttctaatttcgcagcaaaaagcaaacaatccctcgcctttatttcttcttcttccagatctccctgtccttgtgcccgcccaggtgattcctcttgggtctgctgaacttgggcctgggcctggatgactttgcataaaaagtaccaagcctccgtacaatcccatccttcaccttgagtcagtccatcgagtaacgcccgggcgacattgagtgccggaacggacggtctgacaaggtataaccttgcaagatggacagtggctgacgtatgagtcggtgcgtaaagaagagatttcgtgaaagccgaaacagccgactctgattcggattgaacgtcatagtacaacccaagttggacccaaacctctgggtttgtagggtccaacagttctgcctcttggatcgcagcaagcgcctcgtccagctttcctgatcgtctgcaggttgcagccgtcaatagccaaagttgaccgagcagttcgatctcttgtgagacttgacagaccgagggcccggtcgttagaggaagatcctcgataggcgacggaggtcggcttggtagaggagtcgagtttcgatgtgttctaaacgatcgagcaggggatccaccggaaggggtttgtatctggaccgatagagcgtgagagacagatcgttgtgttccgtcgatgttggcgttgagggatgctcggcctagttttttgttcattcgcgagatgtcatcagactatctgcaaggcgtgtgatgagagaaagaaagaaagaaagagaagaacaaactcactgccaaaggcgcttggatgccttagcgaatgtaatttggtcaaagaagctgtccttgtcaacttctttcccccctttgatcctttgacgttgagatgttttggcatgaaacttcgatgacggaaacgttcagacgatccgctgatcgaggttgacggagaaggcgagccagacgaagggggcgaagataagggatcatctgcaagcatttgatgattgtgaccgtttggcgaaggaggatcgactaaatagaagaaggcatcatcagaatcatagaaaagatgtgaatttttaacagataccgaggtagctcactgttaatcgtcgtcactcccgaattcaagtgttcctcttcgtcatcatcgtcgtcatctccgtttgcagggaatgaagcattcatctcgtccctcactgaccaaccttctggcaactgtaacacagagggagcggtcaattgggttctcactgtcggtgcaaagatcgaggacctcctatcggtttcctccattgcatagaatggtgccggtcgaccacatgtatcggcatagaacgaaaacagatccagttcgagttcagcagcgacagaaggaccttcgagtcgttcacagataaacacgttggtaattcgaagttgaaaaacaacctgaagcatatcggtgtaggatcggctaggccgttcagaggcaggcacaagatcggtcggagatggtatcgaggcggctgagagtagaggtggaggagcagagataaatcgagaggatttggtccgagacggaacagacggggtaatttctatagggacggctgcgaagtctacactggttgttttaggaatgcttgtttctccctcttgttcctccttcacgtcctcgttcagaacggttcctgccttcttctcttgttcatcttgctcgacgaaaatatcccagctcttcagtccttcttctacagcatctaacgcttctttccactgttctttcgcggtgaggagcagaacgagaagatgccagctctgaatgttcagccgatcgagcttcaacgaagtacggatggaggtgagagcggaatcaatctcgcgagattctgcttgaacgtatgccaggctgtaaaaagtggaagcagacgaaggattaagttcgacagctgttagaagagtcttcagcgcggacgcttggaacgatggacgggttgtcgggtcttgggcttttatttggagaacagagaagggacaacatatgtgaacatgacatcttcgtatcaacaaatggaaagtaaccgcctgatagaaacgtactcttttcagccaagctcatttccagtccagcctttaccactaatgctctcgctcttgccttgactcgttcatcatctcgtagactaccatctcccttattgtcccagattcttagagctagatcaaccatttctgtggcctcctcgagttctatcacatccgagtacttgcccagtaagccggctccattcagcaacgtctctccaaacgttcgatcatcttcaaactcttcgtcagccgacggatgctcgatcaaccggctgtcctgatccggcccagaaggagcgactgtcatgccaagagcatttgaggaattcactcgggaagcagtaggccggatggatgaatcgcctaaagaagtttccctagctttgttgttcagttggacgtagagtcggaatgttcgcttggcatctgtgaggagagcagcggcttgaagaatccgggtgagatgtcggaggattggttgtgaattaaatgtttgggatgtagcccaccacaagatctgtccgacgagaaggcaaaataggaaaagtaaaaggatcgaattagatatgaatgtcctggcgatatccaatagaaacaaacgaattatacctggagtaagccgttggtatcctctcgtttttctcctccaagctcccacaaaacgacacatgcagtcgcaaagtcttcgatttccgttcgtttctctcccgccttggggaacggtgtgccggctgaatcgaatgagtcgaaagccctctgtctgacctgggtggtttcttcttcccaagaaagcttgcctgctgaaggcgataaggactcctcccactgacggactaacaacctggtatctttatcttggtcttgggtgatctcgacccgatcaggcgcgatcaaggcgagtgctctaaggtaaagcatatagacagccgctcgtcgacgaggtcggaatgagccgggccaacagcgttcgaacacgaaccatgttctgagccatctgaggccgtgtgctggggaagaagatccggcagaagcaagaatagaacccctgtaaagtgcgcgctcggcccatcggtgaagttctcgatgagcgatgaatgatggggaagagaatgtggaggggagtttggtgtaggatggatgggtgctgagaagcgcgatgctttgcgcgtatgcattgagagcgttagagtttgccccgttagatggctctagaaattcatatgccaggcctattttgaatgcgaaaagaggagaaagaggaataagggacgcattcaggtttttggaagagacatcaggttagattgaattgccaagtagatgacagaccttcgatcacacgtcctctaactcgggcgatatggtccgacatcaagagttcactctgttctactgacgaagaaaacgcgagctgcgatacttggatacattcagagtattgaccaagggctagatgaaagtatgcctgggtcaacaacgcgttctattttttgttatcatcccgtttcaaagagagaaccagagccaagccaaatcaatcgagaggcgtcagactaagtctagactactggtagctcaaatatgaagaaggagatcgaacctgtctttctattgggttcaacgcccctcctttttcgcctacgataccgacgatctcgctcaacccggttgttacaacctgggttctatcggatccagccaaagaagcttcccaacccgaccgaccgagtgctaccctcctcgcatcctcggccgagtcagcatctccatcgagatcttgagcggtgatcttggacgtagtcagcgtggtggcagtatgggaatgaagatggtatggcgacgagacggagagctcccgaggagtgattgtttgctggagtataggagatgggatcagataaagcgagagagatctaagatgagatgccagcagggttgtgactaggaatatggtggagtaaagtaggtcccaatccaagagtgattacgtgacgattccgaagagacatagaagaaatggggacaaatgagaaaggaagggaagaggaacgtcagcctggctgagagccttttctccagaaagatgaacaggaccacaaccagaaatctagcgtaaaggaacggtagctgaaggatagatacaaagcaaagttcaagcacatactcgaagtcgtcccgccatgggcgtgcttgtcccactttctggttagttcggtccacggaaggacgtcctgctttggcgacaccgcaacattctcatctgcccacgcgcctctagagagggcctgatcgagctgagcgtagtaatgaacggcttttggattggaagccggcttactcgaggccattgtgcgagatagaatacgactgacactagacgagccagagataaaagaagagagacgagatgagtggtacttgagtgagagtgtttgaggactaaaggaatggagatggaaggagcggaaacttgcttagtcatccagaactgtgagcccagctcagttggccacccagtcgagaactggtgtatcgaaaggtgtatccacagaacacatcaagacaaacattaaaagagaagaagaagaagaaggataagatagcgcacagtatagaagatagc

SEQ ID NO: 2097 - DNA, 4536 bp, Xanthophyllomyces dendrorhous
gtatagaagatagctatacccctcagagaatataaagggcgaggaagagcacatagaacacactgtccgtcacttagagaccatcctctcggtttgctttgtactaccaaggcatacggctaggcagttgactctctctgccttcaagacaaaatccattctgtccgcatggtctctctccatatgtgtggatgtatacacatgttgacacaatgcccattcatctacatacacattccaggatttatccttcgcagactatacaatagatgacactctgcctagggctcatagggtgactaaccgggctgaagatctgctgaaccgacccggcgattgcaccatttttccgaaatcgtttaaaacgagaaaaacactcgagtttttttctttccttttccttgaacatcctctggaccatcactcgtacacctcttcttcttcgaggcatatcctatttgcaatcatggctctcaggtcgtcctccgctaggctctttgctactgcatcgtaattattctcgtttcttttttcgaaggacaacagcgcgttttccatcagattgctgacgatcgctctactgttcggaccgttctggttctgctgctcgtcaactgtacatatctgattgcgctatagatctcctttatctggaaaccaccacaaggtcgttgtcgttggagctggtgcggctggtctcaggtgagcctagtttgctctcttattccgatgttcatttcgatcgctcatacgaaaccctgctatgtcctatcaagtgtggcaaacatgctctacaaccggttcgctgacgcaggcaagactttggctgatggagatgttgccatcgtcgacgtgagttcctatttctctcgctctccttgtatttgaccgcgctctttgaaatgttcaatatccgctgagacttctctcatctttagggatctaaactccaccactaccaacctggatggactctcgtcggtagcggtttggcccaaaagcaagatctagccaagccggtctcgtctttgattccttcttatattcaccaccacgctcaccacgcctctacgttctctccttccaccaactcggtcactttggcttccggtgggccaacacttacttatgattatcttgtcgtctgccctggtttgcagactaactttaaggctgtcgccggactggaggatgcgttgagcgttggaactaaggagagcaaggtcggaagtatctatggctatgagtactgtgatcaggtctgggattctatcgagagctttgatggaaagaaggcaatctttactcagcctaagggaatcatcaagtcagtatttctttgtcttgcgcaccgttgcgagaagaatcacgttaacatgatgtcgtttggtcgctaaaccaggtgcgccggagctcctcagaaagtaatgtggatggcccgatctcaatgggcccggcaaggaaagaacgtcgacgtgaatttcatcagtggaatggtacgtctttagcctgtcttcaaacttcggaaagatatgcaaaccacaagcttatcctcgacctcattacctttttttagccaacgatgtttgccgttcctaaatactctcaagcgcttgtcaagttggccgaggagcgaggtgtcaacgtttccaacaacttggaccttgtctcgctctctcacaccaacaggacggctacgttcaagaacgctgatggagagagcgttaccaaagactttgactttttacatgtcgtgcctcctcaaggccctcttgataccctcaaggtttgccctgtctttcagtacttcttcgtcggaatctacgtgctcacctctttgcgcgccttcggtcttcttcgcacatagaactctccattgacagatgtttctggctacgtcaccgtttcaagctcgagccttcaacacaccgagtttcctaacgtgtttgccctaggtgacgcttcgtctttgcctacttccaagacagaggcggctatcacttcccagacaccagttgttgtcgaaaacttgttggccgagatggaaggcaaaaagggattggctgtctacggcgggtacagtacgcccttctctatctttgcgctactgcccgtttttctgttgtcaatccctgacttgacacgatcgttctcttttgacagcctcgtgtccgcttcttacgggacacaacgaacttctgcttgcggagttcaagtatggcggaattcctgacgagacgttcgccaaatttggaattgaccaggcaaagcccaataagttgttttatcacctcaagaaggatgtaagctttcatttcccttcttcattataaagacagtaatccaaacctggttcctgattttctttatcctcgaaacatcctttcttgtgcgatgcgtcaatagatcttcccatatagtcactataactttatggtcaagggcaagtggttcggtcgatcaggattgttcgctcctcgatttgatgctcctgtagagaagcagtaaagtgacgttcgttagccgatctcatctctttcctttcttcatctctcttctccttctttttgagcctgcgccgggttatttgtgctcttttctctgtttcatccattctcttcgaaaggagtccatgttggataaagctggatagaagtttataagaaaaataaaattgatctcctgttcatccctatatatggttgtatctcttcgttcccctcttcctttgtctttcgtgtcttccgttcgtttttctctatcgctttgttttacttctcgaatagaggtattcgaatagatttgctttttcttttcttcccctctcgttgatctacgtcgaagtcgttaagttctgatagcagttgtgtcatacgaaatgtgtttttaagaagcagcaagtttagttacaacaatagaaacagagagcacaataggaataaaaagactgcaatgaagcaaaaggttgaataatatcaagaaataaagaaatcaagagggaagaggagatggagaagaaaggaagatggattagattagaatcctgatggagcacctgtgttccagacaaactatcgataaacgcaaccaaaatgacatcaagaaagattcagaacaacggagatatcataaaacgagagagcatggattcataacatacgttgatatccgtcgctgtaaggttcggtaggcttaggaaaaataagaagaagcactcatcaacgtgtattcgctgcctccatagagagcataccaaaggtaatgcgagcagagcgcaacttgaaataaagatttgaagagataagaaaagaaagatctcactcgaaagggaaaaatagactctccgatcctcccacaggcaatcccaaattgaccacaccatcatcagttagccaaggcacgtcaaaatcaggcatcgtcggcatatccagccaatcgaaatcgggcaaatcccaatcgacttcattctctacgtcattgtgagaatgagaatgggatcgggatctatttgaaggctgagaggctttcgatccacctggatggtcaccaccagaagatgagttgaggagcgcgtgagctagagacgagggcgtaggcggacgagtcatattatatcggcgtttaaaagtgctgatttgaagaccgagcgtcaaagagtatctactcatccgtatttgaagagcgtagtagtttgaaaagcccgatcaaaagtttgtcagaacgaaaaagactcaatgtggatgacgcttcaatatatactacttttttctttacctttctgcagaaatttctgatagtaatccggctaattgactgacgatcgagacgatctgtctccggtccacatcatttggaaacaagatcgcaaccttaatgagataacatgccgaaaatgttgcctgtattaagatttcgtatctcagcgcacatctaaccatcagaatcatcaagagaaatgagagttgtgtatataagtgtacaaaccatcaccaggtattcatgaattgcaaaacagagagccgccctaaatgaagaagaacagacttagtgggctggctgtatgtttgtacagaggttcataaagtgtcatacttacctcagttggttgttgttgagatagacttcaagacaacgcattgcagactctttggcttcgactttagagaggaagaggttagggtcatcaaatatcaatattgaacgacaggtccaagaagtttgagaaaatcacagaaaacatacgagctatttctttctagaggttaaaagaagaaaaagggaaggaacggtactcagaatagcctcttctcaaaaaggcactacaataggcatacgaacctgctcatatggcatcttgtcccaactggctcctctcagagccacacaaacgagccaaagcttcgcataatgaagctccacaaggacttattatagaagattggacgatattcccggtagtatgagggtgtcagctcttgatcgacgaatgagaatgccaattgaaccaggagatgagacatacgcatgttccgcatc

SEQ ID NO: 2098 - DNA, 3605 bp, Xanthophyllomyces dendrorhous
tacgcatgttccgcatcaccgactcttcggagtatgtctgcttatgcatgtcatcccactcagtgtaccacctagccagatgcatcccatgggggggggagcaggaatatattattaggcttggacttttcgcttaggtgagaatgtttagtaatggcgcacctattgagatcctcggaaacacggctgatatacgagagtgtaggcttcgtgacctgtcctttgatggtctgaagatgatcataggcccgggctgcaaatcgttcgttccagtttactgaaatcagtctgctaactcaacacttggaacagatgagattcgacgaaacagtttaagatatacttttgagaacaaccaattcgacctctgctacaagtctgacatccgtagggctagacatagggtgcgatagaaagtgtcgagcattgataacccctgtatcgtcctccctatgatcatacgtgataccagaaaacggatgatagcaagttagtatgcagttgtcttgccgaagtacgaaggtgaacgaacctgatcatcgtcggtttcccactacttagcgtctgcacccgatcataccagaagcaggtaagccagatcctcgtactgaccactgtatagcgtagaccccatagtcttaaacgtcagatagataacaaagatgaagaataacaatagatccaagacaacgaacctaagtctcgctcttcagcatcagaacgtatccgttcaccctgtcctgcggcctgcagcaatttgctgagctatacattgttcccaatcccaaatatggacatcatcaacgacaaactctcatttgaagatgagtgcgcaaaaaattgaactaacagctctgtggagaccgatgtctagtgacatcctgacagcatggcctgatggaagatacccgttttgcgagtagcatgctaatagtaatgaagctaaatattacccgctcatgacagggactagttagcaaacggttcatcttcctcagaaaataccgatagtaaagcttaccttgaacagcttcttttcgaacgactgtttgtatttgtgtttcaccagaaatcagaatgtcaacagaccgtattgccaggagagcaaggaaagaaactcaccaggtccaaacaaagtgcttctggcgattccatgagcttcatccgatgcagcccgaaatgaaggtcctaacggccctacagagaatcaaggtaagcttgggagcaatagcgggaacgagatgagaaagcttggatttatggggaagtatatatactcaccgtttccacctctgatttttgcagcgacagcaaggatcacgtcaaccgctgccagccatcatcaaaaggaataagttcagacgcgacgggcttctgacagagaatctgacttataaaggaagcttttggatcttgacacgtactgaatggagttctgtcgcgtaaactttcgaacgtatcatacgcagggtcgaacaaagggacaaaaaggttggaaccagaaaagaatctataagaccacagcaagggaagaacgaattcagaaccaacgcgcgaagataccaaatggtttaatcgcaaccattttctgtttatataattttctgttcgagagatgatgaaccaatcagataattaaacatggacaaacatattgtacagctctcttgcttcggcctccgagaccatacccttagtgacgacgtccggaaatggattgggtgggggcgggactcgcttcttcttgacaactctgtccaatcatgttatagaacaaaagactcaagttagcacaggcagtgagatgacaagatgcctttcaacgcacctagacgagttaagcgtcccgttcgcagcatcagcagccgcgtttgctaacccttgcaaggctagcccgggggtcatcattgctgccctcggtagagtgttttcagactcatcatcagacgacacagcagttgagggaacgatctcgtaaggggcaaatctgatattaaagaatcataaagtaaccgagtagacgtattaaaacactggcagtcgagagcacgagatgattttcacctgcggagaaaagattagaaacacatgggacgaaccggtgggtcggagggggtgcgaaccccggcagagctggaaaagattcttgttctccggtgttttctattccagctcctgctatgtttgtcccttcggctgattctatcctagacctactccttcctggatttctgtttttcggttcgcttcttccccgttcgccgctatcatcgtttgccatctcttctgttttgcctctcctgtcgctttcccttctggatcttcgatgttcttcaactccgtcctcctcaataacatcgaacactgtgtttctcgaatgggaaagtggtagccccggaagcggatgatcggtccctgctcttcctgctccgtatcctgcgcttgttgatgtcggtggccattgggaagacgatggtgctgttggattgtcagcataagtacctcgcccaggagacgcccggagcgtgttccaaggagcttgattgacatttcctaattgtgggcctgatagcggagaattgaatgtattgcgagcactcgatatattggaaagtgtaccaaatggattggcactgctcaattcggggcccggatcgctttgtagatacatggaattatttgctcctcgactggaaaaaatggtaaggctatcttgatcagtgttgattatagggggaggatgaataagggaagcggaatgacccctttgggtatagtatggcagggtatcagatgttgaggttgctggggaatctatcgaggctccttgccgattgtttgttagaacggaaaggatttgggatagagtggattgcatggatcctctgcagtcaaatgaggaagatattgaatcacttgaagtcagcatgggtagaacataattagttgcaagcagaatgacgcactgagcttcagaaattttggagacctcatcttctaacttgctaactctcctgatatttttgagtaatcagattgtaagagaagtaagagagaacggatcaaacatgacacaaccccaatctatcataaaggagaaactatgcatactcttcccgctccccaatatcttctcctatcgtagttgtggccgtttttttctttttctttggcggtttttcgaatacacagggcacacctgccagctcgcagcgtctacagggcggctcgatcgtgttgtctgcattaagctatcagatatcgaaggtatgacttgtgagcgtttatccggctaaccagagatacatccgtcagatgatagaaagtgatgagcttaccagtccttcacatcggttctttccctgagagatatgaagattaggcaatcacacgatcagtcaattttctgaagatatacatattcatccacccttaaacccatctggagaacatgcaccaataccaatcaagggaacttctcaatggataaatagccgaagccaactctttacactccttctgaatctagtccgagtgctcttggcatccaaacttcaaaccgacacgctgctgcggtcacaaatggtgggctccccttctgatga

SEQ ID NO: 2099 - DNA, 7770 bp, Xanthophyllomyces dendrorhous
aataagatcggcttaccgttctgtacagcaagaataacgttcaaagcagtcgttgagaatatatccagcaagagcaaagaaaacaaagcgaaacagatctaggatcagcatctgtcatacccatattcgacccaattcgctgttctccagaccaataagaaatggtcaagtattcctctatcctatcctttaaaattctcctttggagaatccagcatacttacttagtcctggataagaagccaatgacagcatggcttgtccagcttcatgtgtgtttgccaatcctgctgagattgatgacgcgttattcactgttgtaggattcaaagatggttgtggatgctgagatgctgaagaggctaagtcgtcttcgtgtggttggtccaaaggagagcccatccagttcagattcgttgcttatcagtgtgagcaaatagacttcaagcgttttacgtgtggataattgcgacacttggaccgcgtgagaaacagacaatgtgctactcgtcgtatatttgcgagagagagggtggggagaattagtcggagatgataggatgctgtgtggaaagatggatggatggcggattgagtaaaatgaagccgatcgagatgagaaacaaattagcatgaagaaaccacagtcgggagacagagattctcaccgatcgtctaatcttgcatcggctattccaccaagaaagatggagaggtataagaaaggagggaactcaagatggaaatgatgaggatacgagaacagctaagggaaatgcccggcaattcacggcccggcccgccgctcattatcccttgattctccgacccagtcagacattcatcgactcctcctcagaagaaagcacgcacaccctgtcctatcagtgcaatccagactgtactcaatccgaccacatggtgacaacagaccgaccaggtcgataagtatgctaaagacgccgaagagctaagaaacttgctttccacatgcgtaggctcacttctttaaagttcaagcagaacattcttcactgctctcgatcgacatctcacacctatacgcaaaacagcgctcagcactctacatgatacacagtttacataatttcgtccccagcccagtaatcgctaatcttaaaaccaaaacccctactaagtacgacggcttcatcgaatgtgattccggtcttgaacatgacaccatccaacttatcagccggacttgttcgttgtaggaggtggagagatgtgagcatcgcaatctatttgcaaatatgttagaaaataatcagtcaatatttctccttcttttgttgtcttgtctctatcaaactgcttcagaaaagtgcagaggaagaaacagacagcacataccagattttttacagtaaccgaacacatcgtctcacccactgtactcgaaagttcatctctcgataaggaatgaaccacatcatcgtactccgctgtcagacttccaaaaatcgcgatcagtctatccatcggaaaggcctttggtcccaacaacgactgagggatctttgctcccaaacccttcttcatcgtcggtttcttccttctttttgaatcgccttcccatctggctcgaccgaaattcgtcaggtccttcgtagtaggacaaaacgaggccagaaacgaggcaatcaggagaagttgagctttttccggaagcgacggcatcgtagaagatcgatccgctaaagcagacgaatttggaggcgccttgacctgaaacggagaatttggagtggatgcgatggttggttgagtgaatcgagctagactccctggcaaagcggtcggatcgtttagagcaactcgaagcgcctcattcatctttcctgcgagctcgaacgttatccgtgacgtagtctcgacgtattctcctctaagtctgacagcctctttgagttcagccattgaaggcagacgagatagaagaggcaatatccagattggccagagagcgtgggccatgtggagcaaggtgagaggatcaggatgatttgtaaacgctgtggggagaaagtattggacgaacggctcccagtgatacgtgagaggatgagtgggtgatatgggagggtgtgaaagcatatagtcgaatgtttctgatgaacgaatgtcaagaccatagaggttaatggcttggctatagcgaacagaatacgtcgagagatgaggccgatggctgatggtggtgacgacaactcactcactttgttgactgaaagcaggttgatacatgtatatcggatccgaaaatgtacatggttgaggtcgtagatagtcccaaggaacaggactcataaagatgacagtgaccggacaagaagtcttacaaccataaatattaccatcatacgtcgttaattattcttgttctcttcgagaaattcagaaacacaatgaacaagagaatctaacgaaccattgctgctaaattcatgaacagggagcccaacccacccgctccgaagcccataccagccttcaacctctctgccctatcgatgaccactaatctgccctctccatccttcagtccattcaatagaccaagaaagttctcccatccggtgtaccgaagaccgttctttccaggactaccaagatcccattgagtcatcagatcttccataaacatcttgacggtcgatcctgactctatggcgtcgataaatgccgttgtgtatggaccaacggtcggactggatgattgtgtgacgtatgaagaaagcagtaaactaggaacagattgggaaagcaaagagtggattgcaggatgagcttgaaagaatatttggatgggcaagtaaggccgggtgatataagggcttaggatttggtagaaagaaggtggtatctgttttgggttgagcatgatcttgtgaaagaacaaggattggtctcaagatggctagagagatagctagcagtgagagaacatagagatgaggctgcggtagaaggagttttgctgaagggacgcgtcgaggacgcgttcagattagggttaaactaaagctttcgaagaacagtgcatatacatccatctgacatcgataggttgatgcacaaggtttgtagtaaatgagattgaaactctacatagactcctaggttgtgcaccggactgtatacctgctagagacagatcaagctattcgcaagaacattctctaaacttacagaagaagagcaatacgttaggcagacaatgatatcgaggcgtccttatactccatggttcattcactgtcagtcgtttccgactgcctttgagcaagaataatatggagatgtgaacgtatggcccatccaaatgtataccgatattggaaagagaaggaaaaaaaggaagactagaatatgggtatatgcaacaacagaagagaaagctatggaacagaggataactcgccaccaggcgaaatgtaaggatacgtgatggtaacccggagcaccaggattccgaccctagtagatagatcggacagaggagagtgatgatgagtttagtgggccagttgtgaggaatgtgtgtttaaacctataatgagaacgagaacaaccccatgagtacgtgttctgaacagactacttgatagaaaaacacttaaacgaacaaggttcaactccaaagtccatactctcctggcccaaactttcacggtcttattctcagcatccacacgtgtttcgatgtcgactccgtcccaccaacattttctctgcaaggatgaagtcgtataggtgattagaacttcatgccaaacactgaaactcgaaacggaagcagacgaacagctggttttctccagaagagtagcaacttttgcgaagtcgtcatctgagcatgatcgatcgtagccacttggtcaggttttgtaggatgctgaataccggttttaagaaggacgagagcaattgatgtgatagaacatcttgatggctcgacatctcggtgtccccattcgtcctgtcgatcgaacccactgatcacgagaagatgaagaaggtaaagaaacaaaagttagtatttcactttgatgaagttgccacgctgatctatgaagaagagaatgaacctcatgcaaagcatatcaatcaaatgttgttcggctacgttgttctccttattgacgttcctctgcagagccgtgaagatttgccttctatctaaaagagcctttccagcgagtctcttcagctctatcaactcttcattcgcgtttccttccgcatcggtctgagctacacctcctttgggtggtatgacgaaatactcaagctcttctcgaagaacaataatgccttgtttctgaagcaaggggaggttggcataatcctcagagatgttggaatcgatcaacggactggtggataaatcagtggaagacagaagagattgttgagagtggaaaagaccgggagatgagggggtgccatagaaggccgtaatggcctcctcaaagaagtcaagtacaaatgaaaaggctccgggatcgaactaacatggagaaatacaaagtggtataagcaagggtgtgattccaacctttcgtcacctcgtgaacctgggataaacaaggaaggatactgacatcgacagtgtaaacgtcaccctggtcatcagaggacggattaatcgtacgactcagaaccagtccatttggaaagaggcacagcagcacactctcgggaagactcatgagccgctctctctcgacaacgaaccgttgacctcgaacatcgaggtctagtctggtcagaagttgattcgaatgcgacggatatggctggtaagactgaggttgtatagagctgatgggtgagttggtgggaggggcaaccgaactgataggtgagttggaaggaatagttgctccagctgtcgacataatagctctagcctttctgtgtgcgtgcttcttgtatggatgtctcgatgaatgttgtggatggacaagtgacggctgaagggtaggatgaggataagtttgcgaaaagataagattcaatgcgccgcttaacaccgtgtatcaactcgaccgtctccatccactcccccttcccaccaccctcctccctcctttcctccgttaatcattccatagtttattgagagccttgccataaaaccatatatatccgtcccctatctcgagaaggacatgagttttttcaataaactcgtcaatcttgccgtcgggacacctactccatctaaggagagaggaccattcgtatttgatgattctggagcttctgatgtcgtaatcgagcccccatccaaggtcttggagaaggctgtttctgagcttcaagatctcggagaaggaaagctcgagaagaagcttgaggtgtgttgatctgcattatatctttcaaactacttatcaagttgcatcactgtcattggaactatcgcgttgaagctaaatatctttgatctgatcttgatgacctcaatcctccctgaacatgcatatggttgatgtcttacctacagatgctttctgatatctacagaagcatggttgaggactctaggactaaagacttgtttcgagactcgggcggattcttagcgcttgtcagtgtccttagtggtcttcaccctcacccggagtctgaggacaccgaaagctctggcgtgttggttgatccagaagtaggagaaattcaaagaattgaggccctgaggtgagagaagatgcgtttgaacgagtgtgcgtcgactctattgaacgctatcaactaactacagatcttttactcaaataggatggttctcttgtgcctgtgcgaggccatggtggattcacccctcaatagaattcactttgaggtaagaaactctactggtctttacgtacattctatctattgcgctgacatgaaagttgtctacccaggatcaaatcgggtttgctgcattatcgtcagctatcgagctgtccgagatgcttcttccaccatcatgcgaccacaccttttcattcctgctctccttcgcattctatgacttctctttatcggatctgttcccttctatccgtcgttcattagcttctcttaaacctgcgcaattcattgatccatcggtctatcagcccataattgacgtcaaaattcaagcggttcaacacattttcaacaacctctactttcccaaaccgttactacttctcctggaagctcaagagctccttccagtcggagagttgcatcttggatacgccatcctgaaatcgctcgagcgtatctcacattccgctcatcagcgcaataatcttctcctcagtcaactttcttttgtttcgattcttctacctagagtattcgattcccctggtgaccttttgggttctcctgacgatcctcatcggccaacacttctaaaattgctgagaagggtgctagaaaccggagtatcacacgcagaatcgcgcgcaatctttcaattggctattggaaggaatggagagctagaagaagacgttttggaattaatcagacacggaatgaggagtcgttggccggggatgatcaaccattggggcagaagttggttggaatgcagaggattgatggacagagggttcggaaaggattccagagggttcacatttatggtacgattattcatctggctcaagggtcgatgagattgatcactgatgcaagttagacaattgtggtttatctacaggcctgggtatatatatctcaggtggatttccggacacctctaccacttttaacgatatcgaataccgaagagcatttgatcttccaattgactgtagatcaccatggccaagtagctcttgattctccttcaccagggtcaaatcctatctcaattgacaaggctaagttgccgtttggaagatgggtcctagtcagcgtcaccggaaagagatcaaaattaggaagcagcgatgtcggtgcgtgtcaagtttttccatttaatcgctcttgtgtgggtgactggtttgagagctaatttcaatcattttgctgtcctgttaagctgtgctggttgatggaaagcgattgaactctgtcaagtttaactaccctcaaaatggctctccaggatcgaggcttatagctcgtataggagaccgaacgacttcgacctcatcggccaaggatcaccatcgatggaatctaggacccgcttatcttctttgtgatacagtcccagacgatttggttttcctagctcatcatcttgtacgtaggctacttttgttcctgcaagtatctttatcttccttgcctgtattgactgcttcttcctgacctcgctttctcagggaccaagatattttggaaattaccaagtagttctgggccagtttttgacttacgaagcttctacatctctcaatatcttcttgtcctccgttgcccaagagtctgctggcagaacctccgatgctgggagttcccgactggttaaggctcttaaagacggaatagctattgaagaatcttctattgtctttgccttctcagctgagaacgccagggaatttgagccagatttaccggtagagacccaaggggaggtcgaggaagtcatcatcaacggaagtttgccaaaggtcgaagtggcgaaaacagtcaccagaggggtaggtctgatctttggggaagcagtggttgttaagaaccgcagtctcgatgaagaggtgtgggctttaggagggtgtgcccctcttttaagaa

SEQ ID NO: 2100 - DNA, 17086 bp, Xanthophyllomyces dendrorhous
attcgatcctgattctgaccgtttacagacatctgatcagctattcaactcgatttctatatgtttaggatcggttgtggagcattggagaaactcagaaggtgcgatcttatttatcacgaattttgctgttatgtttctctgatagactactcgtgtcattgttgtccttcatgaacatagacatggagaaaagccgtaagtttgaggttaacgatcgtcgtaatatcatttctgaggataacacgttccaactcatttatcctctcgaacagatgggtatgagatcatggctagactgctgcagccgaagatggcatccttaatgactatagaaacgcagcgagtaatctttcagtgcttcggtatagactttgacaaaccagagtaagcttgcttctctatcattgggtcttaagagaaaagttgacgtctgctgtcattgtatttagaacatcaaccatcaacaactctacgggctatcgtatgtatatcttctaatatcgagtagaacaatacaacacgaaacaagcagataacacagaaacgcggaacttgaatacgttcaggatttttgattctgaatttcgaattatgggccaaggcgagtgtagatgtacaactcgttcatctagctcatttccgggatcttgttcgaacaagcagattgtgtgtttcttccttatagggtttttgggttgtgtgaatcctgttcaaatgcagtctaattttggtgtttcgacgcacaaaatacagccgacggttcaacattcgacaacgcctattcaagaaaatggcgctcactaggaaattgctctttgcattaagggccgaagactattccgaaacagtcgctaaagtcttgataggtacggtattgtctgttaattctcttttgtttgagtacgatgtgaacctaacacatgactcgatgcatacatccagaaactctctatgttgtggccgacagccacttttcgaatgaggacactgttaaaccgctcgtggcatacctagtctcctcactgagtccaggtcagttctcattcaattgtcgtatcacccatccaatgttttgctctttatgcgactgcattgtcttatcgtgtttgtttctcttctgtcaaacagcatccgacactcctgtcaattatggcccagaagttttggaagcattggctcggcttatacgtaatccatcgcacctcgctaaacttcactcaaacctccctctgcatcgagtattattactcttcctctccgggtaccctaagccgctggtagtcgaatctacaatgtatatcatctctcatctattaacttcttctgtgggagacggcttcgctaaaaaatgtaagacactctgttccccagtgatcgcaatgaaaccagctaaataaacgtgtttgatcaataactttgttgtagtcgataacgagggtggattcgttcagctcagcaagcagcttgcttcaatttgggacccgaagatacatcgacttgcgttttctatcctctctggcgtatctatcgaagattatgtagagggctcgaattcagccgtcgcttgctcctatatctttccttctatcctcactgctcttgagaatcatctgagcttaatttcgcaagcagtccggatgcgctcgataagtggtggctctatccatagtagtaagcaatgagtgtccctagtttatcaagctttgaacacttttttaacctcaagtcttatgaaccttttagcttctcaagcttcaataaaccccgatgcattatatgaggacagcgagagacttctccgctcaatcatcaacctcttgactagctcacccacatttgccaagctcacaaagtcccgaaaatccgtcccggagaagcttgttgccatgtcgacctccttcctttctactactgagagctggagtggagaacctgatgcacaagtgataggcatacgtgaatctgttttcgaactactccagactgtgaacagattgcctcgtatctcgtcgtcattacagtctgatgtaagtagcgactcccaaaactatttctatcatactagttttgctaaaaaaaaatcaagatccttcttcagatacaccgcgttcttcctcccaaatacctgcatgtggagcatagccttccttctacatcaccgggaccagtgtctcaacttcagcgacgtatatctttgcaacgccgatcgacagctgatagctttgagtctttgtccgagtcgttctcttcaaaggctgataggcggctcagtctttctagacgccaaagcatggagactcgcttccaaggatctaaggaccgcaaccttgcatggaggcagattattctttccgtggtaagtctcttgaatcgtatttcccttcggacttttgatttaaaggcgctgagaatctcttcttcaatttctttcatttatataggaggctcgtcgatttaaccgcgctcaagccgaaatgaagcagcatgatgagcttgtcgatacccaagagtggcctgctctccgtgtgcgctacgaggaggagaggggaatttggccgagagtggatctagacccagaatggcgcttagatgggtctgagtaggtcaaagttcttctaaggattttgtagttagacaagatgtatctaatctcatgtatgtcggttgtcccagaggtcctcttcgacagcgcatccgacttcagcgatctgttcgagattcaagtgacggctcatccagttttcatccaaaacgcctatctaaagatcgcttggtagctgatgatttggacgagatactcagccctgtagctcaccctcctacaaggccttgggaagactcgctggtattaggtcaagatgaacgggaagaatgtcagtatcagcctctcctatatattctcttccgaccaagtttcctgattcaagcaaattggtttcttggtatagctgcgtctataacgactgagcagatcgaagagccacaagaacctgaacccatttctcaaagacagcggctgaagagatcaatggaggctggagacaccattgaggaagtacgtataatgtgcgttacaattatatcactaaaaatagcgcaactgaagtctgttttgcagtttcacaatactatcagaattgttggtgtggatgcattaccaagcttgatccttctgggtaaaaacaatatatatctattgtgagtcaagccgtcatctcgtcatcggtcccacttgcttgcctatcgactcaactcaattgcattggacttgcagcgatgggttacaacgtgctgatgatggagagattatcgaggccgacatcagctccctcgatgccttttctatacccggatctatcgctagggtagatagtgacacggatggtagtcatcgttggcgctatgaagatattgttgaatcaagcaagagaagctttctgttcaaagacgtcggtcttggtgagttgcttttttgtcttatcatcaaagtcgagtgtttgacaaatttcccaaacaattgttcagaactctacttcaaggactctctcaacttcttgttggtttttagcatcaagaatcaacgggacaccctttacagcaaactttcagctaaatccgaatctagagaaacttcttccaaaaacgtttctttgggaagtatgttcatgtctaaagtcgggaacaaaattgctactgttatcaatggaaaattgcccgaattggaagaagcaacctatcggtggcagaaccgacagattagcaagtaagttctaattagttctttggtcgggtttttttgggcgtatagggtttctttagggcagcagctgaagcgatgagctttttagtttcgcgtacattgtgattttaaatcaaattgccggtagaacaccaaatggtacgcatttgtacaatttcgtgatacgtagctcgattcactcatgagttctcctttctgccatagatgtaactcaatttcctgtgttcccatgtacgtcatctctatctgtcacgatccttcagctctctgggtattagctcatatagttcctgtttgcaggggtcctttgtgattacacatcaaatgagcttgatcttcggaacccaaatatatatcgaagtgagtttgattcgaggcagtgtcagcttgtgtatccgtcactgatagttcaatcttacattgtgcttcagacttcacattgcctatgggtgcgatgacgcccgccagaagagacgctgctatcggtcagtacatcgtttgatcacaaacagagctaaacctgattgtgtatattcactatgcaccacgtagagcgatacgagaacactttggccgtgaaggaggatccattgtaagattctgtgaattggcatcgaacagcgatacacgaatacgtcttaactttgccatatctctctccagtcattacggagtacatttctcgtcaagtatgattacggccgggtttctcattcggcagtctccatatactgagatgttcaaagtgagtgtccagattcaactcacaactgaatgctcatcaatattgatctttgtccaatcttctcaggttttgcaaggcggcaatttcgatcgtgagctacattattgaagtgtctgtttcacaacttgatgtcctaatcatggtttggggtatcagtggccgatcggttgttttcatcaatccccaaagcatggatttcggcctcgagagacaacaggggtgacgttagagaactcatcgcccctttctattatggaaatggagagtggctggtaaactccaatggtatgatgatattccacacgagttgattcatcttgaatcaatgactgattctctactgtcttctccaggccatgattttggaaggaagcaagacaaccagattgttgatgacgttgaattgccaagatgggctcgagatgatccattgctctttatcataaaacatcgatctgtatgtgtccacttcattgtcgacctgggatacactctgctgattgagggctttggttgggtatcatccactcgctaggcgttagagtcgatcgaagtttcgaaacagcttcctgcatggatagatctggtcttgtaagttgttcagtatgatacaggtcaccttttggtcatttaatcatgctgttgtacatatagtggccatctacagcgaagccgagagagcctcaactgctaccatcctctttcctacgccggagctgttggtcagtagttctctgtctctggtcatcatagttatcgagacttatctttcactctatatgtctatcttgataaagacttggatgcaattaaggacccaaatgaaaggtaagtcttctcgattgcagagctgacagtcgcggttctatgttatattgaaaggaaatctccttgcaccgtgcgcgtcttgctaatatcatgacactacctaatcacgtagaaaagctgcagcggccatgattcataactttggtcaaacccctcgtaaactatttgatgcacctcatatcaaacgtatggttatgactggcaaagtcagtttgcccgtttccgcgcgattcgggatatgcgaaaatttagcgatcttgattcaaagcgccggtgagtatctacttcatcttttgttacagcttaatcgacgcttattgttcttgttcttgatctatgatagcgcctgtatatggtgagtcttggatttaaacaaacctgcacatttgccaagggaaagatattatttaacacatggtttctcccctcatttctgtagaattgagacagtcggttgctgctcttataccccacggcagcaagctaaaaccgtggccttcacaacgactacctgtccccggtcgaaattttgtactgtgagatatctcgtgaggtttctcgcgctcggcttgaaagtctaaatgagtttttcgtgtctttttcagtgaatggggttttagtggaggtggtctgaggatctattcggacgaccgaaaggtctgttgttgtcctgagttctttctctattttttcaatgcactcattatagctgacgatcgattgaaactccatctttggaacaggtcgcacacatcactgaatgggcttctatatcgacggtgatgttcatcgatgagaaggcttcgttcgtgacagggtcgtttgatggagttgtatccttctggaagatgaaccaggataaaccaatacctgaactctgtcacagtttagctggtcatggagacaagatcctttgtttagctgcatcaaaagcttggagtgtcttggtttccggctcgagagtgagtatgatctgatacatgcatcaattctactgtcttttagcggctgacaaacatctgaattttctatgcgtattagaatggaattgtgtgcctctgggatctgaatcgatcgaaatatatccgaacgatctacaacgatccagaaacacctgttcattctctcgctatcaacgaagcaactgttcgttgatttgtacactctcagcttactccaatcaaggttaacccagcttcttatcctcattcatcatatagggttatatcgccattgcctatctgtcgactgtcgaactttatactctgaacggaactttcatttgccagactcttacatcgcatccaacagatcctattctctctatggatttcttcgacacgagagaatggcacgtcctcttcaataagatctatatgtcctttatcttatgttcttactatttcaaccattgaataggtccccgacccagattctcgcaaccgggcactccaaaggaaaaatgtgagctcgttcttactcctcacaaactcgcctcgactgtattgctgaaaaagggatatgacactcgtggttgaaagtgtactctggttgatgacggcggatgatactcctattggcgagaaggctgtctggaaattagtcccccttcggaccatacatctaaaaaagggagataaagcagacatcacctcgttgtctttcctcgggtatgtctctccctttctatacactgctttcttgttgggttcaaacttatatactcgtattttctctattatcttctcagagaatcaatatatgctggagattcactcggaagagtatacttgtttgcgctccccgatggtggagcagagaatgtgtcagaatctgtgtcgaagtgtatgaacggagaacacacctcattcgggttgttggagcagagaaaggtgcgctcatcacgtttcactcaggctctcgagagaagtaactaaatcttgttattctttatccctccatttgcatcatgaagtggtgtggcggatggttcgttatatttcgtttagttgaatgtgtaccatatagactgacatataaacgctgtgttgtctgccatcatctttctatcttgatagtggtggtgcgttctgcggaaactgctgtcaaaacattcctcgcttcgatatgagatactgtggagagtgtcgtatcgcccttgcacttgggtatgttctgtttactcgtcctctttcaccaaatacgcttgcttcatttcacacgatctcttattactgtttcattggcggtccgtccaggatgatcggagaagtagaccatgagattgatattgaacaacatttggagttcgagcctggagcctctagaacgtcactgatcctccaagagcagtctctccggagaacgtctttagtgggttcgctcgaacaccttccggtgaacacaatgcgacgaacgtctttgactctaaactctggcggtttatttccttccacgagccaaggaatgactccccaagctcgatcgcgatctcgagcagaatctccgcatgcgcctgcgaactcgccctctgaggagtcttcaactggaagtagacctcgagcgagactcagatcgccttcacctgcgttggatccgttagaaccgttgagaagtaggagtagagggagaacgagaagttcgttctctgcaagtagttcgagggtgccaagtccgttggcgacaccggctccctcgagacctcatagtcctagtccattatcaactcccgggggtgaatatagacgtccgctccgatagaagcgcgagatcttacatacacctgtgtatctattcaactctctctttctttgctcttgtcgatttatgcagtttccatctattcctcttcatttcttctatttgtacaatgccataggtgatatgatcacaatatgatctttctttcgttacggatggatggatgtttgggattcaggctggaaacgttgagctgcgaaaggctgtgcgtgcaagcggtgcggcccgagggttgcggtaaccttctttcaagacacatccgccttcgtttctttcttcaaactctcatcaccccagaaccaaacaaacccactccgattatataacatggatattgttattcgagctcccgagtacctcaagtctttccgagtatgtttctttgctctttgttcttctgatgtttcctgtcgcgtgatgctctgttcctacgaaatgctggctggtgatgtctttacatcggggcatgcggatgaacggacggacgaacgaatagatggacaaatccccatctggtgaattagcttcggagctcctggcatcctgaagcatctgtcttgtcaacatttgctgacgagagatgtattgtccggcctcttgtataacactgtaggagaccaagctgtctgctcttcgacctcttaatgaatttgtacgtatctcttgtttgtatcaacatcttgagtcaaacggatatctaaactcgagatccttctcttccttctctcgtgtttcttgactgcagtttgatcatcagaagctcagccgaccagttgatatgaatgaggctacatctgtgagtgaactttaaactcgtttttcttgtcgttcggtgacaagaagtgtgatcgctcatgcttttctacccttttcccctttgccagcgaatttcttacaacacccgatacttttctggttcgtctcgcctcagaatctcccttctctgcgatttttgccaccttccgaaacaaagcttacgtgttgcgtgtctatatccaaacaggaaactacggagttgtcattgctaccctagccatctacgccttgttcgtattcatcaacctctattttgaaacccattgatatagtatttacttactaggcatttggtttggtagaatcaccaaccctcttcttcttctatctctcggattccttgtcggtggattcatcggtatcaacaagtggggtcagtctctctttcctctctatcctagtttgatttgaatgccagaagtatatgaaggttgactcggactctgttctctatcattgatcgtagctcctgagccgtttgagatcgccggcaagaccatagatcagaagtctctctacattacgtgcgtctgcttgtcgcgcacatctatttttaccaaccattttgtcatctactgattgactctaattgaacttctttcttggtgtgtgtacagtctctttatcattggtttgcccgttctctggtggtctgctcctctctcgacatttttctggctcgttggagcaagcatgttcatcatcttctcgtacgtgtctgatcaatttctaacctctcaactcaactgagtatcgctttatgttggccttcctaaaaaaattgattctgatcgtaatcattcttcagtcatgctgctcttcttgaacctggagttgagagcgaatacgcctctgccgacggacaggtttaaggatgttggccgtagccggcgagagcgatcgctgaccgagagagtgaagcgtcggtcgtacaaaccttggactatagagaaaggcgactttcttctctttctttgttctttctgtctcttatgtttttttcttgtttccttgtcatctcttctcgattaatttgggatccagttagttagctagctatttatcttatctgcctgtctaaagagtcgtccgatctagaaatctattcaggtactcgacaacaacttcttctatctcttaaatgtgacataaggggatcgtaaatagatgaatataagaattccagataaccttaagtagaaaaatcttatcagaccccattctgaccgtcaaccttcctgcacccaaaggaaagccaaggactgactaacggccaactcttcaaagagttcgtttaactctccaccgtcttgtttggaaagtacgtacgtcgtcttttgcatgtcctcctctatttccacttgaagaccaaaaggcgctaccagaggaggagcttagcagacggcctttgagggtggtcgccgttgtcgtcgtcatcgctgttggtcgctgtcccgactgatctctttctagtagctgacctcgtcctgtgttctatcctgaacaccgttatatctttccagctcttccttcttcttttatcgctcctctctgctagtcgatttgttggtctactcgttcaaccttgccagtcgattgcccgactatttgctcgctttaccctcagaaccgcgaggtcgatcgttctgcccggctcagtcgattctcttagacaaaccagtagcgaccttcatttatatcaccttccttccacttctcttcctttctgtcttctcatatcactcttattctccatcaaattttccgccagagatgttctttttttcttttcgaagctcgtcttggttggcatcgatggtcattctgagctcgatcgttccgagctggggttctgccaagacacccaacgcaaatgcagggaaaagtctttgtgagttttctcttccctcatcgtgtgaatcgcttagtcttggcttttcatccatgacacttaccgaacgaacttgactctcattttctatgttttctccttcttcttttctcgctcttctgcctgtacgatcatacaataagtcaccaactcggtcacctactgcctaccgccacagggaatcattgtctcttcattcaatttcaagtactaccaagccaatgaggttagtccgtccgcctcttcttgcatccctcactgtgcacgcacagagtcatgcctcatatgtttcttgactaatcctcggttcttttcttcttgcatatgggctcatcttcatcatcactattctcattgaccgccttcagagtggttctttcgatctctctgtagccttcagtagtaacattaaccctgaggtgaccgcctctgttgaagtttatggcaagtaccctgtaaactggacgatatctgtatgcgacatcttggacggtgtgctctgtccgttgccgaaaaacaacttcactggtggatcgactctgccaatccccgatgagattactagcttgatcccctcaatcgcgtggtcggtaccggatctcgagatctacgtaaccctgttgattaacgatgcgtattctggagaaagtgtttcctgtcttcaggccacactttctaacggttggtcgacagaacagtacgccgtgctctgggcgagcgctgcgtttgttctgctggccattggagtgtcctggttgcacacctgtttgaactattgcagagtggacgacgccattctcgctaagcacgggccctatagtactgctactactgcatcggcaggcatcatcacgggcagctccagtcctggccaaggcagaatagtcgatattgtgtatttctttcaaacgatgacgtttgttggcatgctcggaatcgactatccgaacgtctttccgcactttgtgctgaatttccggtgggccgttggactatattacgttggtgccgttcagagggctatcaacaaggcaagacatttgaccggagcaaagttgccagagtaagtttctgtagcaaggaaagaaagacttcgcgaccaatcttgataattgacatcaattgacttatctctctttcttacaaaagtacggcttacccatcagtccttttggtgaaccgaaagtcgacctacgtgcaagctattggtggggaaacgtcctcgtctcctctcgtcgccgcctatgcgctaccttccgctgggagctcaaacggatccgcctcagatagtatactctctcggtcgctgcctgcaccacatatgcttcttccccgggcggacgttcccgcaacagacacgttgaaccagtcgacagcgattccgaatgggattccggtttattcaaacgcgatcaacatctcaacggcaaacacgtggatgactgtatttttcacttggctcatggtgattgctgtgttcttggccatccatcttgcagcatggggtctgttgtggctgttagtcaagttgagggccgggaagcaaacgactggctctctaagggagaagaatgcggccaagtacgatagaacgtcttgggtggtcgatacgaattcatggtggggcgaaagattgctggccaatttccatctagtgttcttgacaaacgccttgagacttgtatgtcctgatcttgattctctctctttccattctaagccagacgacggactgaattgttgttgtctttctcccttctctctttatgctatcattgtctacaacagaacttgatgatgttcttcccgatctgcgtctttaccctctggcagttcactcttaatgatgcctggctaccgatatttctagccgctgtcgttcttgtatggactctgctctttttagtcgtcgctgaaggatcgctctcggttgcttcccgtcggtctcactcgattgctgcgaacgccggggggcgcccccttcgatcttctccatctcacgcgccttctggtacatcgtcggatgcgccttcgaatgcgacgctgacagagtctgtcggtcggatcaacagctttaccggccggctctcgatgtattcgccctttccattattccgaccggctgcatctgggttatatcaaccgttccggcgaccgttacgtctattttggcttgtgccagtggtgattcctggatttttgaaggcttgcttcatcgctttcggtcaacaacatggcttccttcagctcattgctttggttgtcatcgaggggctcacactggtggcattattggttgccaggccgtatacatccaagaaggcggattggatcggagtgctattggcgttattcagattggtcggtaccggtctgccatttgcgttcttcgacaggttgcacgcgggagggattgccaagacagtgatcgggatcgtctgtattgccgtctggggtattatggtcgttatcctgttcatcggtgtttggttcaatctgttctggggtatcttctggaaacggcattatccccaagcgccggtcgaggtcgaggattttgtagctaccgatcatcagggatttatctctacaggagggattgaccagtcggaaaaggtatcggacgtgccggctgataggttcatcgacgatgacttacgggaacacgggtatatggacgagtcgatgaatgtctctgaggatcggtatatgaacgagtctgaaagatcgatggagaacaggtatgcaggcgaatccgattcgatcaggcctttctctcgaccagaggagccgtctccggtttgggccgtagaggacgagaggagacagacaagacctctttaactatgggattaggcagacccaaatcctgaatctatccctttcgcttgtcattacgtagatgcgcattctttttccttcccctctccctctgttcttcccgatcaagacttctgtttcttcttattttcctttatttatacaaaaagaacctagactgaacagctcagaaaggaaggggaagtaaaaagctccgagaccagaagaggatacgctggctcgcttttcttttcaccattttcttttgtacactgttggcatcgtcccttctatcttttctttccttttctattattatcctgtatttcatctcgtccattggtcccacgctcattctcaagtttacccatagatgctcattcctcttgtctctttcctgtttatgaacgatctttgttatgaatcccatatctccatattgttcctctttcctttttgttctgtctctaagctatgacaaatggagctgtatatgaaatactatacttgtcgaacaaacttaaagaaacttcaggaaggcatcgggcgagaccgatataattaaaagaggggttcggcgtctttcatcctctttcgtgccgagtggtgtgtgggtgtagtgatcctggcgacgtatcgcctcgttcgagtagctcaaaagaagcacgtctatcttgtccaagtatttattctgtcactttctgatcgacttatgttgaactgggacccagcacgatcggacgttgtttaaaagaactcaacgatataatggtcaactcggtcgagtccgaagtgatatcttttgtttgttcgataagtacacatccataacgaaagaggcgttctcgttctactcctccgcacacacatatatacacacctgctttcggtcctcttgccggacaggaatcagtttcgtccaaccgcggttccctcttggtcgatcagatcatccttagtgcaccgaaagcgccgaggatcaagagtctttagtcggaccggaccggcagttctatttttagatattatctatcctgcagccgtcgtcatcaatcgcagcccgcaaaattccgcctctccctcccttgccctacgtttccgtcctttccaagttgatctcgttccgactacacaagtccctgtagctgccctgttcctagacagatgtcatccagcctgatcgacagacgtcgtgcaaggttcgtctgaacggcaaaaagaatggaatttccgtcggccctgacagtctagatctctacttgctctttccgagcccacccgtgtaaacgtagaaagctggaaagcttccaccgatcccgctttctctgacgctcgccgcacgcttccgtcgggcgtactcgcgcactcatcgttggaatctaaactctctccactcaaaattcgcccttcacccgcttcgccgggcggatcgctacggatagaggaggacttggaggaaaccggatggggaccatgtctctgagagaaaaggtacttaagtcggggtttcttttccgttcctcgttgcttttatctttctcgctcttccctttcgatacacactcccactcccattctcgtttctccctcccacctacccttctcctaatctacagtgaactttgagatgagtagtgagaagtatttcgaggatcagaagactgttgctggtagcaagctcgaggtgacacatatcgagagtcaagaaccacacagacatgtcgatcttgcccataatggtaagctttttaccctgcccgttgatctctgattcttgctgtcgtctgggttggaattgacgtcatggttccgacatgtgtcgtgttcggatctcgttttttttttttttcctagtaaacgcaaggtaaggccacatgttgaactctttatctgagcgctcggtttggtatattgattcttctgcttcttcttcttcccctgcgccgaacagaattcaaaacccgctctatgggttgtcgcgtgaacaacttcagcacagagtttccaagtttgttgcgcagcataatatggaggttagtccgcttatacatgctgctctctatggcgcggtttgtttaactctttcccctcgacgccacatgctgaatcaccgcatgaccccttctgccatttcttggcttccaggatgaagcgttgtttcaaaaagcagccatcctcgcacagaacccaaaggattgggagacccaggaaagtctgacggaggaagatagatatcatctccgacgagagatcaccagtgagtctccgatcgttctgtgtttcgttcatgaaaacgctttgtgctgattgttatctgcaccaccttatcagacaaatggtcccagccgatggctctttatatgaccgttgtttgttgttcgttggccgctgccgttcaaggatgggatcaaactggttcgaacggtgcgaatttgtcatttcccacagcactcggtattccgaccacggcagtaagtccagctcttctatcgaatagtcttatccgtttatccgttggttcaagagcttcactcacggcttctcctgtcctctcccacagggcgctcctaacgccgagagaaacgaatggatcgtcggagtgatcaattctgcaccctatcttgcttgtgccggtttttcgtgctggatgtctgacccgttgaacaactggctcggtcgacgaggaacgatctttttctgtggtatcttttgcacgatctcggtcattggaagtgcgttcgcccagacttggccacaacttttcatctgccgtctgttacttggtgtgggtatgggtcccaaagcctcgaccgcgcccgtctttgctgcagagaacgtccctgccagcattcgaggtggcctggtaatgagttggcagctctggaccgctttcgggattttccttggattctgcagtaacgctgcagtgctcaacacaggtaccatcgcctggcgactccaacttggctcggctttcatcccggccgtcccgatgacgatctcgatcttcttctgcccagagtctcctcgatggctcatgaagaaaaacaagtacaaccaagcgatgaagtccttcctccgacttcgaaatagtcccattcaagctgccagagagcttttctttgtccactgccagctggaggaagagcacgatatcatcaatggaaggacctacttcaaccgacttaccgagctcttcaccgtcccccggatcagacgagccactctggcctcattcgtcgttatgcttgctcagcagatgtgcggtatcaacattattgccttctactcatccactatctttgccaacgccgggtactctgacaagcaggctctcttcgcttctatcggtttcggtgccgtcaactttgtctttgccttccccgccatcttcacgatcgacacctttggcagacgagctctgcttctgctcactttccccaacatggcctggactcttctg

SEQ ID NO: 2101 - DNA, 9499 bp, Xanthophyllomyces dendrorhous
  misc_feature (217)..(226): n is a, c, g, or t
ttggaagaactcgactatgtgtttgccgtcccgaccgcgacccacgcgaactaccaaatgaagaagtccctcccttatttcttcagacgataccttctttgcgataagaaggctaagcttgagcctctatacaactttgacgaggttgagtcgattactcacttcgaaaaaggttccggtcattagaggattttttcttcttttttcttcttttttnnnnnnnnnntttttcctttttttctctctctatctttcgcctctgcgtctgtcttttctcctcgttcgaaatccagtttttaccctactctgagacccttgtctgctctcccacatatcattgtaaaccaatgggctatacctttttgttcatgccactcgcttgggtcttctttctgtttaatgtaactcctttctatgtcaatcatatgtattcatgatgtactcctctcaattctcatctagttatcaagttgaagtgaacaagagccggtgatcactctcaacctgaggttgtcgagcgtcaacttagatccaaatcgagagacatgaacttcattcttatcttacgacgacctgttcttcttcacttacaggaggaccaacgccgttccccctgtcaccgccctcgccttcaccggggacgggaacggtagcagtcatgaccgatactggggtcgaaacacctgaaacatctcgagaactgacagccgaagcagaggcagaaacacctccggccccggcttctgcctcggccagtttttgccgttttcgggcggcagctttgattcgttcggctgatcgggtggccaagactgatgatgtctgttggtctgcgtacctgttgatgtcgaaaggttgaattcaagatgacaaaccggactatgtttaggcaaagagtgcgcatacaaagaaagagagggagggggggggagagaaagaagaagaagaaagcagagaaagagaaggaacgaacgctttgatggcggagaggatgtaaccaccggttccactcatcgtcatgaacggatgagtcctcatcggcaagacctgatacttcctcaaccaagattccgttaccgtcgggttcagataggtaggttccgtccttaggatggcttgtacgtcagtcaatacttgaaggtagggactgtagacgacgatgctggatgaaccggcaaggtatttcgagagtttctcgatgattgagtatggttcgtatggacaggcgatcaccagtctagtagccgttcgtttttgaagagttgagagagagagagagagagagatgaagaaggggaaagtgtgagtatcatggagaggtaagagggatatcgaacaacaaggaacgaagaacgaacccatcccattcgccggcaaaaagctcctctctggtcttcaggagctcatccctggccgatctcttcttcttgatcctcgtgttcttcccgccgccgacatggcctttctcagccgccttgattaacggtgtatccagatcatcaggcggcgtccagctctcctcgacggtcatccagtttaatgagcaagtcgtctctgccaacatctcctctgggaaattcatctgggcctgtaagatattgagcgacggtggagaatccgtatcggtgatcgtaagaatccggcctttgcctcccattcggtcgagcatgccgcccacgatcagaccaccacagtcatcaatcacgatgtatcgccctccaggatggacgtttccgaacgagagcatctgggcaaaggtatcttcgcgcatgcccatcaccgtaggcgcgaaccgagcgttgtggtaggccaagagagagggaatcgtgggagccaacggccggaacgtcttggagtatctgttcaaccagattccaaagaagttttggcggatgagcttgatttgtccggtataacggacaaagaagggcaacaaagaaaacccgctgacttttgctcctttcgctttttgtacttttcttgagagtatactgtcttgagatggaacgacgagtgtttcgcgatttgcttggcgataatatcctgttggatatacatatgataaaaacacaagaatgtcaagatgagctcgtccatcctacgtctgtatagacaccagaaaatgaacaccatacctgagcgctagcgccttcatccttgagcttttgaatctcttcgctggataagagttgttgttctgttccgtctccgattagctcgttcgtagccatggtctcctctagggtgatggcattggtagaaacatgttagacgtcagaaggacatatctcatggtgaaacaaacgtgaatgagaaagacgttgtgggtaggacaatggaggggaagatacttaccgacttcggtgatcgattctccttgaagtggcttcaatgtagcctttcctcctggctctgtaggctcgacgatagcgtatgtgattccatagagcagaccgatcagagcagacacagggaacgagccaaacttccctagggagaccgttcttaagatacagaaaaggagagagagaggtgaacaaacatgaacaaaacatgagcgcgcttgcttcctagcagagagggatgatgaaaatgactaacttttcgcccttgacctcgaccatcttcatcatggtactcggcaaggccagaatcacctggtcgccaagtctaatgcgctcgactctctcggcgagggccacgtcgtactttcccggctgggtctacacacgaacgagggaaccaatcgatttagacagaaatgatcagcttggaatgacgggacaagatattcgccagagaacatcttaacatacggatgttctggaggacgaagctactggctggttcgagctcatccttgcaatataatcgtccaaggaatgaatcaggagagagtaggcggatgcgtgtgtatgtgttggatgtgagcagaagggatgaaagccaaaagacttttttttaaaactctgaattttttgtcataatctcgtattgaattttcgtagtcgattggaaaattcgtctattcaacttctttgcgttctctgctcactcgacatccatcccacacatcagacgatacatcagacaacatggcttctgtcccctccacgacgaggaacatcctcgcttccttgttccattcgagctctctctttgcatcttcctcagcttcttcttcagccgcggtcgttcgatcggcaacactgtctgccccgctcgctccttcgccgagtatttgggaaactctccagggtctttggggacttttacctcctatcgtgcttgccgtgcccaagcagcgaacgtctcactctaagaagcggttgagaagtgtcaacaagcagcttgatcgaaagaccagttagtatatcacgttctcttcgtcttttgtctctctgctttcatcgttcttcagccctttgccaaatccatatccatcacggcctgttggcttctttcgatctttctcttctctttgttatattgtttctttgcctcagttgaagcgtatcgcgcgtataaatgtttttttttctttgtttgagctgttcactgacttgaacgtatgcttgttcttctcgtcctccgtgttcccaaccttcttcgcccttgttggaattctcttgtcttgattcggtcccgtcttttcactcacaccttgcgtcaaccgtctatcctctcaaaagacatcgtcacctgtcctgcctgtggacttccaaaactatctcactcgatctgcagggtatgtctatcgtcgataacccgatcactcaagaacgaacaaagagtcaaggctcttttggaaggagaagaggaggcgcctgtgttggaccgtgtggaagcacctttggaggtagaagcagtcaagaaggaatagttttctatggaagctagagagaagagcagagtatattaaaagccagtctttacatcactgaaagaaacagaagaacacggtcacgcatacagaccatgcacacagagaaaacactagagaacaccacagaaaaggaagatagaaggactaccacgtttattaggaaacggcgtagtccgagtttcgtatttctgcctttcccttctttctgttaagcacccatccgatcagacaaccatcaccatcgtcatacaacatgttctcaaggaatcttggcagaatcacatgcagtgctcgcgtcggtaagtatggtctctagatcacaggtcgatgtgcctgtctcttggttgcaagtgcggcagcattgaacgtaacctatccttccctcgtctctctccgcatggttctctgctccctagcttctcagaaggctttctcgtccgcctccaaagctcaatcagcccaggcatggagatacgctctcggaggaacctcagttgccgtcggcgctggattaattgcttggcctctacttcaagtatgtttcactcaggacagtctgactttcctgcttgcctcgccaccatacggaatgagctgaacatcctctttctcctctatcggttggtgttgggaataggaaaacgtccgactagaagcaccggcaactacccctagtatcgcatctccggttcctgccaaatctttccctatctcgaatgtccccatcgtgtgtgcttctatgttgactcttgaacgcgtccttataagaaggaggacttacgttgttaatcaacccttttacttttcttttcctattctctaaaagtcccctcaatatactgcaatggtcgattatgttcggtctctccagcaacgcattacgagttcgattgaatccctcgaagcggctcatacgccttctgctgattcgcctgcaaagttccttcatgattcttggtctagagcgaatcacggaggggagggcatgtcttgtgttctcacttcaggtcggatcatcgagaaaggaggcgtcaacatctccatcgttcacggactccttccacccagagcaatcgctcagatgaaggccgatcattccgtcttgggctccgtcccagctggaacatccctgccgtactctgcctgtggactctcgcttgtgctccatccgaaaaacccgatggcacccacggttcatatgaacattcgatactttgagacttatcacccggatgacctttctaccccgctcgcatgttggttcggcggcggatccgatctgacaccatcctatctgtttgaagaggatgccgttcactttcatcagacgttgaaagccgcttgcgacaagcatggggagggctactacccgcctctgaaggcatggtgcgatcggtacttccaactccctcatcgaggggaaagccggggtattggcggaatcttcttcgatgatctagacccatcgtcagaaatccacaaggcctcggccaggttccaaggggaaggaaagaatccgtctggtgacgaagtgttctcatttgtgaagagcgtgggagacgcgtttgtgcccagttatctgccaatcctggagaagaggttcaacatggactttacagacgaacagaagaggtggcagcagttgagacggggccgatatgttgaggtatggttctttctttcttcctttctccactcttttatcactctgtgaacttttacgggaaccctgactgagaatatggttcatccaatcttttttctttctctcttgcacatactcacacaaatcacaccgactagttcaatctcgtccatgatagaggaactaaattcgggtaagccatccatcttactaaaccgcgcattttacgtccccgtctgcctttcggaacatcaatatctcatcttcaacccttttgcgatgaccccctaggttaatgaccccaggcgctaggatagagagcgttctgatgagtctcccattgacggcccgatgggagtactgtccagagattgaacacagggaaggctcggaggagagcaagctgttgagtgttctgaaaaccccgaaggaatggatctgagagagagaggtagaaagtacgttcttttctcttttctcctctctctttctttccttctttcatttctgttcgtcaacctgcaacgtctgatcgatggcttctccccccctcgttcgttcgtattcgttttagtttgaagtttaaagatcagcttcatagacaagagggaaacgatgatctatcactatgacctgtttgatcgctttccaaagattctctagtctgtcagcgcgcaggatcctgtctgaacccctttagattgcacacgtcctttcccacagaatgtttcacgtaaacaggctagaaaaaacagtcacccgtctagacctagaaccgagatcctagtgttcaaaccccgaaactgagactgcttgaatgacatggatgatggttctcatgtgtggcagtacgagacagcatatcaggcaaaacgagacgaagtggtcgacaagactccgttcttctcgctcaaactggccggtctcatactatttggcagtctgatctaatgtgcccccgtctgcaaccatctttgctgtgattcccccagtgtccaatcttcagaaccgattcgcatcaatcacccaccacttagcgctttgaaacgaagtcggatgtccctcttagtagatcaaaccctaaaagaaacgagagtcaaggagtaatgaatagtgcttgaattcaaatatccatgtaatattcttccgtccgaaaacagagagaacatccccactcccaaacagtatccaatcgaaaagaccaaaacgctttttaaacgacggttccagagttggaagcaattcgggctgtatgaagaaggacaatagacaggatcggtcaacaaatacccaaccgaaaagagcctgggaagagacttacgccaaagatcagcggcctccttggcgacgggtccagtgatggcagatcccttcatctctcccttggggttgacctgatgcagtacgaagaaaatccaacaaggatggtgagtttacgagaacgaccgatgcatcaatcgagcaaagtataggcgtgaaaggcaagtaaaactcacgatgacaccggcgttatcctcgaagtagaggaagacaccgtctcgtcgtcgccaggcctttcgctgtcggatgatgacagcgggcatgaccttcttcctgagctcaggctttcccttcttgacggaaaccatgcacatgtcaccggcggcggcagcgggcaatcggttgagtcgagctccacatccgacaacggagataacgtagaggttcttggctccagagttgtcagcgcagttcatgacggctccgacgggaagaccgagggtcatcctgaacttgtttccggcggcttgggctgttatcacacacgacatgataaaagtaaagaaaaaagaaagaaaaaaaagaacgatcaggctctgagaatccactcgtgggtcgtcgtgttgcctagagaccctctaggacgtcgaatctgtcgaggagccaccaacggatctttcaagtaggcgggacgacaaggaaaagaacaaatcggtgtctggggtaggtggaggaagaaagagaagggtagaaaactatatgacgtgttttgcaagtcggactgcttgtctttgcaaggcacaccacacataagcatctcccttttcctccttcccacctgattcgtctttaatccttgttgttctttgacctctgttgaacccgatgatggaccacgacatagacttcgtccctttgtccctcctgcattatcttgttccgctctatatcccccatctaaacccagtccctcatgatttctctgcaaactcaaccagtcggactaacgcttggacatcttgaggagtctgtttggaaggaagaaggcaggacaaaacgacgggcacaagtcgaagggtttgaatcgaagagatcgaagtaggccaaaaggttaacagatcgggtgtttggattagatttttttgttgtacaacaagttgagttgtgaaaattgagcgattcgttgtagagccaggtttggagatagccacacgagggagaagagaaaaaagtttccggtttgaaagaaaagttgagaaaaaaattcatcagattccgttcgttctctcattctttcttcgacatccgacatggaaacaagactccttctcaagagatccgacagctgaagaaacataccttgacgagaaaaagtgagcgtctagcgattcaaacctgcgaagtcggccccctccaaaatcgaaaaaggacgcccagaatttttcactgcgactaaggggactggccctggtgagtcaaatatatgatagattagttgaattcacgatccctattaaataaggttgtgttagggttgtatctgaatttaaaaaaatggttcagctcagtcttcctcctacgtgcatatcaaaatgcacacacttcctatcattctacattgtttgacatcagccagttgtcgtctgttagactgactgaatgtatcaggataattactgatgactgtgcctgctgttgtgtcttgactgctcagagtgagaatcaaactgatcagagccgctgtacttgatcgttagactccttccatttcacacagctcccacaaagttattcgaacttaatgctgattgtgaccacacactagtgacggcatgaagactttgtggataaaaaaacatacttcgcagactcggaatacaacaacagacgtacatgaaaagaaaaagggagaaaaaggatgaccagaacgacgtgtgagatctatagtctagaaatctacaacgaatggaaacctaaaacttaagcccagagaaagaaacatagaaactgatacacctcgaccctccaaaaccctccaagaaaggaaattcctttgcgtcagatctactgacagtcgatgacaactcgagcagtcaagacgagagattgcatgtcctcgtagatcttcttcagattctccatcggctgtacctcaaagtgcgtagacacagcaccccgagcagccagatcaagcgactcgatcgcatcctgtcggttgcccacatacgatccgatcacccggtgctcgttcagcaccgtaaagaagatgttcgcgttcacgtacgcctccttcggcagacccacacagatgagcgagccatgtggtcggaggtacgacagcgcctggttgtacgcagcagcaccgctcgctacacacaccgcagcgtgcgccccgccgtcagtcaccttcttgatcgccgcgacgacgtcctccttctggtagtcgataaacacctcggcaccgtagccctcgacgagcttcctcttggcgtctccagagtcgataccgatgaccttgtagcccatggcctttgcgtactgcacagcgagatggccgagtcctccacctgtagtgggcaactatgtcagctgggcctgcaggtgcgatgcaagcagcacgtctgataacataactcaccagctccagtgacgacaacactctctcctggggcaccgccgatctgcttgagagccttgtagacagtgac

SEQ ID NO: 2102 - DNA, 32255 bp, Xanthophyllomyces dendrorhous
taagggcagagataggcagagagagggagagagggatagaaagacagcaagctcggtcagtccgtgtatggcgaaaagaagaaaacaaaggggaggaagagaactcactccagcgcagcagataggagcagcaaagtcgagggacagcgcagaagggataggagtcaagtgctgaataaggcaggcatgatccaaggtcagcgaggcgtatcatactaaagtactctgaagcacactatagacaccaaataatactaaccttggcgtaagagaccgcccactgctggaaagagccatcgacagagaacccgtggttcagcgccttctggcagcacgactcgtatccccgtcggcactccgtgcactccaggcacgagtccgccagccacttcactccgaccgcatcgcccaccttgagctgggtgctcgtgttgtcggcgatcgcagcgacatagcctgttccttcgtgtcctccgacgagaggaagcttgttactacgcaagagcaagagcagagagagcgcatcgtcagcacagacagcacagacagcacagacagcacagacagcacagacagcacagacagcacagacagcacagacagcacagacagcacagacagcactcactccagaggccagtccccaagccacacatgcacatccgtgtggcacaccccagagtacacgatccgcacaagcacctctcccggcttgaggtccttctgctgggtcaccggccagtcctctcggagcgtcagggggccgttggcctcctcgaacacccacgccttctgggtctctgcacagagcagcacaagacagcgcatgacggcagatgcgatcacaggagagcagagacagtcgtcagtcaccgatcgctagcaaacatgtccgctcaggcatagacaggtatataggcatataggcatataggcatataggcatgtccataggtacaaatatggccgactcactggggatgtcgtacgacgactgagacttgatggtctggttggccatgttgatgatagtagtggtggtggtggtggtggcggtggtagtagtagtagtagtagtagtagtagtagtagtagtagtagtagtagtagtgagatggaagatgggagatgggagatgaagatagagatggaaagaaagtcagaagaggtttaagccgtttaagtaggccggtcggaatccaaggatatttcctttccgttcttttccttgcatgtggttatccccaaccgggagaacaggggattggatagggatcagaattgcaaagacgaaagatggacaaggacaaaagagagtaaagacaaagagaaagcccaagtgaccacgattcgagtagtcgacaaacagatgagacgaatggtgaaaggacggaggacagaaagggatccctaagtcacccgaaggtcaatctgatgtcacaaggaaaacaaaatcccgaggagaggcaactagagcgagcaaaggcactaagttagctcgaccagagagagagagcgggaaacatcccaagatacctctaaggagggtgtgaagtgtatctgcggctcggagcccagggctgaggaggctagatcttcagggcaggctgaaggtctagaggaagcaaaagaaaaaagcttccatctgatgctcatgaggaaactcgggaccggcaagatttgaatccatcgtatgtcaggcacgcaggcaatcagtcagtcagtcatcacttggacggtgtgtcgatcaatcagtcaatcaatctctccgggtctttggtcgggcaaaaagagagagacaagagcaaggaagaaccgagtgaagggtaagagagataggagataaaattcggtctgatgaccacgcccgtatctaatcagctagtgatagtcatcctgccatttggaagtttattcctattccttccgaattcacccataagcccaagctttttttgggtgccatggaaacattggacctaccgtctcacacgagacctgcgccagcctcggctggacctaaatcactcggcaaatactttcgttcgatcagggaaagcaacaggagaagaaagagaaaaaaaaaactcggttgagaactcagactcggagatcatcaatcactagtcatcaaaaatgatactcattccatcctgtgctctttcaaaaggtcagcaggcacaaagacaatgaaaaaatcccggctgtgtacaatcaatcacagaagagaaagaaaaatgaaggtgttcatctcatcggctctttctcaactcatctctgaattattcttcatatttgttcgcgagtcgttcaatcaatttcggttcattgaagttttccttctcgggcttttcatctacttttctctgttaatactgatgtgatacttcaaacttaacgtatgatctttccatactgtcgctcgtcaatccagcgcgaacgaatcaaccttaatcaattgttcgttcgttcgttcattcgaccgacccatttcattctaaggattaaagttcaagctcgcattttggaatcaagtttagattgagatcatgaataacgaagaaaaagacgaggaaaatacagatagaaatgaggggctgaatctgtactagatgttctcttctgaattaatatataacacgagatcatgaatgaatccaaatttaaaaaaatagaaaagtatcaaataaaataatagtataggatagaagagacagagcgggagagagaattgtagggagaaaagagtgaagtagcacgaaaggctaggggtatcatgatgccgtgtatggcgtggaggtcgtcttttttttttgtagggttttttgtttgttttgttttggttccgtatgtaatatatgtaatatatgtactgtatgtgatatgatgtgatgtatgtagtagcgaacgttaaggagggaaacaggacacccaaacgaggagaggagaaagagaaatcgaacaaagaaccggaccatagaaaggaaggaagaagaaactagaagcatcaagcccgtctctttcctcctctctgaggaccgtcttcttcgtccgtctcgagccgtttgcgtttagccgaaccaggtgccaccgtcgttgttgacgaggaaactgacccacaggcctttctggcatttccactgggagccactccagtcatcagcttggttgcgtcattgacggtatagttgatgaatgagtaagctaccggtcctgtttgttccctctttcctatgctcgtgatcgcactagtctttgggcgcgatggagaagaaccagaacttccggctcgaccagaaagagctggccggagcttgatcggcttttgaagcgtcgtgatcggggacgatggcaaggaagagcaagacatcgaatccgatccaaagctctcgggggaggaggtcgagaaaggagaagaagacacaggcgtcaccgctgccatcgccaccgctttcaactttcgagcggcgttccgagcaggaatcatcggcgctttgattgtcgtaggtgctggtggcaccggcgaagatagcgaggtctcgaagacggattcagaaataagacttcccggatcgtgccatccacaaatcatgatcggtcggctggcctcgatccgtcttctggcaacgtcgacatcttccggttcggtcgagctcgtagaagcactgttgctagcggtagcaataggagtggcatccgcgccgcttacaacgaccgctttcttgggtctccttttggactttttgggaataggcggaggtagcaacgctggaaggtccgagatatgaggaggcgagagaggtgaaaaatcgaccgggccagaatataacgtggctgaggacggcctggtcgtctccttaatgtcctccccatccgacgaggcgagcatgctgatgtccaagttttcaagatcaaggcatcggagagtgtaatcagacctataggcgtccatgccgaccgttcgagattcccatgaatggccaagactttggttctcgccaccgtatccacccagtacggcaaacatcgatggttgagctgctgttgatgacgaaccagccacagaggcgccactggtaccgtcaaagacagagctgaaatcaaagttactgtcctcgcggagggtggatagggaagcctttgctggaagacgttgcctaccagcaaagttggtcgattggagcgcaggattcgaccgcgttcggtgggccgctcggaccggggtcgcatactgaactgtcggggtagtctccgatgttgaggagagcaaagaggatctagagtgagttttgatcaagaaagacaatgaacggttagcaaaggaaaattgggacatgtatttagaagcaagcaaaaatgtttgcgcggactcactctaagcattcaaaactggtgtacacgtcgagcatcgactctgactgtttatcttcccaagagctagtcccgagatcaacaacctgactgaaggagtgagattccaatccgagtgacaacggcgccggctgcagggcggccaacgagatggttccgttcgactttgcgctactgctcatcggacgcgagggtttcacccggttcatcttgttcaacacgaaagccggggttgtctgttctctctgttggagaaacggaacgttctccgcgctcagaggctgacgggatgagagcgtcggggtgaccagtcgctcgtcatccgaagacgggtagagatcgttcatcagatcttcaaagggaggagatgacggcgactctaacgcaaatggtgaggaattcgacgaggaagcggatgtcgacgagacagaaccgatggaagatgagcagagttgctgggccaggccaccaagggaggcaaagctaaacggcgagctgggctcagtgtagtatgagagtggggagagcgggtattcttcgtaccctagcgaggattcgattgagaacgacgagcagggagaatcgattggggagaagatcgaagagttcatttttaaggagtatatgagtgaggatgagagaaggaggtagcacgttcgagaagagagaaggagaaagagaagttgtgtctgtgtgcttctgtgtacgaccggcgacagttgtatagtctatcaaagacgaaaagacgatcgaatgggcactaggccacaaagaacgatggtcaaagtttcaagaagagagtgtgtgcagtctgttagaccaagtgagtggctaggcttttctttcgacgaaaaagagattcaaaggaaggagggtacgggagggacgtgatagggaatcgatgtatgaaggagagagaggatgagaggaaagaagagtttagaagagaaggagcaattgagaaagagaagaggaactatttgtttatgactgatcgagagccatgacgaccagccatgttcaagctcgggtttgtttatcccatcccaggcttcctccttcttgtccttcttgtcctccgaggttgcgcaagtgtaaagcatatgccgtgttgaatgaggcgatctacatccggctcaaccctccaaggtaggcgtgtcattcaacaatgataagccgcgtggtagtgtgtacgtaagcgaacgtggacgatggaatcaagtatgattcgaaaaaaagaacagcatacttgacggttgacgcctgggctttccgcagtcgaacaagaatacacgggccgagtgatgtaaccatatggttacgacaaaccgggcgcaagaaaaagagccgacactacaagattcgaaccagaagtaaggggaggatggcgggacagggggtgaatagcggtacggagggagagaatggtggtgcagagagtgtaagaagatatcatggaacagagtacccgagggcggcggagaggaatggagtgaatactagaacgagagagacagagaagaggcaatagagaagatcgatagagaactcgtatcaagaaaagctcctaaagcaaaggaggaatcctacgaagaatgaaaaagcgaaatgaaatagagatcgacactacaacgggactacgaaatgatggtagaaatcgtaatgacgagaaaaaataaataataataataataataatatatatatatatagtataaatccatgcgcagtcgcaaaacagcccgagtatgcttttaccctctaaaccgttttttgatcttactttcctccgctaaccttgttgttgctgttgccttcgtcgctttcctttccttcaagctacaagcattcacccgatcttgaagacttctctttctctttcttcttctgccctctctttctttccttcattttcatatacagcagaagatgagtcaaccttccggccgagtgtctccgcctcctaactcctatagtcaagacatcagcgatggcctcaagacggccgagctagaggtcaaggactctcttctcggagctcgagcgaccagcaggactcctgtcatcgagtcagctggaaaccctggtaggtttggttcttttcttgcaggacgtctatctattccctctctgtttgctatgccttgaggcggcttggtttgagttcctttagggaataagagatcggctaggtcgcgggaggcgcaatcttgtttttttttccttcttttatttcctcttctctcccttttttaaaaagtctttccttccttttattcttgctattacgtcttcctatcctttttgttcgaacatgacctagccaaaggcttcctctggctgtcattcgtcaccggaagtgaagccaggactggaaccgaagttgagaccacgaaagcttgctaaaatctgatactgacatccgttgctttgatgcatacacctctcttttagtctaccccatccttgcgtactgtggtgcctcgatcatgatgaccgtcgtcaacaagtatgtcgtgtcaggtgcacactttgacatgaacttcctcctgttgacgatccagtcggcagtctgtgtcggagccgtctttgctgccaaagccatgggtattatcaccttccgggactttgacatgaaggacgcaaagatctggttccctatcagtgctctcctcgtcaccgtcatctacactggttccaagagtttagtgagtgtgatctaatcggtggtgctgggcagacagaacgacggaaacatcactctgactcctatcattcatcgtatccatcatcacagcaacatctttccattccggcctacaccgtgctcaagaacggagctatcattcttactgttcgtatcatcttgcagctcctaaagcgacacaccttgcatgcttggctgagatcatttccccttctgtcttgtttatgacatttcgctttcaaataggcttacggagaggtcctctggttcggaggaaaggtcaccaacttgactatttgctctttcggtctcatggtaagttgtgcggtcaaaagccgactctacgcttagcctgagaggtgaacgctgtatgattctgacttgtcttggctgtcacaaaactagatcttgtcttctcttgttgctagctggcctgagctatcgaagagcttcgccgcgtatgtttctatttctaattggagagctttgcatcgtccaagctcttttgactgatatctttgttttgggcgatcgccattgtagctcccctactgctgtcgccgccgcctctggctctgacaccatcggttacttctggatggccatcgtgagtgacagatgttcttgtttcgttcccctctaggctcgaacgctgaccgcctagacctgattttgtattaatcgtccactgctatgcacagaactgtgtcgctaccgccacttaccttcttaccatgaggaagagaatcaagcttaccggattcaaggactgggattcgatgatgtacaacaacttgctctccattcccatcttgatcgtcgcctctatcttattcgaggactggggatcggcatccctcaacaggaacttcccctctgagaaccgaaacttcttgttgtttgccatcgctttctctggagctgccgccgtgttcatctcgtactcgaccgcctggtgcattcgagtgactagctcgaccacttactccatggtcggagctcttaacagtatgtgtattttctctgagtacattttcttttaatctcttctcctagctgatcgacggcttttcgatctctctttctttctactctcagaactccccattgctgcttccggaatgatcttcttcagcgaccctgtcaactttacaaacgtcacctccgtcctagtcggtttctttgccggactcgtctactctgcggccaagaacgagcaggccaaagaggcccgagcgcgggccgcgacggatatccctcttcacaacaccgacaggcgatagacggaagagacctttctctcgttcctttcttttccttccctcttcatcttatttcttagaacagattaatagcgtcgagggcgataggagcagaggagcgagggatggtggtccgaggatgattatagagttttccagtgtccttttctttgctctttctttctctcttctccttcatggtttaaggatcttttgtcattaagcaaggagagggaaaatcgaggcgcgcttctttctgtcttttcttctctccctctcacgcactctttctggcttgattatctttattggatgtctctctttcttttgctctttttatctctatctgactgactggttggtcatgacaaagtcactttctgacgatcaagaccaggaggaaaagaatggaaagaaggagacagatgtatctatcttttcgataaccgatccattcctcttctcgccccttcttcatttgtccttctttgctgttgctcaacatgcgacacctgactcatggctgtgtcgaagagttgtattcgatactagatatcgtatcaacgaaagattggtaagtcggcaagtaagattcggatgcgatcgtccatatgtatgatgatcttctgttctctcgttttctttctctctctctttcctttctcgttcatgctgttctgggttctttgttccatgctgtctttcttgttattttactttagagagaggaaggagatgtcgatattggtgtgggaatgggtggatggatgtacaaactgcaaggactgaaggatgaaggcaaagatgatgacgaaaccgtcttgatccagattctttccttgttctccttctttgccattagatttcaatctttcatactttttttttcgcctcccttcttctttctttacattaggtaagttgattgatccctcttgatcctggaccatgttgtgccaaagaccgagacgtcccgtcgatcgatcagtcggtcggttgctcgcccgcctataaacagtccagacgaaattatgcccctctacctctacctctacctctgtccatcggtcctcctccacgaccttcaagttttattgttgatatcccgagcgatagagtggtttgagatgaacaagacagaagagagggagaaagaaagatgaggttcagtcagtcgatgttcgtatcctacccttttttttttcttcactgggtcatatctcgactgaacctctagagaatctgtgtaagggaggtagagtttcggaaacagagtgaaacaagacaagaaactcacctccacctcgacctctgaatccaccacggtcacctccccttcctcctcttccaccacctctgcctccacgttcggaccctggacctgaacgagcctgttgttcacgaagtcgagcttggtccgactggacttgatcaaggacggcatctgcgagtcgtaggtattttatctagatgagatgaacatcaaattgagaagaaaaaaaaagggaacagaggaggaaagattgaatcaggatcgatacgtcgtgtttccgaacagcctaccatatatgactttccgacaacggcggattcgaaacgtcgaacataggaaggaaggaaggaagtaaaggggaacgaaccgtgttgcctcggacgtagcattccttcatcttccagaaccgttcaccatctgcactcgtttggaagacctcacggaggatgatgttcatgaaattatcgcacgagacaagatgaccgttgaaggtctctccgttcttgagctcgacgagctggttggaagaagaaacaaggaagaggatgacacccagatggacagagtgaaggggatagcgagcagaacagaaggaaaggagagtccacgggataaagatagaggtaagggaaaggatggaatcagtatccgaccgacaagtcgacccaataggtctggccatgctatatctcgatcatagaaacagatgcacgcgatggaagagggctgtttgtaaggaaagcgaacgaaccatcggcttgttctgagctgcattcagcagcgttaatggtaactgtgtggattttccaccagatacaccagagcacaagacagactgaatgagttactcgttcaaagaaccaacctgaaggagaacatgtactgaccatggtttgatgagtcggagagaaaacagattggaaaggatccacaaagcgaccagtgcagtgaacattggactgatgcaccccaaatgcaccccgaaagcatccccagacagagaccagatgtcacccaattgagcccagatgctcaacccatatgatccccaacttgggcccatgtgcctacttgagttgggtttgctgtgcacatctgccattcacccggcgcaaacacgtgcctctgctacgcacatgaaaccaccaacacctcggtggctatatcagatagagtaagcaataaagtctctaagagaactcatcgatgacattcagaaagcatacaataccatgaacacactggctgtcggacagcatcaaattcacaggtctacttgtatgaggaagatatcgggaaccaagccagccttctgtttctttcacagagaacaaagacaacacatccacccacacacccgcacagaaaaagaaaacagattggtttaacctacggcctgcaggatgagatcaacgcctggtttattatattccatctgtgttctgtatccgaatcccatgacctctatcggccaggtagcatacatccacagctcacaggtgccttctcttgcttcttgcctcgtcgcatgtcttgctcccatctctatcggtagaatcccgccccttctgatcaaaacaatcaccgtcgtattcaaactaaacccacacatcgctcggctctccacaggcccgaccagggaagaccatcatatgatcatacatgtgtgtttgatcggatctcgctcttggaagagtactttctgttctggtcgcaaacccttgccatcgcatccacccgtctgtgtcgtacagaacggttggcgatcaagccgaacagaccccggggcacattgatatatttctttctcacaagctgacttgactggacttgacttgacttgacttgatcgagatcgatggtcacgtctgaagcagggaattataccgactgaccaaccggattaatcctactcaagcatagactaaccaaccgatagactggctgaccatgtatcgggaatcctaggagtgtacggactggaccttggggtctcaaggtcgatggaccaaaggacatgatagatccatctctctcgtcctgtacagaaagctctaggtattgaattcaatttcttcatcttttcaggagctgttcggaatgcacgaaggaaaacgccggacagatcttgaacaggttgaagacatctacaaaaggcgaacggaatccatctcgtttcctttcttcatctcccatcttccatctcactactactactactactactactactaccaccaccaccaccaccactactatcatcaacatggccaaccagaccatcaagtctcagtcgtcgtacgacatccccagtgagtcggccatatttgtacctatggacatgcctatatgcctatatgcctatatgcctatatgcctatatgcctatatgcctatatgcctatatgcctatatgcctatatgcctatatacctgtctatgcctgagcggacatgtttgctagcgatcggtgactgacgactgtctctgctctcctgtgatcgcatctgccgtcatgcgctgtcttgtgctgctctgtgcagagacccagaaggcgtgggtgttcgaggaggccaacggccccctgacgctccgagaggactggccggtgacccagcagaaggacctcaagccgggagaggtgcttgtgcggatcgtgtactctggggtgtgccacacggatgtgcatgtgtggcttggggactggcctctggagtgagtgctgtctgtgctgtctgtgctgtctgtgctgtctgtgctgtctgtgctgtctgtgctgtctgtgctgtctgtgctgtctgtgctgtctgtgctgtctgtgctgacgatgcgctctctctgctcttgctcttgcgtagtaacaagcttcctctcgtcggaggacacgaaggaacaggctatgtcgctgcgatcgccgacaacacgagcacccagctcaaggtgggcgatgcggtcggagtgaagtggctggcggactcgtgcctggagtgcacggagtgccgacggggatacgagtcgtgctgccagaaggcgctgaaccacgggttctctgtcgatggctctttccagcagtgggcggtctcttacgccaaggttagtattatttggtgtctatagtgtgcttcagagtactttagtatgatacgcctcgctgaccttggatcatgcctgccttattcagcacttgactcctatcccttctgcgctgtccctcgactttgctgctcctatctgctgcgctggagtgagttctcttcctcccctttgttttcttcttttcgccatacacggactgaccgagcttgctgtctttctatccctctctccctctctctgcctatctctgcccttaggtcactgtctacaaggctctcaagcagatcggcggtgccccaggagagagtgttgtcgtcactggagctggtgagttatgttatcagacgtgctgcttgcatcgcacctgcaggcccagctgacatagttgcccactacaggtggaggactcggccatctcgctgtgcagtacgcaaaggccatgggctacaaggtcatcggtatcgactctggagacgccaagaggaagctcgtcgagggctacggtgccgaggtgtttatcgactaccagaaggaggacgtcgtcgcggcgatcaagaaggtgactgacggcggggcgcacgctgcggtgtgtgtagcgagcggtgctgctgcgtacaaccaggcgctgtcgtacctccgaccacatggctcgctcatctgtgtgggtctgccgaaggaggcgtacgtgaacgcgaacatcttctttacggtgctgaacgagcaccgggtgatcggatcgtatgtgggcaaccgacaggatgcgatcgagtcgcttgatctggctgctcggggtgctgtgtctacgcactttgaggtacagccgatggagaatctgaagaagatctacaagcagatgcaggacttgactttgactgctcgagtcgttatcgactgccagtaaactggaacctcctctcccttctccttctcacgcgaaagggtaaggaccccggttcatcttgtcttttgtatctggttttctctcatctttgattgggttgttgtttgcgtttcttttgtttccttgttgatgtagtgtaactgtagtgtaactgtagtgtaactgtagtgtagtgtagtgtactctattctgtcttcctaatccttctttttttggtcttagttatggtcttgatccagattttgacctaatttcgatcatcttgcaggatatacgatggcacgttccctctttccgttcacttcttttctggtctttcattcttgattgtatatctgccttccttcgagtctatgttcctggtttcttgccgtctccatgccttcacagccgatgatttcaattcataataattcattcatttgttcagaagaaggtttctttgttccaagaggactcccaaggaaagctaaaaagaagaaagaaagaaagaaactcatccaagaaacaaggaacaaacccattcagaaggaaaaaaaagaaggaaagatgaaccccttcctattctatattcaattgtcttttctctttttctttctcctcttttttctttcaagtttgtttcgtttgttgagaatacacagtaatttattcggcagcgaagacggaagcgtcgatcacgtccgatatcttgaggatttgacgctgaagaaattttcagatgtaagggtttcaagggtatcaagtcagacgaaattaaaggaagagatcaaagagacagggccgcagagatgaatgagagacaaagggcaagacacgtacaacgagctgggtagccaaaaggtactgctgtcgtttcgagatcaacgggtcgtacacgtgctgagctttcatgtctgttcaacgcaaagatcaggatatcatcagctaaccaaggaacaggtgatcttgcgagagagagaaagaaataagagtggagacagggctagggccagagagaaagagagaatgggaacgaaccgttctgtcctcggcccatacagtcgatacccagcctagtgttaccctcctcaatctgtctacttttcacttcagcgagcgtctcgatcgggctcaatccagagttctcagcaagagcgagcggaacggcgtccagagcggaagcgaaggctcgcatggcgtactgctcgattgacgggatctatcgattggaacagagagaagagggcgaataaggtgagacaaagtcaagaaaaaggaaaatacacaaaatagatcgtcttacctcgtcagcagccttggacacagcaatggaggaggagatctccgccgctccaccaccgtaaacgactcggttgtcaacaaccaagttcctgacaacgcagatcgcatcgtgtaatgctctcttagcctcgtcgatgatcttttcatttggcacggcaagaagaaacccggataacgacgatattagaagagaaaaaagcatgataaagagagagaaagtaggcgtaccatcttgttagatcctctgacgaacactgtcaccgctctcgtgttggcgcactcctcgatgacaagcatcttatcccttgtcgttccgaatgaaacctctcggacaattccggcatgaccaagcttatcagccgtcaggtcctcgaaccggggaacgatccgacccttggtggcgatggcaatcaactatatgtatcaagaataatgctgaacacggtcaacttcaaaagtctacttggtagatggagaaactgagaacagacctcgatctcgggtcctccaacccatcggacagcgggcagctcgttctgcatcaacaggtggtttgcctcgtcatcgaatccccattggcacacgactaagtttgcgcctgtgtctttcaccctatatattgaccagaatgtaaatcggaaccgccgttagcaaaccatcacacggcatcctgggatatgcgcgtgcacgccgggaagaaaaaagttgggccgaagagaaaactcttcagacctacatcttgatcatctgctcgaacttctctcgctcgtacacctggagcttcttgaactcttcgacgctctcgatgtccaacttatgcttggtcttgggtctcggtggctcgaacggacacgtcaagatcgcaatcttcgcgtccttcaccgtccgaggcatgttcggatgagacatatccttatcgacgacgactccctgaacgagaagggtatcttcgagagatccaccgactcgaccatccaccttgataagctcaaaatcaacgtctttacgctcgaggtcggcaacggagagcacggcatcgacagcaatttgggcaaacttggagtgcgctttagagacactggaaaggggattgtcaagtaagctttatttaggattatggcatatagtcgctttacacaaagattctcgaggccacatacatcttgcttcccaaactcgtcatggcagtcttgaacaagttttctgtgttgttcttatcaaactcgatcgtatcagccgttcggtcaagctcggcgacggcgacagcgcaggctttctcgaaaccatcggcaattcggatagggtgaattcctcgatcgagcaaagattcagaagcggacagaagagcccctgccaacactgtttagggtgaaaaagacaacaagtgttccatgtgtcagcctcgattctgatatttgacaaggtagcttgaaagagagtaaggatatcaaaagaaaacttaccaacgacaccggtggttccatctccaatctcatcatcctgactcttggaaacctgaacgaggagcttagcgatctggtgctcaacctccatctgtcccaagatggtagctccgtcgttggtgaccgtgatgtctccatcgggagagatcaagatcttgtcgaggcctttaaacgttcaagcagggcgagcgaattgcacaggtttgaacaaaagtgtaaagatagtttgtattaagaatgaagagtgataagcaggaaagcatgacgatataatttgcattacaggacagaaagacaaacctcttggacctaacgaggatttgatgatctatgtcatcaaaatagcaagtcagtatgtatgtcatttctaagccggcatacgtccagaacagaaagtactcacgtttgagatttgacgagcagcaaggatatgggactagagaggaagtaagcgagcaaaacattatgatcaagacaaggaagacagagagaagaaaaaaaacaagccgtcagcatatagtgatacaaaaaatctcaggaatttgtttgcaaacagaatgcttgagacatgatctctacacagatttgaacgctcagagcttcccagatgtcgaacagggattttaggaagaaggtattggagtaaaatgcaccttgatggcctcgtttccttgcaatctggtcttctttgcttgctctcgaacgatgatgaacggtctgttttgtttatcccgacaaaatcccaaacagcaagatccagcccagtggaaagcagatcaggtcaagaagaacgggaggtgagttgacctatcatcaagtaggacaaagagagaaagacgatgatcttaccttccgtactaggagttgcaaaccaagtacaaaagtgaatattggaaaaaagaaggatgcccaagaaaggaaaagaacacagatcaatacttgtaatgaacctgacagggtgattcaagtgcggtgaaaagcatgcttacctcatcagtagtgtagactgcctgccctggatccatgactgaatatcaacgagaaagggaaaggacgaaggagaggaaggaaggtgaaggtcaagagaacggtatgaaaggtgatgaaaggtggaagtcgctatgggcgattgaaaggttgggctcaaatccatatggttacaactctcgtggttagggttacggacaccgtaacctaactgctgacataagtcgagctcgcctggtggtttgtctggaggattggacgaagctcagaggacagggaagccagacgagagtcatcttgagaccattggattggagggttgtgtgttgatgttatatttaggagtcgcgtgtcagaagagggtttgtacagatataccggttgtgtgtgggtagcatgtgtcgaggttaccctattcgaaggatgattctagtcaaaagacaacaccaagctctcttcggaacacagacttgattaagtgatgtttctctctctctgtgcgcaaagacggcacatgttagattcctgatagaaatatagagaagatgccctaagtcatcggttctatacgtcctttgttgtgctggaagagccaaaaggaagatgtaaacccgttgggggtacacgcgcgctctcggacggacggacaggctgctgatgtcatccgataggttcgcttccatctactggatgagcagcatacgtaccccccttgtacgccttgaccctgaccttgaccttttcttgtttttctttctcgagtgttgacttcgccctgctcgctctttactctcctgcctccttgtttctgttacttagtagtagaagaatacgaaagaacaccaagaaatagaataaagattcgcgtggccgcccgaacaagatccaaggtttgttcattccttcacgttcctttcgcttgcttttcttcatctaattgtttgtcgattgatctgtcagtacatacacatataaaatcatacaaaaaccatggttaagaaacttcaagtgctcgtcggttccgacaggtttcatgtagaaatccctcacgtcaacgacgctgccaggccgaccgagatcgatacgtgggtgttgtgcctgctcctcttgttggttgaccatccgaggacgaacaatattctgaactcaacctctctcacttcgttttgattcacagcgataagtttgtcggtcgagtccttattagaatcaaagacttctcagggtgagctctctttttctgttatttttctatcttggcgtttcatccaaatctactcctgagcacacgcaccgatctcctcccgggctacaaatatctttatagaattacacctaacggagaacctcctgttcaagacgaagtatactttgccggacggagtcgaaagttctccattcagatcgaaggtagattcaagcagagacccggcgtcaaatcctacgattatgatgaggttagaatttctttcttggtctgtatcatcttgacgcgtcactaacacatggtatcctcatttttttttcttcttgctctgcacagattcaattcgggtcgtgagcccttctattatggtttctttcaatggtcttggaaatgtggcccaggactgaccacacgctaaaatcacatcactagggattttgaccgactcatcgattttccgaggaatctcttcaacgctggcatgaaggtcgcccaatggtgagtgtatatgtatgcgcgcatatacgcgagcttcaatgatatggttaccgtttgactcaacgggttcactctgctcgctttgtttgaaggatcgatgtgagcgccctgttcttctatggtacctctacaatacaattgggccctgaccgtgtttgaactctcacagccagctacgttctacgaagaaactcctccaaacggtcgaccttacatcatgttagtaaagtcgcttgcttcataatcacaaacaagatatgaaccaaagatacggaaatttagaagtctatgaatctgatgagttgattccctttctgttccatattttgttcaggtctccttacgcgtatgtcgctctcgtttcaatatcggggcagctggaacaaaattaactcagcatgtattacttcaacccatagtgcttgtatgaatactatcgccgcttggcctgctcctgatcgagcacaggatgctgtcgtagtttgtgagtctgactaccatcattccttctagcagacttctccttggagttgatcgtctgatgcaatcttcctttcatacgtgttaatagtgaggcacacagagaccgagagtgacggtgcgcttaagcacaacgaggtatcaatctggctcatcatcctgctatatcttttcttgcgcgctgtcttctccaacttagactgattgtcctccaactcttcactctttcctccgcctcaacagaaagatgtcccgcctggaatggaggatctgattcccgccgcacgggtcgatgaatattcaaagaagaacagacatctcgtccgatattggcggttcttaggctttaaagtctgtctgtcttcttttgctcttttctagatgagctgcctttccttcaaccaatttcactgatatgttatccttgaaactttcagagcgaccctaaagttgcggcctggttgactacaaacgcgcctcacatcctatcgactccttctctccaaggctcatcgtcaggccctcctaagctaacgcacagagattcccttggcgctgtccgcagagcggcctccccaggctcgccaggttctgcctctgcatctggaacaagcacgcccacttcgcccatcatgactgacaagaagaagaccttcggattctctggcctcaaagccgcgcttaacggcaacggaagcagcggtggaaacggacgggtgaagccagaggatgtgacgacggccgataagttgaatgccgtcccagaggaatccgacaagatagttagcaacaagctagacagccagctggggccttggaagtttgctagtcctgggatcgatattatcgaagtaaggaccttctcctctatcaactttacctctgtccacagattgacatttctgatctctttgcgtattctgtaccggctccaggacaacacgttcgtgttcctcaacaactcaatctcgacatccaagcgaagaaaattcttctgtgaaaacaacggaaagaaccgaaaagattttgtgtacagcccagacgtcgtctatgctaccagtccgtctcttcctcttgtcttccatcttcccttcgtacgtggttgtgtttgagatattgctactgacggtctgaacgccgaatgcatatcccatcctaggtttcttcacaccgatgtgcgatctcaataccctcgaccttgccatcggtcccgtccgcatcaatctagaccagttcttcagagatatgcccattagatatagtctgcgatcgacaaggcacgagctcgtagacggagtccaggaggaggaagttttctgtaccatcagcttccagttggttgacgttcaagcgtttgaagagtagcaggaagacgttcggagcgtgtcgatccatctatagcttcgctcagaagcagcactctatattattttctacctccttaatcaccttctcattgcgattcctctctctctatttatatggatgtatgacgtacggcgatgaagcccatcagcaacaaaaaaaaactacaaaggaaaggagtgctacacgagaaagtgaaagagattagatgaaagaaattctattgttttcgtccacttgtcgctttttaaatcttgtccatctcaaacacttcaacccttgaacagtagtttggccgacctcgtgccctctccttcctctccaacagcatatactcctagcattcactcaaattctatggcttctacgtcccaaccgacgtctaacctatgggccgacattcttgacagcgtttctcaatctcaccatcaccatcaacagacagggcagccggcgacagtacagacgcagcaacgagcgagtcggaagaacttgatcgtgttgggagaaccaaggacagggaaatcgacaattttggatagcttgttaaagtgttcttcagaccgttctgggtctagtcttggtgagtgtttctcgctttgttttccatcatgtttcctttgtttctttggctcctttcattctctttcgagatcgttgtttctggctcaagacctatggttgcatgtcgagaacaggagctgaaggtccatcgagtcctgacccaaactctgtttcgtgctcctttcgtctttttttttgttctgatggaacagtaaaaccggttatctacccatcggtcgtgaaggcagcgccttctgctaggagggatgctgctatgggctacgactgggtcgatgtccgggaggaaggtgacgaaggtcagtcctcggtgtctcatcctctctttccatgctaccctcgcttgatctctgtctatcctaacctaggtttgatggaagagcaggggctaggaccacagcaaggtctcatcaagctgatactgatgatgctgctctcatttaatgctcggctatagagaccctccccccgctatcaatcttgacggctccttcatctcatccttccctattggatcttattcctctcactctatcatacgaaccttctacttcatccgagtcagcaaattcatcagataccaaatccgtcggtgatggcgatagaagtagcctgtcgagctccgtgttgaaggacacagctgtgttgatcgtgttggattggacaaagccaggtagaatgatcaccgagttgttggactggttagagtgggttgatctatgggcagagaagacggcgaaaagaggagagagcgaggagaaccgagaacgatgtacgctactcttcttctccccatcaggacggctaaatctatcagttttgctgattgtgtcctgatttcttctttcggattcttgcacatcctacgcgcgcgctttctcctctcagtgcaataccatcttcagcattacaacgaacctccgccgatatcgacctcatcagcaaatcagtccatcaacccttccccatcgaaaaaatctatttcgctgcctttgaatcagtcagcagcgactggtggtgaatacgttctgcctacgacggaggtgttaccccttggtccgggaacgttgactaagaactcgtgagcctcttctgttttcttctccaagatgagcgtttggtctcgcatcccttctgtgtttttctgctctatctgtactgatttagattgcttgggggtttactcattcttgtccatttaatgtatgattcgaaagacatgggatcccgatcactatagtttgcaccaaatctgatcagatcgatactgtcgccgaagagctcggactgggcggaccggctggctcgggtggtggaggtgggaagggcggtaagggaagctgggaagagcgaacggattggatcggacaagtcttgagagtgattggtcttatgtgtatgtctacctggtctattctttcttcttttctatctttcgttcgataaaccttatcagagttgttccttaccgtcttcttctcgaaactacagatggcgcatctttgttttacacttctcaaaaccgtccagagagtttcacacttcttcgtagttatatcatccatcgcttgttctcctctacgactactagccctcaaccacctccaaccgaccagagctcttctaccctcgctacattccaatcgacatcgagccggtttccatttccgtaccgagcaaatatctttgatagagaccgagttgtcgttcctgccggatgggactcatggggaaagattcaagcattgggcgatgggttcgatcctgtcagaataaccgacgcgtgggaggcgggcgtgaagagaaggaaggcggagagaacctcggaaggggagccggcggaagtggtggatgaggaagtggaggatattgaggatttatgggaggacgtcgtgcctgatctggagaacgggattaacgttagtgttcgaatgttccatccattctctcccctgtctttttgcctctctgaaagggtttacatctgtctgacgggaaatggaaaacagacccgcgtcgcccctcgactgacgaccaccgagagcgaacaagcatacctatcgagacactacgagatcatccagaatgatctcgctcgggatccaagccgaggtttgatagcaagtagagcccagggtgagaggtcgtcaggcgtggtcggaccgatggggagtgatagcctgagtttaccaaacgtgcaggaggcgatggcgttgatgaatggatcgactcctacgctcggaaagagggttcgtcttctttgtgtttctatatcgatcgatgttaacgctgatacagttcatgtccggtgcccttgctgtttattggaaatctaacctcaggatcctttgacgaggacgccttcgactcctgtgactacgaccactgccggtctatcctccttatcgtcgactgtgccatctacgggaggtcaatcatcttctttgggatctccggcttctcttttgacaggttcagcacagggcaacggatcgagtgctcaggctgctccctccacagaagttctcgtccgtccatttctctttctttgtctgactgatctttgaccctttaacatcgacactgacgtcgtccttctctcgccgattcttaccttgcatctcccaccacagcatcaattcttccagtctcttctcacttcacgaaagacaacacccgcaggagtagcaggtctatcggcgtccacactcggttcttcctcctcttcgtctactactactaataggaactcagagcatgcaaagaatccttgatgggcccaccttgttcttttcatcatcggacgaccctgaggtttcttgggtcactatgctctcctcccccctctctctagacgagaaaaaccaggattgtagatgagatgttccataataccccctttcttccacgttctctccaatgtatctcttgacaagagaaaagaaagaaggagaaactctgatcgaaaggaaccagttgtctcttctaaaatttcgagaatgaacaaagttatctcgatcttgttagttcaaacaaacaaacaaacaaacgaacggaagacgacgaatgaaaaggcggaggacccgaggggtgaggcaaagctaaagatacgctatggtaggttagcagatcaaccgacagacatccttctcactccctcctcataactaatcatccatccagccagccaaccaactgaatagaccaccaatcatgtacacaagaacctcaaaggggaacagaacgatcttcttgttttgctcgatcggtctagtcagtagtcagctcctatgtgtcgaccgctgtttttcagtccgttagttccccagtgagtcaaagtaagaggtggatgatctgaaagttccttaagatctggctttcttccttcttggagacgtcactcaaaaataagcaagatattgaaagagagagaaggaaacgacaaagaaagtgcacagagggaaatcaaagtaaagcaaccgtcatcgaatcactaaaagccaactaagacgtttagaaaccgaaggaagccaacttctcgttctcgggaagggaagcggcggccttggttcggagcttgacggcagcggtctgatcggaagcaagggaatatggatgagcatgtcagaaatcatatcattcaatcggttgagaggaaaaggaagttggaaagaaaacgtcgaacgcacctttcgctcgtggtaggcgacagccttgaccttcctcttctcctcaagggtgtcgacgatgtccttgtatccccatccgacctcgtgggagagtcgcttgagggtgcagtactttcgtccgggcttcaatcggaggactcggagggcctgggggacgaccatcttcttcttcctgtcgtagggaggaggcataccctcgtaaagcttaagtcgctcgagagcggcctttcctcgggaggtcttgtgggcaaccattcctcggatagccttgtagaggattctagaaggagctcggtggtggaaaggaccggacttcttggggttgaccaaatgcctcttgtggaggtagttgtggtatctcagctgtagtgtacgacaagagtaaggagaaaggcggaagggaatggtgcattatcgattgttgatttggtgagtagagtggtgttttgagggatggcggtgcaggtcgtcagagcggatcaagaatcgagagagagccaaggacaagataaggagagtcgaagccgggtaaagttgaatatcaaggaagcatttgaagaggtagaggaaaaaaaattgtgagaaaactggactgagactgcctggcaagtatccatccactacgtttgccagagaaactttgacgaaccttgtttcggaagaaggatccggagatgttgatctcctcacatcggacaacggtgacctgttatgaatgtttccccgtttccaaacatatccatgttcccaatccgtcccaagacacaagagtccagccaaagcaatttccgttccaatcaaccaaaacccccaaaccatccaaattcgcaaccgacacaaagaaaaccaaaaaaaaagaggataatatttagacatccttttcgcgattatctctgattgatcatccagtctgtttccagcaagaattccggctgaccttctgaccgttaaggatctgcttggccaagatggaggccaatcgtccgagaaggtgggccttcccgtcgacgatgatgggggtagctgtgaagttcatgggacgaaaagcaaagggaagggatcctaaggttaatcgagagattctgtctgtgtgaattttctgacgtctttctcttcagagggctggaagggaggagcgtggtaggatataggtgaatttggcggaaaggaatgggttgtgttttaaaggtggagaacgagagttctttctctaaattcttttctacggtcgaatctgggaaaggtcgttcgctgaacaaaaagccgagatctgtactaacaagagaacgaggccatctgatgtgcccgttcccaaagagcgacgaaaccgaacaaagacccaaagaagacaagaccgtcagtatccatcgaaccaagattttttctgattgtctcccggatatttttcgcgtcccttccgtccgttcactctcgcccattcactctcgaatagaaacaaggacgatgccatattctgtacggcagcctatcccatcctgtacagaaacaggactgcctgtggacatagagtagactgaccttgaggatttcttgacgtctgatgaggtgctcacactgcgatttccgagatcccttcgtttctttgcgacccgcctggcgcgcgtccgactgaggcgagctgacttttatgtaacccccgggaaaagtcaggcgggggagtgtgatcgcaggcgtaaccactgggctcaggctttgtaaccacgatgcccgatcttgtagtctccgcgtagtctccatgtagtgtctgtgtctattgtgttgtctgtagtgtcgagcgtatgttgttgtagttctgtttgtagttttgtttgtagttctagttccagttccaggtgccattgcagcagcagcagccatagctctgttcccaatgctagtactgtcgccgcaaaggctactacgaccgagaaccatagtctaggtgacggtggtggtcgacagtcgtagtgcagatactacagatccatggtcttggtcgttgccgttgtcgtatccgtagtgtccatcgtcaactctctatcgcctggtgccggtgtgacatcatcctgatctctaccagtccagacatagaacctttctcgctctgctgtcgccccatccaccgtcccagagcacatcctcatctgatcttgttgtttctcgtaacatttcgttccttgcttgcaatctcacagtcgatccgttcaaacagcaagaccaagccatctaattccgatcattcgatggccgtgacaaaacatgctttgctcaaagataacgatgatacacaacgacacggcagaaagcagcaaacctcaacgtgttgctcctgatgcagtcaaacagaccctctcaaagtgaagatgtgcgagacaaatgagaggtgcggccgagatcggttctacgtcgctcgcttgcgccttgatcagaacgaactgtcgtaatctgttttgtcgacttttcggtcaactcctatctctcccatcttccccccccccttctcttgccttgacatctgcctctacctgcataccatcatcaactagagaacacaacatgcacatcctcattccgtccatccttccctttctcgctgcatacttcaatctctcggggttcaaagatcctaggtcgccctcacgcttcccaggacacgtccttacccgttcgtcatcttcggtcgacacgtgctctcactcttccttcacttgttcggttgattgacctgatctttctcgtacggcttcctcaaacaggcctcaacgatggaaacgaacttccttcgcctttcttcggagtagggtccgtcctcaagtttcagaacgtcaccggttcgtcttctgatagagcctcaccgtctagctgtctacagagtcatagcgctgatcgttcccgatcctttctctcctccctttctcgtcggctcacagatgatgtggtgagcgagcttgttccgataccagcactcagatgatctacacgttcctcttctcttgctgatcatcacacttaccgatggcaaatcctcttagttaatggcgttctccaacggataccgcacgatcgacaccgcttcgttctatcaaaccgagagttcaactggcacggccatcgccgtaagagctattcctctctgcgtgggtcctcgcggcgcgtctgatgactctgctcttatccttcgttcacacaggcgtcagggatccctagagagaacctctatataaccaccaagttcgatgccttgtatggtcagaacgttcggcacgaactggaccactcgttaaagatggtacgctcctccactacaatcgaaaatagttctgagcatcatccaactcaaccatgccttctctctttatttctctgatttcaaattttgcatagctcggagttccctacatcgatctctacttaatccatttcccccaactaagcacaaatcttaccgatacatggcttcagtttgagaaacttgtcgaccaaggactcgtccggttcgatcactctttctattcgtatgcttctctccatcctttagcatcccacacgctgactttaactcttgattgaaaaaaaaaactcgaccaggtccatcggagtgtccaatttcggggtagacgatctcaacactatcctgtcggtagcgcgcatcaaaccgaccgtcaatcaggttcgtgcgcgcactcttttttctcacttcctgtttcagccttctaaccgatccatatctctatccacattcttttacaccccttctgttctttctcactgtcgaccaaaacatccaactagatcaaatatcacgcatacaacgccgccaaccagaccgcactggtcaaactgtgcaaagagaacgacatcgtgatcgaagcctacagctctctaaccccactgacgaccgctcctggtggtccggccgtatcagtagcagagaggatcgccaagagactttcaaaagtcaccggagccgacgtcaccaccggtcaggtcatcttgacttggttaaggactaaagggatcgtagccgtcacgtgagtttacttcctttttccttttggaaacgttgcagtgtccccgctctatcaaaaggttgaccccacctcttgagagatcctctttcattcagaacgtcatccaaggattacagacagcgagaacaatttgctcccttccaggatgactttcctcttctaactcctcaagagatcatcgacttgtatgtctctcattcttctcctagtcgatccgtgcgctatgcggcatgctcatcgttgccttcctccttgtcgatccaccagcgagagtttccccggatggaacggaacgtcctttgatggttctctgaactgagaaaaagggtcttccccgtcttctgacatgatgcgcaaggtgcttgagcaagtgcattagagtatatatataaagacatatgcacacatatcaaacgtggggtttgaaccccttgtcatattcaagtacattcgaaccgatagtaaagatgaagaatagaaatacggaagaagagaagggggcaagagtgtcctgacgctcatgctcagtcaaacttagttctcgacctcacatcccccgatccagactttctctgtcgttccgccttttcccaacccgtcggccaactcactcagccgatcgagacagacccggtgtcggtcgtctgagaggtcgatctgaccgaaagcaacgtatttgcccgtcagtttcgatagttgtccaggcgaggaagttagtgtgatgaaaaactttgtttgtcgtccgttttcacccccaaagggtagaggggtttgcatcaagatcgaaggaacgggggtggagtggagcaaagagaaagatgaataagtatatatatatatatatacgaaactcagtcaaaccccaaggaacaaagccaaagagagggaggggggaagcaaagagaatcagaaggcttctcacctgagaggaattgctgttttttccggaattagccatggcctttctcgctcaatcacaagaggagaacaagggaagaagaaaagaaaaccaagtcagagacctgttcttttatacgtgcgcgagcgcagaacgctcgattgattctatcaggttgagatacataatacaaagaaggaggactcacaacggtgccctgcttgaagggcgttttaagtccttctttttcatcattgaacgtcggcccgtctagaattatcatgaggatttcccccctttctcgaccgtcagaccatcgatgacgacaagggagaacagatccccttctcaaccgaccgcgaccagaacagaggggagagagagccggcacgaacagatactttctcctccggacccatcacccctggtaacatctcccatctgagctacaaaccccttctccactctgaacacctttgatccagcttcagtcgtgtatcccaagagcgggaacggcgaccgcttcgacttgaattccagcggatgggaagcaaaggtcaagaaattccgaacggtcttttggaccccttgcgagggcgacagatcgatcttcagtgtagggagcgcaagcgaagtaggagcggttagaaccaagggaccggtgcttggctgttcagattttccaaaagtccttccgcgatcaacgcgaacgtcgagagcgtggatgagaaggaagagagacggtcaaacggatatccattagcaatcaaggcgaaacggcatttaattctaggtcaacgccagcgatcagtcgtacctcccccccatgtcaaatagaaacaaaagagaagagagaagataaaagaaaacagaagaaacagatcaatcctctcttaccttcagctcacttggcaagacgccttccagtaattctttctcaatctcatccatctgttctatgttcccagtcaatccatatgacgttccggactttgcgacccaatccttgatagcctcgtatgacctcgtctgagcttcataagccgaaaggtcacccgaatagagtgtgagattgacagaaggcatgtcttgttgtatgtccggccggatatatcctcagaaggaaggcgagatgaaatgattggattagagaacaaatgttatgtccgacatcaaaatatagaccacgacaatatttcacagagattctctggatcgtgcacacacacacacacacacacacacaaaaaagcccttgcattgcccaccatccttaactaagtcttgccatatccaaacgagaaacctgaaacacaaatatgaaaagtttcatgttgattgatagagggaagaaaaaagaaagagcaggcaaagaaagacggactacccgttcgggcaagcacaaacgatgctacaaagctttgagaaaaagtagatagaagcagatgaaagaaaaagaaatagacgatgaggcgaggtcggcagagactgaacgacatgtagaggggaaaagaggcccaaagaagatgaagaacgggagaaaaccccatgaagaaaggaaagaatagacacagaagtagagaaagatagaaagggagaacaggaaaaggactgagaaactcgatgtatataaaggggaaaagatgcacacgttaaggagacgaagctgttgtgatgtgttgtattgcgttgtattatcatacgaagaagaagcgaggagaaggagcaatataaagaggtgcaagacgataagacgacgtcaagagggagaaggaagacgagagagatgcggaaaaagatgcataggtgggaggtaatgcgtgcagatgcaactatataaatgtatgcgcggtaagaatcgattaagaatgaaagaacaaccaaagagacaacaggcgaaacgaacacacagaagaaaagaagagactgaaagagaggagaggagacaaagaagcacgcacagagcagagcagctcggaacatgaggataaaaaatatatagaagaaaaggaagacaacagcttgaacacatgatggaaagatcgatagctcgtagctacaagagattagaagtcttccttctcattcgtttgcctcaacttctggtccggctgaggacccattatcaaacggactgaagtttccagaaggtttccaacct

SEQ ID NO: 2103 - DNA, 13501 bp, Xanthophyllomyces dendrorhous
  misc_feature (2626)..(2635): n is a, c, g, or t
ttccaaccttgtatgccggcgagagctttggacggagctgtcccgaacgcgtgttgagctgaacgttctccaggagaagacgccccgagccgagtctcttgtgaggaggtagagccggcggatgacgtagggaagaacgtgcttacgggccgaggtggcaggggggccagtgtgggaagcgacaaggatgtttgggagatgccgaaagctgaatgtcgaggaggaagccgctgaacgttggggtcccaggtgttctcagcagacgagctcatcgatcgagagccgagtggcggactagtgaggttcccagtgttgccattgagaagaccagaggctgtcgcaggtggggagctcgcgcccgggttgattggaggaggaactgcgttcctttgaccgagagaatttttcgagaacgaaagccggatacctcccttgacaagaccgcctagattgtttccatagtactccttgagagcagtggaagctgaatccacgtcctcaaattcgacgaaacacatcggcccgttactcttttgtcggaagctcatcctcctgaaaccttcacatcgagaaaagaggcttcggagagattcctctagttgagagaccgtagaggctgtagaggatgctgtgggaagattgccgacgtagagggtgttgatctaagattcaagataaggatagagaaagagagagcaagacatttagttgttatctctattattagagcacgtagcctggcaagcagccgatatgcacagctctactcaccggaggattcatatcggcagggttactagttctaggcatgctcttcaatcggtccgccccgttctttccgaagctagatgacgtgctacttccagagtttgcaccgtccccactgcctgacgactgcctaatcgagctctgccgtctctctctttcctctgcctcgctcgacgcgtctcggggatcacttgttcggtccgagacagaggagtcaattggcttctggccagtcgacggctgttgttgttttccagacctctgttggttcaaacttgcggagaatggctggatttgttgaggcgtctgaagagttccaggagttagaggaggggagaaggcaggaaaatcatcggatgatctacgatgactgtctgacgatgaaaggcctggcatgtttgatgactgatacgagccttgaggtggaggagaaagtgggaagtgctgggtttgtggaacggctgagagaaaatctcgggatgatgactgatcttgatactgatgaggagagaggaacgggggagacagctgctgctgatagtgaagagaatgaagaggaccaggctgggtaccttgagttatcgacggcaaatattgaactggatcttgaagcgggttgaaagacgcaaagttcgaaggttgctggaggtgttgaaggtgttgaccagacgatccttgagatggctgttgagacgaaggaaactgccgctgtagattcgggttggcacttgatccaggaccagtcggccaatcttgggatcctccagacaacagaggtttggcccctgatccgtcttgtccgtctcctcgacttctacctatcactccgttggccagattcatcccgccaagcccaagagaaggaacgctggccgtggagccggccaggctagttaccccaccggaagaggacccgcctacaggacctccggtctcctctcctccaacacctcgtctcgtatgcaggttcttttttgccatctctgctttcagcacgctagctcgttcaacgtcgacttttcttccctgcagggcatccctggcctccatagcggcctgcttagtcttgaacttagcaaaccctatgatttgcttgcgagccgacaagttactagagttgaagccgggggctgaagcattgttgttgctgctgttggaagaagccaagccaagcgtattagaagaagacggggcatcttggaagttatctagaaaagagggatcaagatatggattgttcagatagaagttggggtcggctgtgctgatgttggatgtgtttgagagcaacgtgagagcagcttgggtgaccgaggctgcagaaggcgggttcgtgttcgatagaggcgtgttactagtgttcgtcgatacgtgaggtagcttgagagtagcagcttcgaaatctttgcagaaggtgaacatgttttgaaattctcgttcctacgggagagatgtaaattacccgtcaagatcaggttttcttcctatgacaagactgataaaagtagataagcacgaaggatggaatgaacgaacctgcatatcgtctggaaagccgacgacaaagatagtgctaatttcttcttctggttctcgacctgcagcctgtgcagagccctgcgggccttctcccgggcctcgacctgttctacccggtcccatgtttgctcgaccgttttgtgcgagcttaggattgattcctcccatgccaaccggcaaggtcatgcttggaacaatgccggtgggaaagccaggctgaatttgtagatgaagtggttggcgttgaccagaagacatctgggattgctgctgttgctgttgctgttgctgttgctgttgttgttgttgttgttgttgnnnnnnnnnnttgttgttgttgctgctgggattggaagaacggatgtgattgggattggttcgagaactgggtaccaggaagagaagggatctgatacaaggggtctggtgggagagcgtgttgggtgggagggtgataactagacgctggatgactcgattggtcgagttcagcagagaacggaagtatcgtagaggtggatgacgaggtggatgcatcggattgagacagcctgggctgaaatccggccgaggaggaaccagattgaaggtgttgataagaatggccacgagcaaacgaatagccctcggtggagctgttagcagtggcggcaagattggtgttcagtaaaaagtcgcccgagggattggacgggccacctgatcctgactgattggatggttgtcttcgtcggacgtcatcgaacgacggatgtatggaagaatcgtctcttcgacctctgccctcgccggtcacgtcgcccaacctggatctaccgtcctggaaaggattgctcgaaggagttaatcgattaccgggagagtattgataaaagttgttgggagtcgacggaagaggtaacggagaggatgattgaccgatagcgtggcgttgctgctgttgatccccctgctgttggacgtgtccacctcctaaactgtcgagagactcgaaaagacctctaccgataaacgagatatcgtcatctcccgtgttttgatgcatctgtcgcgacctcttatcaaatggacgtgtcgtgtttgcccggactgactggatggatggataggtggatggacgaatggacgggtccaaagagagaagaaagagccaaaggatccaacggtggaggaagaaagaaaaggaaggatagatggatggactagatggctgggcaaaatcacgacacgcttcgggtacggggtttattggattcgcgtcgaggagaaaaggcgtgactgagaccaagagaaccaagcggatggcgtccaaacagatagaaatctgacaggaaggggatggcgaacgaggatccgagacccgtaaaggagaagacgagcgaagagaaagggaagaacaagagaaagaaggaaagaaaaaaagacggggagagtgaatggacgtggtgggtgaatggataaagagaaggctcgaaactcgcggccgccgtttgtttggccggtttgtgtgagatctttcctaaaacggaaggtggctcgtcttttttaagggatggtgggatctctttcttctatcggtgcgagcttatggatcattcttaatctgcttctgtatcgcaatcggtatcaaagacccgtcagagagaagaaacagagaggagaggatgaggagaaggagatcgacaaacctctggttcagacaggccaagatcctcacatcgtctaggatcttggccatctctcacacccgctgaagaggggtccacgttttgcttacaaacagtcagacagacgacctggtcggctttatcgacaaaccggtcaccgtgacgatgacagagtcgaccatatgcgaaacaaacagtcatcaagagacggatggagggagagaaccggatactagtctaagggaagaagaaaaagagagaagaaagaagaaaagaaagactaagaaattccttgtaaataagactacgtggaaaatcacagatcgtaattgatgaagtaacaacattgaacatcattttgcaaacaacttgaggacgttccatgatcatatagggaagagcatattctagtgtatctgaaccatggcttagttgagtcttggaggacaagaggtgtctgagtttgtgcgagagcgcttcgagtctagaaagatcacatatatcattcacactcaacccctcagacctgtctgaccttggccgttttgacgtttcctaattcattcaagagactcatggctcgccgctcttcaaagatagagaaagcgactaagatacccgcgagccaggttatttgtctgtggaaggtgtgaaagcttgcgcaagcaaggcggagacaagacagaagtgatggaaatccctgttttcacgcgctgtctgtcgaccagctcgagaagggcgaggagatacaacacggagccaagaccgaagctcagagcttaagtagagcccgacagcggctgatgcgacaccagctctctctctaatgacctcaaaaacgtttcggcctgcttcctctgcctcttttcctcgatgagcctccgtcgcccttcgacctcccgctttcttttctctactgactttccaccaaacacgatctgtctcggatcaggagacatcccataggaagtatcttcttgatggacctcaacgtcgagtcgagctgcttctgtctccagccgggccgctgccaattcggcctgttgttgcgctcgggtggcagaatctttagagaactgatagaatgccgcagaccgattacgcactttgaagtggaacgatgtcaagaagaagagaacgaaaaacagaatcaacacctgagagccatccgaagcatattgagagtcatgctcttgcttaccatcagcattagcgtcgtagtgtttctcgccggattcttcttcagccgcctcccaccgcgctctcaagtcttctgccgaaggttcataaaccggaaagtaattttggtcgccaactgattttcatttcaattttttcatatgaacagagctcgtcagtttatgaaaacaagatagaataaccaagaaagcacttactgatcaagtttgccggtctctcttccaaggctgctttagctagccgtttcttttccatagcatatatgggaacttcactccttctcacggatcgtgtccggccaagatcatcctcatagtcagtcagagggtcgtcctgaagagtagatgagaatgtgtacgtttagtctatcttgatgaaacacaaagttgaaggaacaatcgggcggaatatgctcactgccgtaggagcctcatcctcttcgttctcagaaccagaggaagatcgatcgtcctcttcgagcttcttgtcccactagaaatagacacgccccgacaagcagtgagaaactgaatcagattctggtaaagtcttctctatcgatttctagattcctaaagctaagcaaaaactcacatctaccagagcatccccgatctgtcttgaactcagcccacccgtctttcctctcttcagccgttcatatatctttgatttacgttccaacgcggcctgactgtcttctagagtggctctgtcgatttgacctagccgagaagagctagcggatagagcatcttgccgagcttgacgggacgccagacctttcgacggagcggaccatttcgtgggtttctttatccagatgaaggacggaaggagcagcagatcttagagttagtcacatatcatgttgaaccctctgattcctctcttgtactccaagaaccacagttgttatgaaaccggattattaaagcttctgagagagaagcttggtcggatgcacatgacgcaagtgatttaggatgagtcttgctgtcttaccttgccttctctttgaactcctcgaacataggacgacccgtccccacttgatcggttttgagctttctccttacccttctcgagttcggctttgagatcgaagagagagttggcattaacgatgttgtatttcgtagagggtttcttccctgctgacgacgaggtagacatctttgtcgaaaagacgtgtaggtgatggatgattgatagagtgatggaatagtatttacatctgcgtttcgtccagttttagtttcttgatgattcaccatgtctcgtctttataagtgtttttatctatattgagtttcatcattacattgcatcctacatctcaacaacaaagaacaagatcgtgcctaaaatactgtttacacacacacactctctctctctctctctctcttttcacctctcatggttcttcttttccctctcaaaatcaacaatttccatcatccatcctaaccttcaccgcgctcgaaccttgacgccgaggaacaaacaacggagaagccgctactgatgacgaagccgacgacaataacggctgctgctgaatctgtggaagatgtgacatcctcgaaggaccaggcgagactgatgtctgataagacgcggccgccatagattcagccatcatgtttcccagctgagcagctgcgtacgagttctgaaggtcgttcagcgaaggaggatatcctgaaggtgggatcgagatattgcttgggaacatagttgggtagtacatcggcgatgtctgatccatcgagagtctaggttgagcccaatgttgatgtgacgatgagttttgaagagaagaagcattatgcgtaggaagtgatggatagaaaggcgccggttgagtctgagaggggtaagcatagatgtagggctggccggtctgttggtcataatagatcccactatcaagaaggtatcccggtgggacaatcagattactcagcatgtttggtgatggtgattgctggtaagaggcattcacttgaggataagtggcaggagcaatatgagaacccgaggaccgacaaggtgcttcagggaacgataaaggcataggccctgcgatcgaactgaatcggggagattcatcgaacgcgggagaagcagaatggtcaggcggatgagaaagaatcgttcgctccaaggttgcgagcgccggagacgttggttcggctctactagatataacgaaatcggttgccttcgccgattcatgttgttgctgctgctgttgttgttgttgttgttgttgttgttgttgtcgcatatacccaaactcaacctcgttgatcttttcagtaacctcctctttgactacttcaaccacctgaacatccaccatcctgttcttctttttctctttctctcttcccttctcctttcctcttggaagtttctccttgaacaatccacttgattcaacctcattctttcctccggctggtacagccgatctactttcgctctttcgaacggccttcgctttgggtgtggccttctcggtcgtatgagtgtcctcggtggcactagctgccgccaacctctccttcttcctctccagccgctctcgcttcaatgcgttcttcgactttgtcataggaaccggtgtgtccatttccgagggttttaatacgacctggttttcacctgaatgaaggccgacagcacgggatacgctaggagcaggtcgagtatgtgttgcagagagagatcgattgggcggaggattcttctcggtggcacgtcgcatacggagctcggccgcttgttgtctcttctctgcggtgtaagaaagttgctggacaggtggaggtggtcgattttgcgctgttcaaagcatgaagtttgtcttattgagccaataagtgggaagcttgaattaaggaaagagatgcttactggcttccaacaccccggtgttcggttcacctgtagaaacagcgttactctcattggcgactccttttgattgaggcttcgaaggaacaaacggtttggctgatgatgtaggggtagaaggcttgatggaatgagagggcacagtagacttaggcacgacatctggagaagcgctttcttctgcgtttgcttgatgagagcctgccgctactgccgctgcttcacgctccttccgctccctcatcttctgcctcgagtttttcttcttctttttagggatttcatctactaaggtgggatcattagattggacagtgatgcatgtagtggaaggatttatattagaaagtgatgagtcgatgctagcacgggatgcaggataacttcggagaccatcattttgtttctcagaaggcgaatgttggtcattcggagatgtaatcggtcttggaagaggctttgatgtcttggaggtcgacagaggattggtctgcgaagaggaaacagcgatcgattttttgttacgcttcttcttcggattttttgatgcaggtgtgtccgttgatgacaactcgggaggaggcaagattggtatagcagaattggaagtagagccgttagatgtgttagaagaaggaggtgaaggtaactgaaggatccgaggcagtttagccgtagccaggtcaagggtcgtctttacaggagattctcttccctttcctttcgagatcgaggttgaactattctgtctggaggatgccaagccgagtttgagctcctttcttcctgcgggtgctccaaatgtcacttcaacgtcgtcgtcgtcatccgtatctgtgtgagtatttcggagacgtccctgatcattcaaagaggaagacctcgaatccgagtgaagcacaggccgagaagcgcgcgatgaggatccttgctcctcatcatcgtccaccgaaccttcacgtatccgccggcctagctgacgagccctagatttgaaaggtttcttccgggcttgcttgggcttagactttgcgttgaagttcgtcccgtccggtgaagagccagagattgatgccacagggagcgacattggtttaagctgaggtggagcaggtgcagaaacggcagtagctgtctgatcgggcaaagtcgaaggcatcgtcttttctttccaacgattctcagaaagaacaaagcaatcggaatcacactctcgatgatgagctagaatgaacaagagagggtatatgtgtgtgtgtggcgtgggtctgggtttggttggtgttctctttgttttggtggaggtgggaggaaaaaaacgtggcgtgtgtggtcacgtgatctgttgaatcctacggttcacagattgtccagttacgaacagccgaaatccgaaagttgaaaagacagagagaaagtgggagaagaccaccattcgtagcctttcttttttggactgaacatatctctttatacagctatggtctctcaaacagtaaaggatttaactagtggaacagctggaggtgttgctcaagttagtggtctttgccgaccagattctgatcgaccgtgtctgaccaccctgaatcgactaactgatggtttcgttcttgccttttttttaaaacgattaggtcttggtaagtcctgggccctttcttctcagttaaagaatacaatcgcgtttgtatggtttcggatcttgactgatatcatgtctgtcttgattaggttggccaacctttcgacttggtcaaagtggttcgtcctcccgatctagtttttaccaaccttatgcgccctcacttgatcagcgctgtctgtatgtttgtgcttggttcaacgtggtctcctacagagaatgcaaacatctcctcccggaacgtacaagtcggtcctcgagtgcgccgccttagtagtcaagaacgaaggacctttggccttctacaaagttcgtcgtttcgcatatggggatgagaagaaaaaagaaattaagaaaggaagaaaagatgagctaataaatcaaccttcttttttacttttctgcaatataaacttccacagggaacgttgacgccacttctaggaatcggtaagagtctcctgatgtcttaattgtcgcgtatgttttaataacacctcgatcgtttcgttttctggctaccaggtctctgtgtctcgatccagtttgccgcgctcaattcaaccaagaggtacttttccgagcgaaatggaccaggcaaggatcttggctacggtatgggtgccgttctaaagttcattcggaattggccatgtacatactgacaagcttttgtctcttcgtgtgctttttaaaggacaactcttcaccgccggagtagccgccgggcttgccaactccgttattgccggcccagtcgagcacatccgtatccgtatgttcatatcatctattcacctctcctctaaaatgcatttctgacatatctgagatgttcgaacggcaaaactttccctattttaggtctccaaacccaaccgaacgtgacacctaagttgtacctaggcccatgggactgtgcgaagaagctgtacgcgcataacggactacagggaatcttcaaaggccaggtccccacgttgattagagaaggacttggatatgggtaaatggggtttctctatctgctctctagttccactcagcctatggagagttctcatgaacgtgatttcctcctcctcttttgtgtatctgaaaaacgtcaacaacctcagagcctacttttgcgcctacgaagctctcgtccagcgacacatcaactctaccggacttaagcgagaggagatcacatctggctacacggtcctctacggtgctgccgccgggtacgcgctctggggatgcatctatcccatcgatggtttgttcctcgtttttcttttgtttccatctagcagacaccagtcccccctctgacggatttctttgaatctcttccattccccttccacccgtttgcgcttcagtcatcaaatcaaaacttcaaaccgactctttcactgcttcgactggacaaaagtacacttcctctctagactgtttccgtaaagtttgggcgaaagaaggagtctccggtttcactcgagggcttggacctacgttgatcagaagtccgttctccaacggagcgacctttatcgggtacgagttgatgatgggtttcctaacaaggagagagtccgatgggactgtagcaagcgcatagatttgagaagaatgagggagacgagacgagaggaagaggaataacaggtagaccaagtggtggaaatgttgtctttagggttgtatatgtctagaatctaaatagaatgagaatccttgtctgttcatcttttgtatgttctttggatcgctctgtttgtctgtcggtttgtaggccaggcgtgtctcttttttctctagcgtctttgggtaacaaaccgaatagacaggtacaacatgtgtttccctctctaaacaaacaacgtatgcacatgcacggtcaagattctacaaacgcctatcgcctactcccttacgcaaatttccagcagccttcacttttgactcttgttcattatcagcctaatcgatatccatattaccaacaccccttcttgatcgttggcttccacctctcttacctcctcgccctcggccggcctgtcgagggcgtgggttagaactggtgtccatcgtatccgagtacatttttctgatacaaaagcaaagagaacgcgtctattgtgagaatccgttgtggtctgagagaaaggaagaggagtagacattgaaacatacgaagaacctccgattccgtccatcagatcacctccttctactagtttctccaacgactttttccctgctcctgattcagactggccgctcaccagaccgagtcttccgaacaaccctcctggtgccggtgccctaggagcaacaggagcgagcctgttgcttaagctgctgcctgcattcttgtttgatgctgccggtccagacggagttggtctcgagcgaggttgttgtgaagatggggcggtggggacagagattgataattggggggatgagaattggacagagatcgttcgaccatcagcaatttggccatggaaagcgctgatagccgcctcggcaaaagtaggtttggcaaactctatgagcacctaaaggttcagagagaatagatattgaaaatcaggtaagatgatatctcgagagtgaaattctaggaaagaaaagaatcgggcgcttaccgtgacggattgattggtttgagatgagatagaagaggagacgatggcaccaaacgtgttgaacgtcatctgtacgagtgaaacaaagagatcagtctcattatcagtctgtctatctacatcgatcaaggtagatagggtagtggggttgggcacaaggagaattcaaaggacaaggaaaaagacgcgaaccttgacatcttctgccgtggttccaggtgcaaggttcccaacctctaccatcttcttgttcaccatgctcgcgcccttgatcccaatccccttctctgccggtgtcttgttttctctttgaggctggctcggtcgagcgtctcgaggtctggagggaatctgagcattcttctcggtttcctctttctttccaaacaagtctagcccgggatccaatagatcattatcccttcctcctcctcgaccaccgtttcgagcggcaatcttcgcagccgcagtgtcattcttattcaacctgaaagcgagattcccgcctgggatcatagctccaaagagatcatgggaccatctctcggatgtactgtgtgtgggcggcgcgtagggcaacaatgtcctctgccgatcgcgaatggatgtacgtgtatgatcaaagagaagggaacgatttcagaactcctgcatgcttgtttgagtgtaacccggacgattgactaacgcgatagggctgctgccgggagtcattagccgatcgtcggggacgagacttctgcttgggaataattaaaattcattttttttctcgtcagaagatgagcacaaggaggctagggagagggtacggagagatacgaagaaagaatattgagaacaaagagcagcacagacttactgagaagctgtcaatgtccatgatggactcctgggcgcggtcttgttcagagtacattatgcagagaaatgggtgggaggatggatggatggatgatgattatgaatctcgatgaaggagatggagaaaagagattcgagttgccgattaggaaactctgtagtcgacgtattaggccggtttgtaatcaaacgagttccctcaccagccggttgttgttacttcttttcaatctattccatcc

SEQ ID NO: 2104 - DNA, 2536 bp, Xanthophyllomyces dendrorhous
tcccgtcccgaccctttctcttctgggctcaagatgcaacaccctccaccaacattagaaagcccaccggcttcgaagagggtaaagacagacaattcgccgtcagcttcgccttctccgcctgctggagcccctacgctggttctggatggatctctctctcataaagcacccggcgagatctttacccatcaaggacacccttctgtcgctggaactaggaaaggtgacggcactggtcttggaccctccggaatagaagctacaacgaatgttatagaacaaattccgaaggaaatcactcaatctgaagtcgacgaggcctcaaagggcgtgtcgatagacgacacccagcttgctgatgctaaggaggtacgtttctatatattttttcttttcctcatagcatgacgaagaatgatcatacatcttttgaggcatggtctcgaccggtccttctcatctttccctctctcacctctcatggcctgcttggtgtttgtttgtcgcgttcgttatgttgttctgacgtgttttcttccctggcttgaaacccgtccaaccggctccttcacccaatctattcacggatcaaggcaacgcgtcaactccgaccggccgctctagaggagttcaaagatatcatccggttcaccgtcgttaagaatgatgggttgcccgcatctatgatcctccttaccggtttgaaatgcttgtacgtcttgtgttctttctctgcatctgtgccttcaatcgaatcatgtgtatataacccccttagccgtcgactgacgcgtcttcttttattcgttttctaccttttctcggatccgtgacggacggtagattccaaaagcaactgccgatgatgccaaaggagtatatcgcccgattggtgtacgaccgtaatcaccgatcgctcgccatcgtcaaacggggtctcaaagtcgttggtgggatctgctaccgaccgttcgagaccagaggtttcgccgagatcgtcttctgcgctgtggctagtagcgagcaggtcaaagtgagtttgacggagttttttcggtgttctttgtcaagagagaagggtggtcttctgctgtcgccagattagctgaacaaacgtctgttgccttcctgttcttccttagggatacggatctcatctgatgaatcatctgaaggatcatataaaggctactttcccgtcgatacatacctttctcacttacgcagataactacgctatcggttacttcaaaaagcaggttggtcattatttcttgttcttcgtcctcttcatctgattgggacattctccggtctgaaatctttccggtgtattctcgatgaataggggttttcgaaagaagttacgctggacaagacaagatggataggttatataaaagattacgagggaggaacgatcatgcaggtgagtctctgttgtgatagcgctgtcaaaatttgaaggttggatagaatgctgactacgtgagctttttagtgtacgatggtgcccaaagttcgatatctcgagattcacgacatgctagcccgacagaaggaggtttgtcttccttttctattcatctcttcttgttatttgaaagtttcacggaactcaatggccgttcgttctcttcaaacctctttctgtctccctctttcgtttcctctttgacagatgattcttcaaaagattcggacgatatccaagtcgcatatcgttcatcccggactagaaatctttcgaaacccgaatcggccgacgacgtctatcatttcgcccggacctggctcgactgacggtactcagcctgctgatgatacttctgatgctactgctgctgctactaacactgagaacgactctgcgctctcgacaaatctgacgaagggcgcgttgggggtcgctcaatcgatggctgtgccttcatccgacgatcttgtttcttccccgccccctcttccgaatgaagatggtaaggaaggaaagggcgcgggaaagacagggggaggtgggaatgaacgagatggggagggagatgaagaagaagggtggatcgtccagccggcagatgtgcctggattgaaagaaagtggttggacgagagagatggacgagatgtgcgtgtttcttttctttttcttttcttttctttctttctttctttctcttcttgtttcttcctttcaatattgacatgaggtttccctattctcaatgaacctccttggctcgtctctttcggatggaacaggtcgaggagaccacttcggggaccacagcatgcggtgatgaaacacgtgttgtccgatcttcagaaccacgcgtccgcctggccgttcgcaaagccggtcaacaaggacgaagtggtggattactacaacgtggtcgaacacccgatgggtttgtttttttcttctttctttttttcttcctctgtagaacttcatcaaattctctttgtcgccgtctgttttgacaccgcttggtcacttttctggacgctgaacgggcaatgcttatcagatc

SEQ ID NO: 2105 - DNA, 1140 bp, Xanthophyllomyces dendrorhous
gatctatccacgatggaactcaagttggattctaatctatacccgacgttgaatgatttcctatcggacgccgggctcatcttttccaactgtcggcggttcaacccagagacgagcacgtacgtgaagaatgcgaacaagttggagaggtatatgaaagagcgaggtccgtcctttctttacacttaaaaacaatcttgagggttttttctcttttctgactgtctgaaacccctgtcgtttgtctggatagtcctggcatggacgggatgagaagcaggtggatgggaaaggaggcgagtgtgtggtcaggttaggatgagaggagaggaaaggaaagaaggggaaaggaacgcaaacacgagcatgggcgcagttacgaacgtgagcaggcaagaagggtgttgaggacaaacaaagacggctctaaatcgtcggaacgtcaactttcttccattctgttcgctcggtcgtacggcctttccccccttcgtcctcgggtctcaccggatgaaagggtagtgctcaaacatgaacccggagtctctctctctacaagtacaagggaacgggatgagaaagacagaggggagacccactcgagggatcgatcaatctttctgtcgctctcaagggttacattgtgatctgtaccgtcatcgtcaggctcaagaatgcatggtatatctgactgtatggaaaaggagaagtcatgtagaacgtgaatcatatgtttgatagatccatgatgcgtttatgcgtgtaactaggatcgaacgatgactcgtctgtccgattgggattgtttgacgagggagtaggagagacctggacaagaaagagagaacaaacggaaagagagaacaaacggaaagagagaacaaacggaaagagagaacaaacggaaagagagaacaaacggaaagagagaacaaacggaaagaaagaccaacccaacccgagtttctccctgtctgttccgagcttgttttaggacaagcgagccgatctgtcggccgaagcgaaggcagcaaaggcagcatgagcagcagggacagcagacacgacaagcgacaggcgacaggcaacagacgaaagctcaacgtgacctgtgggaaagccaaaaaaaaaaaaaaaaaa

SEQ ID NO: 2106 - DNA, 9136 bp, Xanthophyllomyces dendrorhous
ctcactcactcactcacacccgtactagcacatacgcacgcacgcacactctctctcaatcactcacatcctcaattcctcctatcttctcactcacttaccccatctgactcttagtttcttgactccctcgccttttactgacccactcgagcatcgggctgatcgctttgttctgtttctatactgactcggtcgttcatcctcactggcgagatcttggctgaccctctgaacgttccactcacccatctcactcggtcgcccactcatccaaccactcacacacaaacacacaaacacacacatatccttgctagcattcctcttcggattggcttctttctcttagcgcattcacccgggagatcactgtttcttcttgtaaacacacacactctctctctccctctctcatacacaggagagaatatcagccttctcctctcgccaaacgtatataaacaaagaggtttcttctttgctcttctttaacaacagcatcgctcccattcatcactcctcctgtcactaccgttcctgcccttgatacatctctctcactttccttggcatccttttttgctttacatctctcctttccttccacccttccactcccactttcactcccactcccactcccattcctattcccgctcccgctcccactatggcatcgtttacatccaccccgttgacctcggcaccgtcgaatccaccaactctgtcatccacaccaccaccctcgccgccgtcgaacccagaaaaggcaaacataaaaccaaaagttccgttgggcacacatctcttagcaggaggaattgccggttagaactctattcttgtctctgataccttgtcttgtctcatccaacggttggcatcgtgactgaccgtatactatcatctccttcacatgtgccatctcaggtatggccgaggcctgtaagtccatcatctttctctgacttttaccaacgatgagccaatgtcaagatcagcactaaggactcatcctctcccaatcgaccttgttcctaggcatatgtcatcctctcggttggtctggtttctttcatctcgttcctcatttataccgctattctggttttctctcctgttcctttgagagcttatcgttcactctctacttgccgctaatttggtacagatactatcaaggtgagtcgagcagtgatccatgtccctcgccgtatcttcaggaacatgctgaccacctacctctcatctcctgttggtgacaacccataggtccgaatgcaactcaccaggtccagaaagctggctggtgtaagtctttactcccgttgctctcattctggcgcctcttcctacctcttcctatctctgatcctttctctttcggtcatctctagcttccaccgctctcgttctatgcaaccggtcgacaaattgtcgcaaaggaaactcccttgggactgtataaaggtctgggcgccgtcatcggagggattgtcccaaagatggccatccggttcgccagtttcgaaagtctgtcccctggttttctcacactctccgataacacgctccgtttatctgctgacaacctatcctgcgtttctttccttgtgaaaaacctggaagtgtacaagggcttctttgcggactctcagggaaaaactggtccggggaaagtgtttatctgttggttaccgtttatcgcttcctctccaaactggttcccatagaggccattatgaattctcaccgcccttctctctacctctacagccggtctgttggcaggagcgacagaggctgtcgctgttgttaccccaatggaagttgtcaagattcgattacaagctcagcttcactcgctatctgatccatccgaggttcccaaatatcgaaatgcggctcatgcagcctaccggatcgttggcgaagaaggactgggcacactctaccgaggagtcggcctcactgctttgagacaggcgaccaatcaggtcggtccaatccagtcttgccctatgcatttttactcgaattcttgcctaacatccgatgattgtcccgtgtacttttgatttcgtcgtagggtgttaacttcacggcctatcaagagttcaagaagctcgcgctcaaccttcaaccagcctttcaggaggcaggcgaactcccaagctatcagactttggttctcggtctcgtcagtggagcaatgggaccattctcaaagtaagtcccctgcgctccttcaagatgagacgaatcatgaggctgactcaaatgatctgttctttattgccaaaccggcctacagtgctccgatcgataccatcaagacgtagtctctgtttgttctttgcccttgtcttgaccaaagaatctgactcgtcccacctttctcttgatgttgtgccttgattgaaattatagtcggatccaaaaggcgtccaaggctccaggcgagaccgcgatatcacgtttcatgaaggtggcaggcgacatgttccgtgaagaaggcgccaaggcgttctacaagggaatcactccccgagtcctcagagtcgctcctggacaggctattgttttcacggtcagtaacctcgttcttgttgtgtttcttcccctcatcttgagttaactcccaggcgccatgaatgctgacaattgagccgagatattatattgccctgtatcaggtttacgagaaagtgaaaggcgcgattgagaatctgaaggcgagccctgtggaagatactagctatgatgcgtaggcttctctatttctgggtctggcccaaacccgatccgtgtttgctcctcctcatccttcctgcacacacccaaaaaagggtgggccgccgcgctctaaaccatgtgctatatgctgtggccatgatcccagagcaataaacactttcagtgccatctcttttcgctttctccattctccactattttccctcctatttttcatttagttccttctctactttattctcgctgtattcaaggttgtgtacgcttacgatgaacatgtgtaccctactcaagcggagatcattacatgacaaagactctggatggaatgacgtaagcgacgaatcagaagcatcccaaatctcttcacctcttcattcacatcaccccttcatctacagacccccgatcgacgttgactgaacgacaaccatatgctcatcagactcccgatacacttagccaaccgtatcaagtcccgtactctactcgcttcaccaaacagatcttttgctactctatcgactcttgagagaatgaagattacacctattaaaggtttgcttgaacccctcctctctatacctcgttctgtttcttatacatccctctttactctccacttcaagtcgagagacagacagactgatgagagtgaatgtaatgggtctctctgttctaatacagccagatcggacaattggatgtacatcatccaagacacaaactccaagaagggagcagtcgtagacccgttcaacgcggaaaagatctcggccgaggtcgccaaacagggtgtcgaagtgagttctttcctgagattctttcctctcacatacacatatgcgttcacattctttgtgcttgtatcttgatcttgattgaggggttctgctgatcgtcaagccctttaatgtgtgtgcttttggttttgatctcgttctcattccgcttcgtttcggttggccattgcactgggaataatttggaaaggttactcacctgatcacgactcaccatcattatgtatgtttctcacgattccttctctcattcctttatctatctctctctcttcgcacaacatgtatagactgacaaagctctgacgcttgttcgcctcaccttgatgtacgcgcgcatatggggggtttcttcatcaaataggatcacgctggtgggaacaaagacttcgtacgttctctttcttgcgcgtcggaattcactttgatcctttttttctgacggtcctaatttttgggacccttctttcctttccttgtccaataggtaaagaactttcctaacgtagtcgtcacaggtggttcgaacgaatgcgagggcgtgactcagatcgtgaaggacggcgaaacgttcaagatcggtgatgatctagaagtgacgtatgtttttggaatctatcactctaactctctcttttgctcggctcttctccagcgttgaccattgtatcgaaacttgactgacggtttctcttttctttgtggaatggttgaaaccctgttaggtgcattcacacgccttgtcatacccaggattcaatctgctatgtgagtgaccgtttgcttttgaaatgtgtgttggagaatcactccagaattctgatctccgtttattttctcttcctcttcgctccgccatgttcgttctttcttacttgttgggtaaacatgtcagtatgtagtcgataagaaatcggacgagaaagttgtctttacaggtgacacccttttcacaggtcagtttctattccttgttcatgagcacagctcgatccattctggtacacaaaatgatgtccaaccagacacttatgaatttcttgaaacttctattgatcgttattgtggtttctcagcgggatgtggaagattttttgaagggacgcccgaagagatgcattcttctcttcagaagctcgttcgtccctccttcctcctctctccccttcccgattctcatcctaattccttttcgtctcattctggggttgccttccttcatgtgttccgcctatcgtcaacaaccgaatagatgaaactgccggaaacgaccaaagtccttaacgggcatgaatacaccgccggttctgcaaagtttggttcgttctttcgtcctcttccacactctccttctcgtctatctctttcttggatgatcgagttgttgatctgtcattcacgtactcgttcgcttactcacctctgcccccgtgcccgcgcgcacgctcactttaacccacgcactctcaaatgaaccgaaacaataaaaaaggagcacacgtcgaacctaagaacgaatcgatccagacgctactcaaagcgaccgagcagggggactgtgtactgaatgggtatacgatcggggatgagaagcggtggaatgtgtttgtcagattaggggagaagagcgtccagtgagtgtctcctattcttccctctttgtcttcttttcttttgtttcgtttcggttgggattgggaggggaaaggcagatggaaagaagcacggaaactgatatttctctcttcgttcaatttcccctaacacgaacggtatcagagagtacacaaggacagttgacccggtcactgctatgggtgttcttagggagaagaagaactccttctagacaggcggaggtctgactgtgattgttaatcaaggggttgaggggttgaggttatgggagcatccacagtgaacggcggttctttgaattatgctatgaattcctcttcatttctttggttgtaactctggacgactgatatatatgtgcccactcagatcactgttcgcttgctgttcaacggcttctttctttctttctttctcgctccgaattgactttattcgagacaacatgtatatacagataatcatacgataaatgggacagtacctgaatggagtcggcaaagagaccaaagtcagcaaaccgacgttctctttgcaaggaatacagccaaattggagcgtagagggcgaatcaggatatgttgttgcacgaattttgttgcgtgcggtttcaacaggatgatgatccagcaggaggttaagctcctgacaggatcgatctgaagaccgtcgtgatatagacatcattcaaaggaggcgttggggtgatctggagggaacaacgaaagcaaaagaactaacctttttgaaaacttgatgggcagatgttttgagctattagagtttacactgagcaaaagcatgacaagtgatttgaatgtcagccttgagatccgggaaataacacggagtccaatggaacgagaacagctggggaagcatcattacacatcacgcgaagtgacaatgcagccttgtgtgtatcaatcacaaactggaagcccgcaggcctccagcatctgacggtaattacataaataatcttttggatccccagctacgagggtggatggggtgggtagacataggaataaagcgcactcacgaaagtagaaagaaaaaatagaagcccctgcaggagataggttagtatgagcaaattcaaagatctggttcaaaaacagaacagccaaaagtcagttcaagccgttcttctttctctcgcttaaaaccacaaagcagacggcaaggatgtcgatttgaaatcagagtgttgttttatcgtctgcgcctttccactcacacaggagaaggatcggctcggagactctagtttgaaaagatttatacacaagagttcatccatttccaggaggcgtgggagaggacatgtttgtgtgcgaggatgaaaatcgtgaactcaccaattgtcagtaatcaatgagaatccccagaagctctcagggaagatgtagaacgaagaaagaaatggcgaaaaagtagagtccttttgaactcacaaggtcttgcgccagggccggtcctcgagtttgggtcacgtgattgtgtgttcgaagaccacggaaggctgtgcgggtagccgcgggttacgatatatgtacccggaagaggtgagcgcgggaacagcaattcaggctcctgatttggttgtctttgacaagagaaggtgaacgaaacacatggaacaagggaaacagggtggatagatcgcaggttgctgggacatagtcacaggataaagagatataagaggaggattaatcttggtagactgaacccatgagatataagatgttggtggcttgtggtctgaagatacccaggcccaagaggatcacgtatcggccgtcattggttagggttgctctcaccatgcttaaacgcaaggcatctcattcttcctcactttcttcccctgtagcattgacatgccatcttcagatcctccttcgacctcggtcgctctccaagagcatgtcttctattgtttcgatgtccttcatgcatacctttcaagcagaggtgatgacagtcagacgatctcccctaggttcccttcgccttctgaaccttagtaagtctctcgctctttcttcattgatagtcatagacgaacgagaacacaactgcaagatccagaaaccaatacctctctgaaatgttccacttactcttatcccgtcaatcaaagtgccatctttgttacatggaacacacttcgatcgggaaaggaaccacggttgagaggctgcatcgggaacttcaagcccgctccgttagcagatcagctggctcaatacgccatcatcaggtccgtccgtatatctatcctgacttctcttatccttcaccactcacatcaagcttgagccactgtattggctcgcccagcgctacggaagatggccgtttcacgcctgtccggctatctaaacttcccgacctgggatgcgggtgcgccttgtttcggatctccccgtctaaccctaacagactgattgacgttaagaacctccaaactacttgtgcacacaggatctccatccttacacctttcgaagcttgcaaagatcctctagactgggagatcggaactcatggcatttatatcacctttagacatcctcacaccaaggtttggcctatgtccttacctcggcctcttcaaacgagctcaaaactctgctgaccgtatgactaactcgtcgatgacattgaaatcgacggtctgactcatagcgaacactcacagccacatacctaccccagatcgcctctgaacaaggctggtcaaagattgagaccctccagagcgccgttcataaggccgggttcaacggcgatcttgatcaagtctggcagccagatcaggagagtactttgagcgttcagcgatataggagtgagaaggcagaagcttcttgggcagaatggcaggccgctagagcgtaatttatctctatcttgtttctttaggtttcttttgtttcaacatcttgtagtctcggccactagaaagaactcctaggatactttctctgtgttctgtctttgatctgtttgagggactttcttttctctttctttttccatcatagttgtaatcgtttagatatcttttctgcccagacttcgcattaccgatcgatcaaacggatcataaaataaagctctgagctaacgatatgtgacgagtgaaaaaaaaaatatggaaaaaagatgaagaaagcaaaacgaaaagtttcgctcagaaacctccaccggtttcccgattgtgctctgccgccttccttctttgagcatcctccaacttgggacagttgtttgctgcgtgtcccaaaccaccacaaaccggacaacccgttcctgcgtatccagcattgggatcctcgagggctgccaagaacggagggatcctgtagaaaacaagtttttttccctccctccttaatcagcatcctttcgatcatccactttacaaacagaccaccaagaggaaggaaataaagaaagactcacctctgcttggcctccttgagtagatacttgagatccaaaagggtctgttcagtggtctgcatgtttacaaatgtagtagcaatacctgtctttccagaacgacccgtacgaccgatctgatggacataatcctcgatttctttaggcatcgtgtagttctgtcggataaaaacaaggaacgaaaacgatcagaaactcgatggtgaagatgagtgaaacaaggccaagaagacggaaaatcgtacaatgacgtgttgaatttcgttgaaatcaagacctttggaagctactccagaagccaccatcacatctttcgcgccagatttgaacgatcggatcgcatactctcgttcttcctgggctgttaaaaacaaaaagagaaggggaaaaaacccgttcagtacgtctaggactagggaacattgtaggcttaagaaagacaacggtagacatac

SEQ ID NO: 2107 - DNA, 2860 bp, Xanthophyllomyces dendrorhous
ttggatccatggatggcaacagcctcaactcccttcaaaagcagatattcctggatatctacatcaaatccaagacgaacattcgtatgatcaaccacggtcagtcgaactttccagatcatgataacgagataaatattcttcaagaaagaatttctcaccatctacctcattcttgttatcactgaagacgactacgggtggcggggtcttttgcaagcactccaaaagatagaccatctttgcttcctgtttgacgtactctacttcctggatgatgtccaaattggcagctccagcacgaccacagtttacaagaataggcttggtaagagattgttgcgcaaagttctggattgttttcggcatagtggcagagaatagcaaggtttgacgttgttgcttgaaagcgagaaaaagagagaggagtatggtgcgtgagtcaaacagtttacgaagcagtcttccaggaaggaaagagcaaagataccttgaagtaactcataatctctcggacgttttcctcgaaacccatatcaatcattcgatcggcctcatctaagcatagatatcttttcaaggaaagcattcgcgccgtcagatggataactcgatagttgtaagatagacaaggaagatggtagcagaaaaagaacagtcactcacttgcaggcatccaatccaaatcgttttttcgacaacatatcgatcaatcgaccaggcgtagcgactacgatatgcagtcctttggacaacacgtccgactgctcctgcatcgagattcctccaatcgtaagtaagactccaagctgaggataaccaccctcagccaacgcggtgcacatttcttgaactccttcatatgtctgtcgagccaactctcgctgtgttcgaggaagtaagaaaacccagtttgagctcctatcttaatgtcatgaaagaatcaatgttcaagaggagtgataaacgtaccgatggacaaacgatcattcctacagggccctctccttttgtgaaaggcatctttcgctcctcctctagcgcgagcatgatagctggtaaagagaaagcaagcgtttttccggatccggtgaaagcaataccgatcatatctcgccctgagaacctggtttgtaccgagcgccatatggtttccatgtcagacgatataccactcaaaatagaacgacacggacaatgtccgcgaaaaacaaaggaaagaacgaacgcagtaggaatcccctgaatctgaataggggtgggatgcatgatcttcttgttcttcagatactttaagagcggaggaggcaatttcatatcctgttcgaagtagtgccaacatggttactatggtcgatcaccaagaagacgaatggaggaaggaaaagacaaacctggaactcgggcgtcggcggcggcacatcatctccctccacgaataaatggtacttttctctgatcttggcatgctcctcctctgtcttggtcaggatatatctgggggctcgccatctatgatacatcaagaaaatccggatatcagttcatgaactttcgacctcttttcgccactttctcagccatagcgtgaagagaagctagagtaacccggagaacgacttacgtggctggaagactgtttccgtactctactccctgagcaagctcagcgttactagccaactttctctgctggcctgcaagctctttgatcaacttttcctcctcctccaaccgaagctgctcctgactcttcaacgcgtccgcctccatctttcgcctcttgacctctgctgcattatccaagagcgtccgttcccttcttgccttctccctctttcttgccaattcatcctctcgctccttctcaagatcagccaaatcctcaaggtgctgtttctcttttccacccttagaggctaacgtttggaaacgagcttcccgacgagcagcaagtgggacgtaagggacatagttgtcctcctctggcgcaggttcctcctcaacaggttgtcgataccgatgagagacaaacagcttggaagatgaagatgaggaggacggttctggaggaggaggagcaacgtcagtcatgatgttctctggtcaaaggagggttgtgtggatgttcagtgggtaattcaagatatatcagatcagcggatgagttcgtgacaaatagagcgtgttttgatatcagcctggcctcaggcttggtcaaagactacaacttttggtgatcatcgcattacacaatttgtagttctttttcaatttccttctagatccttcctactttctatctatctttatttgggtgagtcatactaatgaacgctggtacccaagcttcatggtcatgatcatcttgaacgatagacgtggtttgaagatgtgttttaggtcaaagtctccactctcaacatttctcatgaataacttggcaactgttccgttcctgcgcctacgttcgaactcggatcgtccacccgctgaacacccccctcgatagaccttccttcgcccatataaggaggcggtacccctccaccttcaatactattcacagccagacccgtctgtatttgctgtagttgaacgctctccagtgcgggcgcctcttctactcgctcatgtggtcccacagataaggttgtcaagtgtgctcctccggtcaatggatttcccaacagtgtctctagtcgatgttccctactacctatcctattggtttcaacatctccgaatatgggcggcagatcgttcgggtcatccattctttcccccctcctttcttcgtctctaatgatcccacggatgggactggtccccctcgtacccccaccgccgccttcccttc

SEQ ID NO: 2108 - DNA, 5431 bp, Xanthophyllomyces dendrorhous
gctccagaggatcgactcatgaccagcgcatctacaacttcgcctactaccgaagcaggtactccccgttgcatcgtaggggcaacttcttcacctgccgccatcgagttcaacatcgactcaacctctgcagccaacaatgacggacgttcaccttccaacggagggtcgatggacgatgtcgaaccatatgcgacagataggtctggaggcggatctgagaatacctcataaccatcgtattcaacccatgttgcagggaggttggcaggatcgatgaagtctaaagcggagagagaaagagaaggaacatagggagactgtatagttgatgatgggacgacaagatctgaagccagatgatggggcgcaggaactgaaggagtagaggagggcgaaggctgaaaccgtggaggctgaggataacttggaacggaccctgtcggggtttgattgatatattcttggaatgaaggtggggccaccgccgttggagagtctggttggaacgcgggtggaggaagaggaggtaattccgagaaggggggaggattaagtgacgaacttgaaattcgatggtacgttgcgggctgaccgaccgaagatggaggttgtggagtgccctgtgatgatgatgaagcatatctatgatcagagcgcgggtgaggatctcgaacgaggaaaggaggaggatcttcctgttgcaccggtggacctggctgggagctatcggttgcaagagagctagatccaccggccgaaccctctctaattgtgactccttgccacatactctgctttgatgaagtactgttctccgtaattgaggagctcgctggttcagtagtcgttctctctgcttcttctccctcgatgtcaactagatcccccaagacttgtatttctcgctcgtactccaattcgtctactcttccgccgatgaatccgaccatcaccttgacccagaaccggatttctacccatccattctcagaccacggccgagtagacagggtgagatgaccacaggtaagctggtaggacgatgagggtgatagtggaggatgaagcgagaggcgtaagcggataggtgatgtgagcgagaacctgcacgatgaacctgtggacgtcaacaaggtagaagacgtgctctggtcggagtcactcgaatctaaggtcgtagctactgaagaaggcccgcgaggagttctagtgggctccccaggttgtcgcgcaccgtgatgaacggtaacgactctccatagctcggctcgtacgttgcgtagcacagctccagtccgcaaggcttctgtctgtagaggtatgggaatctctatccagagtctcagggtttccgtctttcgcacccgaatttttgggaatcctattaaaattggacttggcagaaagctcggaggtggaatttgagctagataaggtgctgggtgatctgaatcagcatggtctccgtttggacaaagatgaaactccatggtctctgtgataacgagaagaccttcggaattggaagatacagcggtggacgatcgagactgatacatttcaagagcagatgacgtagggtggtaaagtgttagagagacggagagactgtaagcgagcgagatactagggtgatgaaggcattgaggcaaatccgaagggatgggtatacggaatgactggcgaggagcagtgacgtgtgtaagggtagccatagaaccggaaggtgttaacgatgtgtttgcacaaggaggaatcagctgagacctgcgaaagaggatctgtggtgtagttgttggagttgagaggttgagagtaatggtcactgatctgcggatatacaaggagttcccaacaagctaatagtcagcatttccacaatataaaccaaagcaatcgaagatagaccgacaattctcttattgcggatgatagacctttcatcatgacttcaccctcgatgtatgccttgctgtccctttcgcctagtgtacctatgagaaacgagctactatgaggcagcggcgccaaaaggatggatactggctcggccaaaggaggaaggtcggctatgctgaccgaggcgaatgggtgagatgtcaagcgagagggagcatagcaggcactggtagaggatgcatatgttggaggatttggaaagctcatacaagacctgatagacggactgtgaggtctagtatgtgtatgctgatgtgagtaggtgtgtctgttgatgtgagtaggtgtgtctgtatagatcgatagagagacgagggacctgatgacaaagtatagggctttaccggactcaccccaatttgtccatatttagccggacatgatcacgtgtaaccccatatatccccaatattaaccatacgcaattgcatacattcacgtgaacacgtcatttatcacgtggttcaatccctcaccgggtcacactgcgcaatgcgctcgagatgtttcgtccccaactccatctgattccccatctcttttttcctcgtcacctcaactttcccatatattcatctgagaatctatccatctcactttctgatatcaccttcacactgctatctaacagaacatccacaacaatggcctcgtacgtgtttattgttcgcttcatctgtcgatctgttgtgctcatatgagttgatgtacgtcactcatctcggttatccctcattcttgggattgtttgttttgtcatatcagatccaattctcctagcaaaggacctgctggttcggaccctttctctgcccttgctgaatttccataattctatccttatctaataatctctttccgttctcatttactcacttacatctgtctacaatagaacaaaattctgaagacaactatcagaactaccaggatgacagtaagtgcctccgacattgtctctgtgtggtccacatagtcctcatactcatagacagccctctgttcacaattgaacttcttttagatacctcatccggcggctacggtggaacgtccaattcattttctcgatctaaccagatgggaggagatgattcggatcgaggtggccagttcggaaagaacagttccagtgcctcacaggataacttcgagtcccacaaagaccgaggtcgaaactcgactggaagctctgaccaggattacgctagcggaacatcgactccctacagttacgaggagactggcaagggaaccgagggttcccttgattacagcaacagcagcggtcgtaagttatcagatattctatcagtacatacggtgaccttctgaatattaaccctctgagccccttctttcgcgactctttgcagaagaacctcctcacaaccaaggttcctccaactctattggagcctaaacgatgaggattcttgattcgtttagcgttgtttcttattttctctctttcgaactgtacttagcctcagatatatcgatagcatgctcgcgttagatcattcactagaagagaaagggcacatctctatccgcgaaaaaagttcttgatggcagcacctggctgacataagactaatatgactctaaggaagatcaactagaacgtagagattgtacatgagagccatcatcatgatcgtaggctcgcaagataagtggaccagacaggaatgaccgaatcaagacaagatgcagaagaaaaagtatagaaaagaagatgaagttgtccattcagttggcctcgacgaaagccctgtaggcctgcaaggctccgttcgcacttaactcgagttcctgtccagccgcgatgaaccaaacagcacccgtctcgagttcactttccacctctccacagatcaactttccagttccctcggtaatcaaaagaatactcggtccgtccaccgctggctgtttctccttctctccggatgggagatgagtatgcgccacggaaaactcatcaatcggaggatcatacagcttggtgtgagctaacgacttgaactgatcagggttcatcaattgagcgtcgggaggagcagaatagtaggtcaacattgagacgagcgtagggacatctcggagtttaggagtcagaccggctcggacgacgttatcagaggtcgccatgcactcgacgatgtctgttgatcatgaaaagaaaagaaaaagaaagacaatccaagaagaacagcccggttgagaccttcgtttgcaagaaagatagacaagaaaatggaagaaagaaacgaacctccagagatgtaagcgtgcggttcatccgccttcaagaacgctcctcctccaggttctaacgagacgacgttcaagaggaaagagcaaaagacaccgatatcatccgggaactgctcattcaacgatcgaactagctctctcaactcttttgtctcaacctcctcgttcacctcgactccaccaacctcgtatctgttgacgagcttggccaactgggtcttgacctcggcctcatcagctgtcatcagagactcaaacacctcacgaagggcaaccttggagggatcatgggaaagcgggagagacgtttggccggcacacgcgataaaagtcgtcttggcttgagagctgatgagatcagagaattcggggacgacggagaggaaggaggcaatctcggctaatggacggaaaccgacaaaggctttgaagggggtgatggcgatcgccatctcaggctatttcaccaacgtgcgaggcaaacagacacgaggtgacagaggaaaaatcgagaataagtgagcgtcacgagagatttgaatcaagttagggttgcatacgaaccttgtgattgtcgtccttgtacacgtccggcctgtccttgtgcaactgttccgctagctgcttgttagggtgagcctgaatgctaagcgccttaccgatagcaagcaccttgaataagaatgggagatcatctccaaatcgttcttgaactttaggtcccaagtaggctttcgggtcggacgcaattatcttggagagaagctccgaggtctccgcacgggaagaagggcaggatgggtgggtacccatccagagctaaacaagcgggaagacatagacaaggaaggaattgtattgagctcagaaccaagacaagaaagacctgggggcaaccatataagatcgagcagatagcagcgaaaggaggtctatagcgtcgaaatcatggtctcaaaacctccctggtatcttttgactctatcataccaacccttgacacgttgctacccggtaaataccactcacctcggcgtagggcttgccttcctcgatcttgaaacccttggtggtttttccaaactgggcagccttagaatcgcttccaatctttccccattcgtaggactggacaccggtagagagctggaaggcaggagtgaaggtagacatgctaaagagggct

SEQ ID NO: 2109 - DNA, 4568 bp, Xanthophyllomyces dendrorhous
aaagagggctgaatgagtgagaaagatgtaggtaatggagactcgttcgttcgcccttcggggcgtagcttaacttgtgtcagtgaaacagatcacgtggcatgtcacgtgtattgtcacacgtgcaacacagccttgatctcgctatctttatggcttggctttctcaatctctccttatttgaggtcccatcaacatcgagatgacttcgaatccggagcaatcccatgccatgttggttttttttacttcctgtgaaactgattcggttacgtatcgaagatgttgttctccaagctaacgccgtatgatgtgtttgtacatcttaacatgtaatcggatatatctgcttgattccttctcagctcctcgtttagccttcttctattcctcgcgttatgtacattttgttatttaagtcctcttgagcctccaagataccctgaatcaagtgctcgaccgattttggcactggatatacccgttccaggctgctcaaatgcgtcctatgagtaagctacgcctggcttcctttcacctcggaaatttcgccattactcggctcttgatgacgaagatgtgttgaccctgatgcgcctgtgaattaattcttctgataattaagactaactctcccgagagagaaagcttgtattctgattctggccggaaatcaagatgatgtaggactcaaaagctctctagagtcatttgagcgaatggtttgttctcactatacattccatgttcaaatccttgcgcgcgcgggctcctatcactactaacgttctcttcttctcgctagttcaacgctcaattcagatacccatacgttcttctttctgatacccaaatcaccgatgagtttcttacatccatcaaagaaatacttcatccggacgcggtagttgagtcaggattgatctcgcacgaacagggctggggggtcccagactggatggatagtgaggctgtacaagaggcgttgaagatgcagaagaagcagggcgtccagcatggtggtgaagagagctatcgtaagtgccgtcttcttggtcaggaatatcagattgtgttcaaagtgttctgaagctatttgatgtcccaatgaaactcatccagacaatacgtacaggttctattccggaccttttgccgtgcatccattattggccaagtccgttctactgagactatgcacgataccacgtctttgtgtagccacagtctgacagtagaggctggctgcttctcttcttgaaaacttataccacacagatacgagtggtactggcgtctggaatcagagtttgtttcagcctttccctcgaatgtctatttgcgccacgtacagtacctgacttctgtttcttctctcttctttgtcaaaatgtgatgctgcagcgttggttttttctgcaagttgaactatgagtgaatttcttcttcctgttgataaatacctggtcttggtggtttctgtatgtttaacacctttcacacctctacccacttagtccttttcgtttcatggcgacaaacagcaaggtctatgggttcaatatcgccagtgtgtatcacataagatcatcgtatcgcttcttatgtactgaagaacttgaaaaacctgataggaagtctgttctctgcccgtcatctctttcttagtggtagaacaggagaacaccatcccgacgttgttcgagacagtgtccgcttatagagataatctcatttcgacaggagcaatcaaacccaactcgtactgtgcgcttgattctatccatctctgacgctttctctttgtcaaaaacgcactctgttctaacattggtctgttcaactttgatcgcctgctgttctttgtttctgttagggagtatgtttgaggctgacgggagaggaaaacacggcgatggcggaaaacctttgaaaaatggaaattcagggtacaatttatgccagtattggacaaactttggttcgtccctactcctgtcatctctcatacttacccctgttcttgtgttctcatctgcgcaccctgaggctaactaattcagcgctttgttcgtcgtacagagatcggaagtctgaatttttttaggtcgaaacagtatcaggaattgttccatcatctagatcagactggaaacttctattttgaaagatggggagatgcatccagtctgtcacaatttctttcttctctcgtatcttctcctttttttaactggtttcttactcgatacctcgcggatctatgctcaattcatctctttctccttctgataattgcactggctgtactgattagtccgttcgttagctctcggtctcttcacaaacttcactcaaacacagtacgttcttttctactctgtcttccatctctctttcaaaatgcgacaagaagagctaaccatctaacgactgacttgatttgcagttactttgaagatatagcgtatacacagtttcgtatttttctcttttccttttctttgcctacatatcagcggctggtactgaccttgtgctggttgatgcagtcactcctggatgtactgtccaacgagaggagggataggatgcgactgctcgtgtcctcctaaggtcaaaaacatcgcactggacgaatcaaagtcgtttgtcctctcaattcatactttattcgtcctagatctgtgctcacatcaggttccctccttgatctgtctgttgttccgggatgacaaaggtgcttgagccggtggcaagatatcaatcgggctttatgagatgctataatcagaatcaagctagagtcgaaactctagaacggaaagaatgaagcgagagacgtatgtgctcgttgatacgcaaagaaaggaaaattcaggttgaatgacatatattttttcgttaatgcgatcacgtctatctatccatccatcctcctttctcttcacattcactccattgccttttcattatcactattttcctcctcatcatgctcaatcgctccgattcctgatctcaaccgttcttccctctcacctacatgtctctctacacctctcaggaaatcatttgtacaaagaaagtggatcacttgagaaaggtcggatgtagtatgttgaatgtctgtctcgagaagcgaatgaagcagagaaggccgagtcgatggacggggctgaatccgaggattgggagtcggtgtcggtcggggttgttgagtcggacgaagggcgttgggcttgtatgttaaatagaataaaatcatacgtcaagaaacgatgtcgatagggagagggaaagagcacaagaaagaacaggtatagacaggaggatcaaatacaacttacattgctgatacaatcggggtcttcctgttcgttttggtgtgcaaatcgacaggcgttgcccattttgcaacctttctttgttctgaagtaggagcacacaggtttggcccgtgctccttctttcccttccccttcagcagtggggagcttggatgatgagccttctggggggccgtcttcatcactcgatgattcatcttcctcagaagaactatcctcgtcttctgatgatgaagaggaggaggaggaggatagagggtcgctatcaaaatcatcatccaacagtccttctttctttgctttctcgtatgcttccaggtcaacacctcgaccttttgacccaggtttagcaggacgattctctgatggctttttgccctgcggtcgagaagaagaaagctgattcctggtattgcctctacctcgagtgaccccacctctgcctcgaccgcgggcggatgccgaacggaaaggcagctcacccctagaaacagcttcttcatgcattttttccttcacagaatgaaagtgaaatgtttgttttgtggattagccgcgctagtaccatgatcactaggcagagtgttgaaggttgactctatgaacgggatgtgttaagtacatactttttcttgaaccctagcttgagtaggccatttccgcttcctttctgcgatccaggcttcaatctgttcgggagtctggagcaccatcgttgttcctggaattggaaccggaggtctatcatcgattgatttactcatcaaaaacgtcagctcatctaatcctcgtcaaaagaattaaagagagagatttgacgtgacataccctccgttggactttgcctttttgcgctccatcttctccttccaaccgactggatagatcagatgtctatccatttcatgaatttctacatccttctcaagtccagtgaaatgacaggatgataattgacaatttcgcattcgctgagcagggttgagtgcttgatggtccagtttcggctgcttcgccttcttctctgatctgccggctgtcggatgaggatgatccgatatggacgacgaggacttcggagtaaaagaggaggaagaaggggcagacggagaagaaacaggctgggacgtgaagtgtgtagagagcgtgtagccctgaggcgtctgttggtacggatttgaaggatacccgaacggctgaagcggatggccagagta

SEQ ID NO: 2110 - DNA, 17374 bp, Xanthophyllomyces dendrorhous
gccagagtaagcgttgttcatggatggatagcttccagcccagacattaggattcggatttgaaagtgcttggagagcattggaggcagctaaggaggctagattgaagcctgaaggagaatatatgggtccagttattggtgctggataagctggaagattaggcaattgatgtggataagacgaagacgattgaggttgaggttgaggctgagactgatgttgaaggagagtagggttggacggaagatttgacggaaggtttgagcgcaaacgtggtggaggagcggcagcggaagaatcaggagcaggttgacctgatggtcgttgaggaagagaatgatgcatctgtttagctgagctcactgatcaacggccaaacggtcaaggtcaagatcaagctcgatgtctacgtcgagccaagtcaaacaacgctggtcaaacctcaaccaacatttttgggcatgaagtcatcttgagaaaggcatacagcacagccttgaatgtggcgatcgacttggcggtcttgcggcaccgcaacacgtgactctgcggctgtttgtgatgatcagagatcgcattttcatcctgcagttgcacctaccatcctttggcgtctctctgtttgtgtctacatcagactattgttaaacaagcttggtggacttctagttcaacaaggcatatagtgaaccagccaaactgtcgtcctacgctcccatagatcgatcgcctcaatctccctcgggatcgacctcgtcgcgctaccaggaagatatcaacctgggcgaccctcctcggagttactacactcatcaacccccggcccagaggtttctgagaagggcacacgccctattatcacccaaggttcttctctcaggtagaggaatcaccgtaggaggcgtcctgggtagcgtggtgctgctctggatcattcttaatctctctgggacgtcctccaaaacagtcatcccgcccagcaagcgtccggcagggtacaacgacaaggcgtaccagctcctttattacccagaacatccaaacacgtgtagattccaagaaccaggcgctggcctcacgaaagatgaactagaggtttatcaatcgttgcaggctgcgttgagttctcctcataagaaacctcactccagatggcaaggtggaatcaaactcgatttaccaacgtcgcctgccgtgttagaacatgagggtgaagtaagcgagcgtagccatctaggatacaagtttggcttggatggaaacattcatccgatattcagtctcttggcttggggagaggaaaagttcgcgggcatggtccagagacggagtgaaagtttggaggaggccgtgagtgagtacaagaaaaggtacggtagaaatccaccaagagggttcgacaaatggtgggactacgtgagtgttttgctctgtattccttgtagtcctcttatttgggtttaactcatctgtcgagtgctaatgtatcggagtttgtgctgacaatttccttccaggccacaaaaaataacgtactgctacccgatgagtacgacagcatcgaagactctcttgcacctttccgagcatttacccgacgcgatctcctctcacgcttggaggaagcaaaatctgtccgagacaccgttatcttgaggcaccgacggggaactggaaccagcgctgtttacaccgcagggttgagcgaaaacgattattggacaaaccgacggtcggacggacagttacttttgataccagaagaggtccgacgcgtacttccggattttgagtaagctgcttgtttctcctttccattgaatgcgcgcaatttgtttgccattcgctctatcctctacacccgagtatcagatataaaattcatacgagtctgcaaatgaggttcacttgattggacgactgacacccgtttcgtttgatcaatttctcttcaacctagtattgtctttggtctcaaagatgagcctcaagttttatccgactgggaaacaaaagctaaactttatgatctttccgcacacaatgaaagtaagttcgccttgaaagtcttcgatatcttatcgttcttcatacaaacatgatcgatctatgaattctcaattcaagctcatactattttgtctctatgtagaacttccggaaaactctcctttaccatatgcgtcctctagattgttgtttccaaattcatgctcgcccagtacgcctttacgtcaaggtcttcccgaagagccgtcccatcttgcgtttatctccccagaatcacacaggagagcccaagatccatgcctgcacccatacatcgcggacaaccacggtttcctgatcgacgagaagggggaatggaccaatcctgttgttaggttcggcggcaaggtgcatacactttcccttttcttacggccctgcccttcgactgacctattcttgttctatggacatatatatgcgtggatgaatagctattaccactcttgtgcttgagtaaggtggaaggaatgactgatttaggcggaataccttttgaagaggttcgttgcagactataggaatttttctgcatcgtatcttccagaggacaataaactcacttcccttcatgttatgtttccttctgcaggagggttttgatcttgtgagcaaagacaagacaccttggagctctaaggatgaaaaattatattgggtacgtcttatcgttcgctttctgccttgttgaatgattccagtttgagttgcttaggtctatttggatctcttctcgttgttttgaacctttccagagaggacaatgtactggactgtaggcctcgtcttgttaaaacattttgcctcttgagaaaaatctgacgcgttctacgcctatccacatccagtttcaagtcgaaaggacatggttcgtatcttatcgatctcgttctttcgtcttcctgagttcattcttctgttctttcttaatttgatctcctttccacctctgaatcaaggtcaccgctggcgtcaatctcacagagcccgacttcataaaatggtcaatgacccgtctacactgaagacggttcctgtactccttaccaacgctgatagtggggaggcaaaaaccgaagtgttctcacccactcagattagggagtggggatacgacatcagcttgagtgggaaggctgtacagtgtgaccaagaggatggaacatgtgcagacatggagtgagtctgtgaagctctatcatttgttcaaatcatatggactgacctgaggtgaatcttgggcgaacgtgtcttcagtcaaatcttcaagtttgctccgttagactctcaagaaaaagcaaacgtatgtcctcttccgacaattctgttcttcatcagatatgattaatttatctatgcgatcttgatccttgtctattattggtgtgaacgtgccgaatgagcagaaccataaatatctattcgacatcgacgtatgtctcttcttgatttctgctgcactcctttttttttctttccatatccctctcgcaaatcattcaccttcgccctcaatcaattgaactgaatcgaaacgttgtagggaaatgcatggacgagccgattccgacgactgatgatgagcaacaggttcgccttcatattctttcctcacatgtttctcatatttttgcacgaggcgagggtgttaatcttttcgaattttctccttctctgtgattgtaaagtttggtattcaagagcacgatttgtacgtcaactgtcctttgcggatgagttttctaggttattgattgagtcgattatatcatcttttacgattcacagtccctgaatggagtaagccgcctgtcttctcttctatgtatagacatagagcattagatctagagacgatgagcgataacaaattacagccggactgatcgagttcttgattttaaattacagatacggacatcctacctgaatggtttgcgtatgtgcccatcaagatggattataccgacacaccttctgtcctcgccttgtttgtattatctcttcctttcgtgttttaaaacgaatccttgtgctgacaaatatcattttcaatcacacataaatcttcattcaaatcaaccacaacaaacagcttccgaggatctccaccagagaaaggctcaggctcttcatggccatcgttctcagctgagaaaggtttaagggacgaagtggctaagcgaatggctgataatggccgatgttgggtggagaggacatggcgtaaaggttcgttcttgcctctgctctctttcccttgctactcgcctttgactacgtgcttactggatattgttcatatagaggatatggtggtctacatgtatcggttttaccttggttcgtcttctttgtttccctttatgttaatttcgaaagcagacgatggctgatctcaccctctgtgatttcgatatcttgtctttgttctttcaaatagaatgggcgaggcttgtgcacgaagatcggggagatttggagatggccgattgaggagatatgtgaactgggtcctttcaatcagatcgggatggtgtcggaagactgtttgagattaaattcggagcaacaggtggatgagaacagagaaaggatgttcgggtgcacaggtctatttatgcttatcttagctcttcataagccaaaaatgtcctctcatgatttagacccagatctagctcttgttgatcagagaaagtctcttcatgaagagaagagactggtcagcggaacaggtcgaagacagtgtgagatgccagaggaaaaacgatttgaagggtcagtgatggaaagaaggagaggtgttgtggctaacgccattggtcggttaattagacacgatttctcgggaacaggtttccttgtatcagtgtagatcagtctcgtattcgaagagtaagagagctgtcttatatgcttatatgtgtgtcaatcgtcatcttccgggagaaccgacttgccctcaagaaatgagagagaaaaaaagcaaaataagatcaaaaccaccgtccgcctcacacttcctatctacggcttactcgtccttgtttccctgtgtgtttgatttgagaaggacagaagaaaagcgaagaaagagatgcccggtcgtttttcagaatgagcaggttaaaaaaggaatagtcagtttccgttgtatcgcgaaatagaatctctagacggatgatacccaatcaaggagatagggagagaaaattgaaaactacagagcaaacaaaagaaaaagaacgaacaagaacaagcttgtatccggtatcggcggatgccacggtgctgacagcgaggagggcaaggtagaactctgtttcatgagaagagaacgagaacgaagaagcagatacaaaatcaggacttctgtagctttcaatactgtaaggtagatgctattttgctattctttctatctcgcttctttctatctcttatgttctgatgggcgagccaagggagcacatgtttcgaaagaaacaagagacaaggtgaaggcgagatgcaagcgaggaagatagccgagaggcaaaagaaagaaaggcgaagaaaggacacatactgaagtaggtctttcctcggcccaaaaggtagacgggggtgtccttctcggactggaaagctcgctgcttagcgatgatatcgtttcgtccgtcaaggaatcgcttgaagatcgatcgattgatcggctgggcgtttcgaaggagggaggtagctcgcatctttatctattctagagaggagcagaggaagaaaaaaagattggccagacaggatggggtaggaaaaaaaccaaaaaaaattcgataaaaacacaacaaacagacgcgacctcgttagaaatggagacagaagcagcagtagacatttgaacgaccactctagtgagccagacaaggacgtacgaagaaggttagagatctggctggctggctgggatggatgatgatcaacgaaagagaaagtgaaaacgaaccgagggcgaaggcggaggaagacttgtaatgttacgggggctgttatgcttatgtaatcgcaacgcgtaaccattcctctttctcttccaattgactatcatcattttcagagtcaagccttaccatccatcatcatcatcatcgtccatctatcccacatggctctcgtagactatgtctcagactctgattcagagggatcagatcaagaggtagccgctccagctgttactaaagccgctccttccaaagctatatccgcttgtactgtcatcccttcaacagcacatatcaaaagagcaatctctccgcctcgagctcctatcccctcggcctctggatcaggtctagcccttcctcctccaaaatctaatatccgcaaacggcctgctcctaaattcaccatcgaggctgcttcagatgccgatacttctgccactgcaacgagcggatcgaattcggtcgagaatccggtggccaaaaaaccgaaacagaccccggcaggtagttcggccttactctcgatgcttcctccacctaaacaagcactaccgaaacccaaggcaatgcctgcgcctgtcaggttgaaacctcttgaggtggatgctgaaggcagagttgagtcgttcgagagagttgtagaggaagacgatggaacaggtggtcacaccggtgaggtcatcgatttcagtaggaaaggaccggtaggggagcccaagagaccggtgatcgtcaggccgttggatacaaaagcaaacggcggatcttcagcaaaatcgaaatcaaaagaagctccgttaatggatttttttggtattagtgagtcgaaatttttcttctagttctgctcacacctcagttgttttgaagattattatgaacacttacaacatactctgtctgaagctgcatcaacttcatccgtaccgtctgccgccagcctatcaaatacctctgcgcctcccaagatctcttctgctcctcagcttcctacattccgaccaccatctcctacgcgtctagacccatatcctggttactacgctcttccctctggagaatgggcagcacacgaccgagcgtactacgatagttactaccgtcaatggcgagaagaagacgaggctgcatcaggtgggaaggaagggtcgaactgggatgcactggatcagggaagagagattgtcgatgagattgatgtcagagggatgggcgcgaaggatgaggacaggttacctggggcggcgcccagagcagctgaggtctgtccacaactttctttacctcgcgcattcgggtttttcactcactttaccaatgttctgtcttgcttccaattattggaacaggctccaccaactgctgttaagaagaacctatccaagccaggtcaacggaatcaactctcggcgcttatccaaaacgttcgttcctctctctgtttcgtctccctcaatatcattcgatcgtttacacttcccaaacttttctctgtcttcacaatctcatcttttgaacatataggcccagtccaaccgggaggccttggaagaacagattgctaaagcaaaacggaacaaggttcgtcttgtcttatttcttttttcgtgttctgacttatcgtcttgtctaatgatgagttcgttctactattccgatgttgctcacgcagagagcgtctggacaagtatacgggttcagatagatgtatttctacctgggaggacgtatgtatatctaatgtatcactaccatcaaaatgagaaacataacatatataatacaaattcgtgacagacgagaaggtcatataataggtacagaagaaaggcgataagaagcactttccgaacagatccaaaagatgtgttcacagaactgcgagaagaatacatatcaggtcatgtacaagtagattacacgctcagaatgaactatcttcatcaggcatgagatctaagaacttcgttgagaccttctcgctgacacaaattctcaaacttgaagctctctgcaaattcatccagctccttgaatgagagatctctaaagtactctgcatattcaaagcaaagttcctccgagagtagaatgtttctcaccagcctacctaaatgagttgacgtgctccacgtcttggggtatcgagtcttgatcgaaggagcttctttctcaagccagtcctccagcggctggaaaatgtgcttaacttgactggtgttcgttccccattcatcagctgccaatcgcttcttcttggcaaggaacggtgcgagtcgtttgacgtagggagagtcaggggaagcataggtcattccttggaagccaatctgtggttgacaaatggcaattgtacccgatcaggtcaatgacgcaccaacacgaagtaggaagcgcgctcagagtgaaataacaaaaacaacgtacatctttgtacagccagattgtccaactcgaaccagcctttttgtatatacgaagctgatcttgaaggagattgtatctctctttgttagtgtcctcccatccaggtccgtctgtcggatcagcatacaccggtccactgaaacatggcgatcacaaggacggcaacattgacaatggtgagcaagccttccctcgaaacatcggttgatcaagtccgagaaagaaagtgttaggaggacgagacatacaactctccgttccacataggggttcctgtcttttgcatgaattggacttttcgctcccaactcttttgaagtttctccttttgggagtccgttctgtggtaaccccctccgagactgattaagcaagatatcagaaacgaaagctgaaacgttcagacaggaattttggttttgaagaagacatgtgcgcggaaaagcgcgagacgtacggaaatccgaagtttgagtagtcgtggtaggcatatacactattgggcagagcgtgggtgaatcgagatgaatccgaagcgaaagtgttcagatcgaaaaatagctgtcggagatagatagattcgaatcggaaaagagagcacgatctccatatcaggctacttcttcaccaaatgagaaggagggaatctagaggtgctcacgatgtgatctggatctatcttccggatagcagcttcgacctcgtcgtaccactttatgaccctaacgtgctcctcatcagtaggctcgttcaaaggattgactagacggatcacaacaataaagtggagatcaggtaatcagcggaatatgcttgtagacagaggagaagaccaagctcacatccggcaacccaggtgtttcccttgtatcgtcgagcgagctcctcccaaagtcggatagactacaagaacaccagagattaagtaaacgtttctcatgaacggaaataatctcgagttcaatgaactgcaaacttaccctgttctgaaactccttgtattcccagaacacagctcggtggataccagcatcggagtgcctttcaaaagatatgcgcgcctctctttcagttggcggcacaggagacaaggaaaagagaagcggtttgcaacaccatcttatggaacagttctcaccagtcgatgttttgacctcccggggcggcatgaaggtccaggattgtaaagatcttatgtttcgcacactataaccataagccgagtcaatatcattcctggtcaattgccgttctagatgcgtatagcgcggaaactcaatatgagggagaagtgagcaaccagaggatggacaaacgaggttgacaagtcgatcgatccattgaaatcccttttcgatccatactccgggtgcgtcatccgactcaaagtgacggtaattgaaaggaattcggatggtgttcaagccgagctatatgcaataggcaggtacgtatggatttaaagatgcgactcaatagagttcagtcaagattcagactcctagagatctgcgctcatgagaagtatagacctacggaagcgaagaactcagcgtccttttccgtgaaaaagttctgaaggaccagcaagtaaaacattacggtactctttcttggatcaatcacctagcgcaagcatgcttcatgcgaggataagtaggaaggtcacggagtctggtcaacgaacctcgagaaatttgtcgaaaaagtattcgtacttctcctcgcccatcacgttcttgagcttttttcgcatgtctgcctcgtggcctgagacccagtttcatagcaactcatcgtgtcaatactggtagtgtcctcctttgaggatcgaaaaatatcagtgcagtaggataccgatacaaaccaggatatccggtgataaagttctccatgttcatcccttttaacaagaggagatggccaaggagtatcgagcgagagcgcacaagcttgtgtcaacatagagagactctatgcaggccaggaaagttatccgatggcaaaaacaaccgggacttacatcctcctaggccggctccttttaggataacttcttctcccttctcgttgacgatctggtttcctttacatccttttggtgggataagcaatccaatacaaaagaaaacagttcgtgatcacgatcatgtctctatatgagcattgttcatggagtggaacctggaggaacgaacgaaggataccaccatcgtaaggggccgaaggagggggcacttgaactgtataagcaggcatgttgaatgttcgactgtatgttttttttccttcgtgtgtgtctgtatatatcacaggtagatagttcacgtaagatggaaaaggaagaagatctgggtaggtgaatgctgaggtctttgccagtagggtatttatctgtttctactgatctcactgatcacaagaatatttcttctttagtctctcggagaagaaccctcattcaattatactagccccgtcggtcatctgttgggaggaagatgaacgatctgttcgatgttcgagcgaggttttcccgtcggtcggagtttctgtcgtgccggtgaatcggaccggagccgaagcttgtcgaacgactgacaaatctaataaatctccgtcatctccttctggcttggctctcgttcttgataaccatctcctttattgtccgggaaacaagagtttgccgcatgccatgtgtattaatatttttggtagttcaggttcgaatcaaaggcggaaacaaaggcatctcgcgtaacggcaagaggataactttggctgaaacgcgcacaatgtacagaatccatatcgatacatgctaatcttgaccaacagatatttctcaatagaacctgctcacgctctcctgttccatcccagccagatggaagccactatcggcctgctcgccttttcctgcttcttgccataggatcaaaccctcaccgaaccctttatcaatcgcaaagtccctcgctcgcttggcacccgctccgacggtcactccattcccgttctctgtcctcggcagaccgttgcctttcgactttgctggagctctgctcgttcctgtcacagcagataaggatgatgtcgatggtgtccgagagaacgccattttctttccggctctcagtatcaggtccgactctgggttcgctatcgacgaaaactcgtcgatgatcggaatctggagaaggttctgattgggagtgatgaccaccatcgtgtttgtcgagatctctcgccaatccgttcgctcgaacgtgagcggttccgaagcgatcatgatcaacggatccggacggatggacgaatacgacattcggtaggatccagatcctagcggatattccgtctgttcaaagacatcttgtcagtcattcgaaacttgaaaaactgagaagaagaaaaatctgattgcatcgagggaaagagaagaagactcacgaacgatgttccggaagagtaaaacagactggcagcttcttgggtcttcgagctgacataccgggttaccacaacgctctccccgtccgtcacacaaaagttcatcagactcggctcagttgctccaacttgcttggtccattcgttcagctttctgatcgtcttgagcattgcctcttgtaaaagtctagttgagaaccttccttgcgcacgcttggacttgttgcactttccgcctggcacatctgacccttcaggaaagagtaaatcctgagggagaaaggataggaacagtgcaaatgcccattcagagtcggtcgtgccctgcgggaacaagaacagattttcgggaagagattgctgaagccgacgcttgatcaagtggaacgaagcgattccgccattgtgcatccactatttaaatccaatgtatacacatttcaacctgtaagatacgattgatccttacggaagatgatatgagatatacaactcatagcttgacataccatcagtcgtccaaagttccaaggatggcagttctgttcactgagcgctccagcagtggatgcacgaacatgagcaaagatcatgggactccgaatcttttcggccaaccggcccaggttttcattattccaagcctgaatccacacgaaagaatgtcagcacacgttggtagcgcacatcctctcgcttatagatacacatatatgtcttactggagtgatagagttgaagatgcaagggttcaaacggtcttcataaacgggtggtccctcaattgcgttgatctcttcctgtggatccatctgatccagcgatgcaggagcagacactaacgcagctgcttctgtttccgatttctcttctgacgggctcatcaatagtgttgacgaaggagttgacgataacgatgacggggatgatgaactagtggaagctgaaacaggttcggaggagtcataccatcctactccaaaactgatggtatgaaaaggtagatcgagagatcagtctgatgtgacatataatcattacgaaaagagtatttaactaacccgtccccgttgataggtcctcttgtgagatccagacgaagtttagaagcgaaagcttgattgatgatggagtgggctctgtacaagaaggaggcggaatttgacgttgttcaggcaggttcaaagcagtagagatcaacaaaaacgactcacggccgtgttaaaagctgaaaagatcgattgaagaactttcaatatcgatatacatgtgctaaacctctgaggatcacgtatgacgagtgaagagacaatcagccgacttacatgagagagcaggatgggctcttttcccttgtaaacgagctgcaagatgatagtccgactgtagctttagcgcaagtccctatgcaacctctagaagaaccaaaaatcgaagcattcagattcttaccagtctgcacatattgtataggcgtatagatgttgtgttagtggtaaacagtaagaagagatgagatgatgatggttaatgagtcgggtgtgtgctgggtgctagaccgaaggatggcggcaagatggctctatcagccgtccggttactaaccgctcgggactcaatcattcaaaccgactggccaactctcttgaacaccatcatctagcaaccatctgccatggcgtcgtctttaccttcttcgaagaaggctcctctgctgccggcttcgtcgttctatgtgccttctcttccgaccatctcgcacaggcttaaccaacacccgacccatccgcttaatgtatgggcaggcgccttgccgagtgatcctggggaacttgccggaggaggagaggacgatactggaagggatgctcagatctagtacgtcgtttcatttgtatggtttgtgtcagagaggataagtaggcctatcagatgggatccaagagacatactgggtgtggaacgatctgctcttgaagaatcaccctcaaatataacacgcgtattcgcaagatctatcggagtttattcctttctttgatctgatatctgctttattttatactctgtcctctcttctcgctacgccttgtgctcgattggccgaacctacagtttcatgatggttgggccacgtcgtcgagcaggcaaggataggttgatattctggtttaatggaggacctggttgctcctcgttcgatggctcaatgatggaggttggaccattccgaatggatccttccattccaggctccataaagctacttgactatggaggatgggaggagtttagcgggatcgtatttagttcgtcctattttttggctctttcataagaactctcaatcgatcccgacgatcttgtttccttaccgtccatattctcgactctcatcacagttgatcagccacccggtacaggattctcatatacccccacaaatggatatcttcatgagcttcacgaagcttcggcgcatttcaaccactttgtaggaaacttccttcaagtgttccccgaatggcaaggtgtagatgttcgtatttctcccaaattgttttgatctcgaagaagacttaattcgagtctcaaactcgtgaaacgatagtttagtccccctcctgacatctcgtgatcttcagacctacctagctggtgaaagttatgccggccaatatattccctactttgcagacgctcttctctcgtccacctctttgccaaactttcctctcaaaggaattgctattggaaatggctggatcgacccaagggagcagtatcaaggttatgtcgactttgcgttttctcacaaactggcggtcaagggcagcaccgtatgtattcttcagtcataatcataaggtcttgctgtcaaagcctggccgaacaaccaacttaataaagtcttttctcctctcctctcctctctaataatcttaccagcatggaaatcaattagaacaaacaatgaagagttgtcagaaagaaatcgacaaatttcaggatatattgacgctgccgatcaacattgctggttgtgcagaggtcatggaagccgttcaacagcctttcactcaggagttagtcaaaactcattcctctctcttatctttacagatgacaagacgatttatttagcggctgtctcctcatctcattcttagagtgaacggaaacaaggtgtgtatgaacgtgtacgatgtccgacttttggatgatttcccagcatgcgggatgaattggcctccggaactagccgacgtgtatacctatcttcgagtgagttacatcaacgtttgtgtatacatggggacgtagatactttctactcggaaggttcgatgtcactaattgtttgattctgattggatgtgtatggcagcgttcagacgtgatcaaagcactacacgctgaatctcacggttcagccgcctgggtcgaatgttccggtcccgttgccgccgcgcttgagaactataaatcacctgcgtcgatcggactcatgcctagcttgctaagtaagattcaggtcatgctgttcgcaggagcggaagatttgatctgcaaccatgagggtatcgagaggaccatcagacgtatggaatggcaaggacgaaaagggatgggcgtaagcagggcttctctgatctttggcaccatccgagtccttctctttctaatcttggtcggaattactttgatgcacgtcttgccccggagaatagaatgctacaacgaacgactggttgctcaatgataaaaaggtcggcacatggacgacgtctcgaaatctcacctacgtcaaggtatgtttctcctcctccctcttctgcttctatcaccccctgatgtgtgttcattaatatcccacttttttttccttttaatggggcgcaactcaaaagatttcggactcatcacatatggtaccctacgatctacccaccgtggcacatgacatgatgcttcggtttatgaacgtagatttcactcaactcgtagatggtactccaggttgggtcagtcaggttggagatgacgtaaaagtgaccgctggtgtcggcaaaatgttggaagattcagataaaacactaccaggaggttcatcatcaatgggctcgcctacatgggaatgtgagtttctttctgtcttcctcttcttttttgatgcgcgtcgtatgccatgatctgaggtctaataaatgaacgaaacaaactcgacgtcgtgttatcttgaataaaaaagcggtctacaacgtcggttcagccttcatcgtcttcctcttcatccttctctctaccggtctgttcttcttcttccgagcacgtcgtcgtcgtcgtcaacagcagggatcaggctaccatcggtcgacaccgtcataccataatcacagtcgatcggatagtttacctctcacaagacgagatgtcgaatcggccgaagagcgagaacctctggaaaggagttctcacgcccatggaggtagaccgtacacacctcctttcagttcaggaggaaggtattcacctcggatgggacctataaggtccacaggcactggcaccgtcggatctcccagaagaggaaggaccgtcctcgacgagaccgatcccgatgatgacgatgacgacgataatgatgacggtagaagggggaagagtgaggtcgtgtttgacgtaggagagagtgaggatgaggtagacgaaaggttcaacagaaaaggccggcgatagatctttcctcttctgcctttcttttctcttctctcttaattctaaatctgtagtttgtggcttcgtttcccagtgtcgattgggtcttcttgtcttgttctatatcatctttatagacatgtgtttccatttttccctttttcttcctccctttcttgttttctttcacgtaccaggttgatctagtctgacaggagaaagcgaatggataccaggctggcctgaaagtagaacaaacaaaaaagaatcgaggcaaggatgggagagcatcggactcatccaacaacatggagcggttttgaaaatcaggtccgaattccaagaaggatgcactttgtcgaactcatcccgcattcttctatctctttttaactgaaaccacaaaccggatcgaatatgaagccagaattgtatacatgcacattatgtacggatatggtgtaagtgcgattttggatacgtgggcgtggatatggatgtagacgtacgtcggatacggttctacgcacaccgggaggaggacatggagaaagaagaaagcgagaagccagctagctaacgtgtacatatatatgtttttttcctctcctcttccattcttccttcctttcgccctccctgccttttcccttgatcttcgccgtacgtttccgtctcgatgactttctggtgaaacgagtacagcaaaagagcccagagatggaaaccgacag

SEQ ID NO: 2111 - DNA, 54528 bp, Xanthophyllomyces dendrorhous
gggcatgactgggttcgtgaataattgatccaacagacaataaacagaacaaaagacaacaacaacaacaacgagaacgaggaaaaggtgaaaggaaaagaagagtgagagtaaaatcaaaagagaaccaagaaagaaaacatctagaagcctttggccgaaggaacaaagcctgtcgagatgatagagggagaagaaaaacaaaagaaaaggtcgagcgggtcagtctttactgtacacatctttcttggcaagagaaagtgaggaccagctgggacgaaccttggtcgtaaatcgtgttttcgaaatccttcaatagcggatcatcgctccattgacttttttcacccacaataccatcagtcagtcaagtcactcgaaaagtaaagaagagatctcgacggagatgacaagagagacaaggaaaggaactcacgcgacctcatattggttctcgtcccagacgattcccagcgggctatcgcccgctgtgttctccggcacgccccaaccttcgtctccctctttaagcccctttgcagtccacatctcctgaagtcggatatcttctgcctccttcagaagtttgatctcttctcgagtttcgtccggccgaggatcactgcagggtgacatagagaggaagatggatcgtaaatgttctgcataaaatggaaggatagagagagggaacagaaaggaaagatcaatcatacgtactcgtatctagcgtcgatacaaagtgcgctgacatagccaccgtggaagaatgcacgctatcggaagatgaaggatgacaaacgaatcggttgagtaaacgattggaccgataagagagaaaggtgaaggagagagggaagagggaagaaagaggaaagaaaagtggacgtacacctccacgctcggttgctgctctccttcggacggcctccgccgcgggtgctcttgcgtgtcccagatcatccgcatcagctgaagcagaaattatcaaacagtcaaaccgacggtaagtgtatcgttctcttcggctcgggtatgtactagaactggatcgtcgagatcagaagcttacccaacatgtcacagtcaactgtgatgagggatttgacggaacgacggaaaattcatcagcaagcgagcataaagagaacccaaacaccaagacatagggaacgcaccatctccaaatcctcggaccttatcgaacgcatcctcgtaatcgagatcatctccatcctgggccaaggctagcgtggcatcgatcacttccgccttgttggactcggactgtcctttgggtgcgatgaacagcgggaactctgaatttcaaaacggcgatttcgagatgggttaagatgtcaacactcgaggcatggacggctagacttttaatggaaagaagtacgcacgcttagttcgaccccatgagaatccccgtcggattccagaaggaacctgttcggttggattttcaccctttccttgtcagaacatgtgcgcgtaggagttaaaaactcgaacaaataggtgaaactggatggacagacctgcttcaaaagattgtagtgcacaaacagagggtccccgagatgatcgtattgcatcatggctgagtttccgtcgaatataggcacacagcatgtcagcgtacgttatgaaatgtataaagaggaaagagagtaaggctcactgagtccgcagaaatcgccagactgggttcctcttggaagtcctccgacaccgaggtttcggccgggtacaccccatctctttcgtagtgccaaaaaggcaaatctgaaggggttttgtcgaacagggaagtaagagtggggtgtgagatgtgatgctgaagaacgagaagacacaaggagaaagcgaaccggaaaatatctttatctccgtcactaaagttgaaccagaactatcaatcccaaagatgaaccagcgaacagtgagcggtgagcttgagttacgcacgcgctaagaagacgatgtatcgaccaagagagatttggaggccttactttgaaatcctcaagcatgtgctgtgagaggagcattgcgtccaaatgatactttttgtcgataaagatctggcctgtgtagaatgaagaagatatgagatgagataaagaaggatattatctataagaaagaacgtttcagcgtaccagcttccatctcccactgtgacccaggttggtttccaaggagaacaaaatcagacgcctagccatctgaccaggaacagagtaagaaaggacgacgaaggatagtttctcttacctcgtctctgcatctaactccgaggatggaccaaactgggttggcggccgcggtcttccagaaatcaggccagaagatctataggcggaaggtcaaaacgcatgagcaatgaacatagggaaagggaggtaagaacgccgagaggcactgaccgctcgaagtcgtttgtaaggcggggagtcaaacatgtattccggatccctggtcggtacattatctgaatcctgtttgtttgtttgtttgttgatccattcatgaagagttagctggtaagtgaactagcaagtgggcgaccgactgtcgatcaacctccgacacgtaccaggtacaagacctctctccatgggcactgcacgatcgccaacgctttgagatgatagttctttcttcttttctcatccttgacgcttcctttggcctctacgagttctgcgccgagttctctagcttcctggacgagcttagagtctgccggtggtttctccgaaggaaagtggtagatctgaacgggaagtttcgagtgatagactatggagagtgacgtaggaagatctgtcagcgagtgcgaaagtgacgaaagatgacttggtttggaggagaaagacaaaccgtgacgtaacatccgaaggatgtacaacactctctcaagcgtatccgcgttacctagaaagatttgttgaaaaacagccagtcagacctgaggaggaaaattatctagcaagagatgatatacgaaccggcagagaggacgatgcctcggccagatccgtagttctgggttgctcccttttggtcgagatcgtagagcctgttaatgagccgcattcggtgttcatgtatcgttgatctgtatcccggaagaaagaaagaaagaaagaaagaaagaaagaaagagagagagaaagaaaaacatcggtaagacggaaaagagacgtgtaggtcaagaaagaaacataagtgcgcaccgattcaaccccatccaaagacctattgaatttttcatcagactgagtgatgtacatgtccagaacaaggaaggaaaaaagaaaaagaagaaaaaagaaaggaagaacacaaagatcagctcctgggttgaataggacgcgctctacgcgcgagttatcaaagaaaagaacaagacgtactctgatgaatgagagggccaaacgttggcacaagattccatattgatgtgatagaagccaccttgctcgagctcgccttcgacctcaccagaccctcctggcgactgggcccaagcaaccagtctgtcctttgtagatgtatgaagaggaagcggttgggaggatatgtcgattggtcgttcggtacgattgtggtagattgggtgaggtcgtttaaacacggaagacggtacctctggagcgggctcttccaggctcgacaagaaagaagaatggatctgtacgtgcgtaggggtgtatgtacgaagagcggtgttacgtcattttaggcattggttcgtgcgagagaggtacatatgtaagtgagtgagcgaaatgcatgaacgcaaggagcaaaaaggacggaggacgagagaaaaagaaaagcagaagagaagaccaagaaagaagaaagaacggacatcgttatgccagccgagagcaaggagagcggcagtgagagcgaggatgatgagaccgaggtatcttttaaggacgttaccgatccctcttctgggtatcgattgtgtcagagtgtccagtgaggccaagacggatggtggcttggtggttgagctagccgagctatatggcgccgggaggccagcttggatcatggtattggtggtagcggtggtgatgagaggtgatgggtggtagaacaagtgatgatgacaacagatcgacgggatggtatgatacgggtcagaggaagtatcctgtttgatggatgtctttaataagaaggtaataaaaaaatataaaaaaacagaaacagaaacccaaaaaaagaagggatgaattgtaaagacaagagatggtcgatgctctcctcgcagtttcacctcaagtccagcagcagcagcagcagcagcaacaataatagcagacgtcaacggcaacaatcgatggcaacaacgtactcgatagcaacactcgtcagatcttagcactcaactatcagttgcgctacggaattgaagaacacaaaaaagacgtaatcaatttccttctataacctcatcaaccgcgctatcccaaaatatttccttcttctccttggctctgtttgctgtattcttctcatgcatcctcttgcttgctcgctatatcccaacactagctacagatctgccccctaccagacattcgacaacccccttcgatccctttatttcctttctcgtcatcttcctcgcttcccttcttgccctcgtttctcgttctctccgcggcaggtccgcgttcggttcgggcaggccgagtaaaaaaggcccggaggccgcagtcccgcagccggtgtgggcctagaactgtagggtgcgcagctcaggaacgcagcttacgtaacaatattctcggctcccaccgcctcgtgtgcctggaacacctgtgcacgtttcatccggcctccatctcacccatacctgcctcgaacgtctacagccagcatacactcacacccgacacatgggaaactgcctgtccgatccatccaaggcgtcgtccacaaaggcatcgtccacaaagacaaagccgttcaaaggccagggtcactcgctctcttctccttcttcttcgtccaacactcctgggacacaacaggcaaggcccaatggagacacatcgacgactgcgacatcaccaccgagtctaggaccggggagaccattaggtgacggatttcaggatccagtcaggataccaggtcaacaatcaaatgctagagaagcagccgccaaggccgcacaggaaagagcaaacgcagtgagcgagagattatcgttctttagctgtgtatcatctgcccagtgctcggagctgacgtctttgtactctttctttatccgcgcggaatgtaagaactcgacaagaggaatctcctcggccaatccaaagagcggacagctctcggcgaaactaaaagaacagaataagatcatcgactcgggaaggaaggcgccggatagagaggatactcttgccgttcgtccattcccgtttttcctctcgctcttcctcttctctcttctttctttgtttttctctctttctttgcttctctcgctccctttgcttttcttaccttttgacttgtcgtttctgtctaaatcgttctcgtgtcatgacatccaacagagaccttcggactggaactaagctgctctctctattttcttcaaatactaaaccaaatcaaattatgtcgaatcttgtcggatcaaacctctgactctcgtgtttccttcggtttcccctccttccctcgttctgttttccttcttaaatctggccctacgtgctactgtacaaaaaaaacctttccgctcttcttttggaagatgtccttgttgtatccaaagatagatttccttagtctttcgttctttccgtcgagccttcttttcgttccctctgttttcgttctatcctgtctacccgttgaccgtggaatgagaaacgacggaacgactctttttcataatgataataatgtatagaagaagtcaaagagcaaaggaaatgggtaattaagagaagagaacaagagtaaacagaaagaagagaaaacaaaataaaataaaacagaatagaataggggaaatcctatcgaatctagaaggtaaaagtaagagaaacagatgaaggacagagtgactagagagaatatacacattctcgccaatcttcctctctacttccgacgcacacacgtctgcccgtctcctccatctccttgtcttttgtacactactctccagaaaacgaatctatgcgccttcactcctactttccattctttttctaacgtcttccctcttttcttttttcctcgctaacccttggctttgagggccttcggatgtatccgctcactttgaccggttctgctcgagctgtctagcggctgctctctctgatagatcgattcccaccaactgagccagcaggtcgacgaagaacagaagaagcgtcagtggactacgtctatccattggtcatccgagtggatcaataaatcgggaaagaaagaagaatcctcacaatcttgctcgccttccagaactgaacgacgttgatgatttgctttcccacacagatcgggaaacaaagcaaggcgacgatcatcggtaaactcaattttccaagcactaaatctaaccagccgactgccaactttggcacaatctctgacagtccgatagaagaaagtagagagctaaacgcatgggaagaaagaccgattgttcgccattccggaccggaaccgatgaggtagagtgcgacaaagaacgtctcgttcgcaaagcaaaatacaaacagcgttcgctagagcgagataaccaggagaaaccaaccgattggtatcaaaccgttagggcacctccctcggaaacacacgaatcagccaaagagaaggaccctcgactcacggtgtcgttgtagtacagccataagatcctagacacatcagccgtcaccagtttgtgcgaagtagatccagtcgccagagagctttttcaaccaaaaaaaaatccaaagaacgtagactctttcagcagtgcgcgacactagtcaatccaactctcacaaggaagaaagaaggcctaacctgtacatgtgcatgtaatgactgctaaagtccagagcaatcaagaactggaacagcaacgcatacgccgggtactcgcccgctaaatgagcgagtagacatgccgtcgcactcctgtcgtatatgacaatcattccggaagggaaacagtgagctaatcttcgctatctcaaaagatcaccagaaggaaaacgaaccggtcggtgaccatgtcaagaacggctccaaacttgctcgtctgcttcaaagctctggccgcgtgtccatcggcgacatccaagatcgaagacagaaagtagagggcggtgaacagcttaggatggtttggcatcacccagagagagattcctgctaggataatccgcgagtatcctacgagatgacgaaaacagaagaaagtaagtcagaagagagatgacacaacgttgaggtcagaaccgcccgtctcttttcagatcgtctttgtatggacaagcagataaacacgaaacacgcggaagagggacaaagagaaactgttttgagggcgaaacgtcaagacgaaaagagaattcttaccgattagattgggcacaaaaaggaagacattctctttggactgagttctaaagtgatccaaaaaagccccatcccaacccaccatcaagcccgatggataaatttgatttcagctccaaaacataccgaccacagtctctgtccaccacggaaaacttttgtgaaaaaagggatgcagtctgaacggatcacgaacgtacgcgagatcgacggcctccttggcgtccggtccaacatctgaacgcgaacgagaccgacgacggacagtctgagattgaagaggtgttgctggcgaattaggcgagagcttgaatccctcctgagacttgagctgagaagacataggcgagaggcttcctgtttggaaaagaaaaggatcacagatacaagattgatgggtcttttccggaaaaacgggagggtgttgaaagaataagaattggatgtcgaatagattcggcacaaggctggctggctgactgattagagagacgcattctctgattacgtgttacaccgcatctcatccgccggttgccgaacataattttcaacctctcctcacacgcaatcgctgaccgctcttcgcactctcccgaacgagtggtactggcactgctcgattagtaatgctgcagaacgcagagagatgcaacatcggtttcgcaagaggaagaaatttgaagaggtttgtacaaacatatctatcatgatagaacaaaaaaaacagatggtgtgtgatgccatgattcatgcgcccaaaaggaagcccgttccattctacgaaacacacacagagagaggaagaggaaaagagcgatttgagagagcaataggagatattcatgaaagaaacgtgttgacggtggagtgaaaccccggccagtaaactagggtgaataggaacggctcgcggatgcacctcggtcgatgatggagctgacgttgtcaataacgaaccactacacgaagaatacacgtaagagaacacagagagtcagcacaacagtcagaatttagcaagatatgcactctcctcgatggacagagggtttagataggatggaacgaacgagaagtccgtgtgtcagacacgatctttaaaggaagaacagacgacagaaacgaggtcaattagaactgtccatacaagagtgtaggaatatcaaggtagcaaactcacctagcagcagataccccgagtccacgatagagctgcataaaccctttactcataggttgtgggtgaaggctatcaggcccctttgcgatacggccaaatgtctcccagattcctctataagatttgtttgataacgctcgcttttgcattcgagttttgatagcatcgaccgctaggaacgtgtcgtccgtcgaaaagaaaaggcattcaaaaggaagtgagcctcgatgagatagagaagagcgaaaaagatgatcaatatagttggctagataacttacgataaatcagtgcccaagaggatacgcctgctacagatccacagaagaaaggtacgagagaaggagtgatcggaagccaagaaggcacatctccctgctccccggacggtaggcgaccaaacaatgatcgaagggcatcatactcggcaaagtatagtcccgttcccaacgtatctcggactaagtcaaaacaaacagcatatgagcctctgcagagggatcagcgtagaggaagcgcaaacagaatacatactgaaatgaggtccaaaccccgtgtacatacccgcccaaccacgattgctgacaatcgcttggacagactgcctagtggtcataggcttagggtcaataatacccatctcttgagatatcataacctatatcgatgtgaaaccgataagtatcgtcaatatcatgagaaatcattaatatctgatatagaggggagaacctctactgacctctagttgacgtcggacctaacgataaattgtaatctcatgttagttaacgccttgcgaatatgcatatacagacaggtctcgatgatatacttttattagctcaaaaggcgttgaacatattgatatggatgctcccgacgtgcaccccgagataaaactcgtcacccagatatctctcagcgagcttgtcgccagaatgtttttccgagctagctcgttcttggtgcccgtgtagatggagaatgaggttgtccctgttcgcaaaacacaatgataacagaattggagaaacgagtggtatagtaaagtgtaaaagagagactatgataagcgctccactgatgcccttttgacacgatctctcgcacagaaaatggagacgtgaaggtactcacggacgacggagatactcaacagaggtatcagcgcacctctccaaaagccgcgtataccttcctctcggaacacttctgttgccagctggtggattcgaggcgaagaccctctggtagcttgcatcctagattttaaagaatcaagctattttgagataccgccgtcagtcccgatcaagttcattggataagaaacaaacgatgagatacgatgatagtttttgattctctctcatctgtgaagtaaaacgagaggcaaacagaaggaaacacccacaggaaaccctaggaaggtagagcatagcgatccgactgtggctgaaatgaacgtcttgtgttctgatcaacgaacagtaaacccaaagatgaaaggttatttatcgggactgatggctgcaaagcgtttcaagtgcgtcgtagcaagctgtagaggtctaagatcactcacttagtgcttcatcccagaaagcattacccgtctgctgaaactcgtcgaatgtatcttctatggcccgaccttttccctttctgttcatgacgtgtgtgagaaaaaagggcaccggttttatgaaaaggcatcggatacacgaggccggaatcgaacacagatcacgactcactctgtcgatgtagccatctcaggtcaattagtttgactcaagatcttccaggatgcagaggttttcgatgcgaggagttataggttgatgatacagaagacagagctcggtagatatcagaaggagcgcgtgaatggtaaaagggatagagaattggttcttggaacgttcacactttttttttgtcttctccttgtttacaggcgcggaattcttgatcatattccgacaacgtcacagatcagaaaagcttcaaattaccgattggcgaagagcagccacgagcaaaccccctgtctagtctctgatacaatgcttcatagcaatcttagaaaacagacactataaacatctcaacttctgaccttatcttttgatatttcacatttcaggacgatagatataggtcaatattcattgattgggaagacaaaattgctaagtagagtagagtaggaagaaagctgaaaactgtaaagaaagaaatgatatcgaccatagaaggctgcaagtgaagaagagcattgactacgaagagaataataggaggaaacgactaatcctggagctgcctgaacttttcttggatgtcgttgtagaccttgtctagagctttcacaattgcctcctttccttgtgatggcgactgttgccgtcgttcgatcaggaaagtgttagacatcagctattggtcgacaacttcttgaacggtgaaggaaaatgttacgaatagagaaattcaatactaacctcgaacttcatctgactgagagcgtacataaggtctccggtctcgtccctgattcgagcgaacgtcatgtctccagagtcgatggccttctgggcggcatcgtagtaggtgacaaagtttcgaagcatagcagaggtcttgtagaaggggcagaatcgatcgtactcggagataccgttttgttgcaagaagtcatccttgagcagccgagcgacctctaaagtagccttatcgctttctccaagagcactctttccgacaagctgaacaatttcggccaagtcgtcctctttttgcaagatttccttgactcggttcctccactcaatgaacccaggctcggtggtctcgtaatgattttcaagaatcttaatgtactttgagtaggagaccgaccagttaacagacgggaaatgctttcgctgggcgagcttcctgtgaagatccaagaggggaacagatacagttgacgttcagcacccgttggcattttaaaagggtatctgagacaaacaaagacacgaataacaagactgacttatcaagaccccagaagacctggacgataccgagagtggccgaagtgacgggatccgagaaatctccaccagggggagaaacggcaccgacgatagatacagatccatctctgaccggacttccgagacagctgacctttccagctcgctcatagaaggaggctaacttggctccaaggtaggccgggtaaccagagtcagcaggcatctctgccaatcgaccagagatctctcgaagagcctcggcccatcgagaagtcgagtcagccatcatggcgacgttcttgccctgatctcggaagtattcagacaaagtgataccagtgtagatagaagcctctcgggcagcgacgggcatattggaggtgttggcaaccaaagtggttcgcttcatgataggctcctcacggccatctgcagtgttcatagtaagttcagggaactccataagaacctcagccatttcattccctcgctctgagtggtcaaaatcacaagtggttagaatttgaatccattgtttgttcgttttctctgatagcacaaatcgcacacgcttccactaacctccacatccaacgtaaacgatgatatcagagttggagaatttggaaagagcctgagaaatgacagctgtaccatgaaaagaatgcagtgattagcatgagtcaactatacacattttggaggaaaggacttactctttccacaaccgaaagctccaggaatagcggttgttcctccctgaacacacgggaacaaagcgtccaaaattcgttgtccggtcaacaacgggtagttggctgtcttcttctcggccacgggtcggggggctcggacgggccaaatttgagcaagggtgtgctgggtggtcttgccttggaactcggtctcaagaatcacatcctacaagcaagaaaaggcgcagaaagaagaattagcatacgttatatttacgcgcttttctatacgacgacgatacgtacgtcaacagtgtatgcacccttctcggcaattctagtaacggttcccatcgctcgggggttcaacatgatcttgtgatcatccaacaaagagttctcgtagacctttccgaagatatctcctccggtaatgtggtctccaaccttgaactgaggagtgtagtcccacttggccgtacgagaaagagcatcggtgtagataccacctatatgattacgagatttataacacatttttaatatttggagaagaaaagagtatgaccaaatgacttacgaggaatgtagatggattgagactgctcctgaatagccttcaaaggtcgctggataccactatgaggaagcaagacatactgtgaattagtctatcgttcaaattctctctacatctatgtggttgaatttactcgtaaatgttctccatcaaacctagtaaaacatgacttgattgaaagtaagtcatttggcttcaagagaaaggtatccatgtgaacgggtacgcaccaggtcctagctcaacactcaacggctttccggttcgcagaacgggatctccaacagtgacaccagatgtctcctcatacacctgaataatagccttatcggcatcaattcgaatgacctctaatatgaggacccacaaggaaacgtattgaagattcagcctcactccaaatttgagatgaaaggctatgaagaaagccttttctttaaagatccggtttcggaaacgtacctccgacaagctcatcgtgtcctactcggacctgtttgggtagagtgaagagattggagtgttgtttacataaaccagagattagagaaagtaactatagaataaagagaacgtgtggtaggcacaactcacaagctcgtacattgccgctcccaccatgttctcagcgatgacgacaggaccagagacaccaaacaccgacccgaatcgagattctctatcttcatctcggatctatcatttttgggagaaaagatagtcgtacatccgagaacgaatggaacaggttgagaaaatggatcaggattatatggaagaggaggagaggagtgattaggggttaaccgaaagagataaaaggcatcattcactttaagttatctacacgttccaatcagcaaacaaggacttgaaaaagcacggacctttggcagatccttctttgcgttttgcattgccccagcctgtggaagaccatcagaagaagatgcaagacaagggataaagcagcccattcgaaccgatgagatgaaatgaaatgacgttagggacagattcggacgatatcaccgacacatatagggatgagggaaatctatcagatgggctgaatcattctatcttcagattcactcaaactcgaacacgtaccatgatagacttgatcgaaaaggttgtaagtagaagatggaaaaggaggtaggttgaggtggtagatggttttctgagaggacgaagaaagacatagatcgagcgtatcagaaagtttgtaaccttgtaaccagtgcccgttaacaatcatcggctcggctgttaacttgttttcaattaaaaagaaacatatataagataaagaatgcagatggtattgaacaagtacagatagaaataagagggatcagagtggaatattggcttgatcaacagttctataccaagtggatgtagagaacaacagtagcttagattaatcttgatagaaaacactacagattcaaatatttgaggtccaaaagcaaagagagaagagatccaacgtagttcctattgttaggcttatcgtgtaccggcaggtttaggcttgtcgagatatgcctgagcctcatctttgtcacggaacatcttgtacatggcatcagaacaagacccaatagcctctagacactcgggcctgaacgcgggttttgaggaatgtttgaaggattatcaaggacaagtgaattgagaaccaatgtcaaaggttgtctcttatagaccaacaggtaagtgaaaggatcaagacgaaccatgacccgtagattccgacatgttcaccgtgccttacagcatagtatttttgagccgcatgtttcattcctgctgtcgcagcttgccctcgttgcaaagcggcgcgttgttgcttggtgagaataatcccgtcttccatattaggaggaggtgtaggattgggcatctcaaaagagccaatttcgttctgaggaaagggaaacccgaggaaagcttgagcttcctcgatagtgttgaatttttggtaccaggctgtaggaaaggctgcggttgactttttacattgatccctgggtgtcagaaatgctcgaatcagtcaaacaattcatcgctagcgcccagaacagactgaaagaacagaccaagaagtgaatattcctgtctttcggccatgtcgaacggcgtagaaggcatccatctgtcctgtgctgcagacatcaaaatcagattagtggtcgcacagacgtagctttcgaaaaatatggctattctccatatatgtgtatgtatagatgagatagggcatacctcctaaaaccccgacaggagaacggatgaagagatctaacttgcaacaaagaggtagctcggttgagcggtgccaagatgctgattgatcgataccacacgttgaaaacccaagaaaccaaaagaacgacgcgtcaatagaacaagcctagatagaacgtattcaaacacaaggatcagaccttttagtgatgagcgtcatcagtgacgagctgaagattggtttgaagtgataagagaaattataggacgtgcttgagaatgatcgtttggtctcgtttaagcgtatggcaagcgagtgaatatgtttatcgttagggttatcatcagtcacgaaaatcgagacgagctacttgcatcttcctttcagtctacgcaatcagctatagagattagcaaaggaaagtctgagtcatttgcgcatcacggatactgtccaaccgaacgttggagcagctgaaattcttgaggcgcacgttcgcgtcgaaaggatttctcgtcagtcaaatcaccaatattagacagtatcggcttgggatcactgggtttgcacatctttagacaagaagaacaactgagagaaaacccattgaacaagttgtctgttttcactcaagatttgaacagagcaaaggatgacgtgaagtgtatgcttccagactcaagttgtttggtctcgacatggcatttgaagaaatcacggacaactgttgatgagagttctgttgtatagaattttcttttcgaaacacaaggtatatgaagcgacatccatcacggactagagtatatcactgtgtatacatgcattctattgctgatatgacccagagctatcttctaacctagggtcatcaacaattgcgggtaaagatagttagagaagcacattttggcgagggctgcgcggagagatctgctctggggtgatcggagaactcaccatcggatctttgagagttgcaacccattccttcgaaacctcaacatagagagcaacccttttccctccctctacagatacacatatacaaacacactctctttcgttctctctgtgacatatcggccatcaacgtcttctgaggtcagtttattcagatagacacctgatcaaaaccttgctgtcggctctcgtatccgtactcggtgagttgtagatttggagttcttgatagtaaattgtcgttcctcatcacattcaatcccgggctttttacacattcatagtatacgctctgcatctcattccttttcttggacctggaacaaacactctctcgctctttatctgtatcctctccttggtcctttcttttctatctttgtttcttccgctccttccactcttaggatcctaaacgacagggaaggtctttgccgatcgaatcactaatgccatcggaactaccctcggcttctttcacgaaaacatcccagtgtgtgcacccaactcccaataagttctctcctcttaatcttcttcaattcgagaccgatcccgggtcctctcactctccaggtcctccaccatcgcctaggaggcatcatggtggaggagtcctactctcaagggtgagagctcagaccgcaggattgaaaggtacgagggggctcgcaagctttacgccttcttctgactacaccggaacggatgatagtaggaaggagagtgactcggacgatgatagcgaaatagagaataggtttggaatgagcaggagtgtgggtaatctgacatctctggatggaatgcgtagtgcggataagaggttagttggagaagagcatctattccaacgtgcgaacaacaggtcagtctaccataattcaaccggtttcatctacagcccagacattatgatgtactcatggctctgtgcaaacggtgtggacgtcgaaaattcttcacagtgctcggttctactaccaagggtctcatccagacactcagcagcagtcccaaagcagtagtcataccaataacatttcctccactgattccatcaacaatgggaatatcatcaatcgcacaatcatttcttctccagaacaaagccgtccatccctttccacgtcatcctatacccagctgctacccccgccaaagcttgatcagaatcatcccgcgctctcgcctcggctagtcgtacttacacctactactcaagaatggaaccagatacagagtggacatcatcttccactcagccaacggccttctctctcttccttgaggcaaacttctcgacaaggtcgagattcaatccagagcatcaatgctgaggatgagagaggacctaggtctgatgacgaggagaatgaaggaggacttcgatggaatccccttcggaatcggcagacaggctccgttccgtatcatccgcgctcacggacattatctcgaccttcaactcgctgtcatacccgcgcccctactctttccagtcgatcatcgttctctcaaacgacttacgaacatggagtccagattcctctcaccagaacgatcacagcagaccatcttgattctgaagtcgattctttggatctatccacacagttctcacctcctggtcccgatagtgaccggttgtcgaggacgtttgatgcctcagatgagggtgctgctcattctatctcattattcggagacgaatggttccctcactaccgagtagatgataaatggcgacagaattcgaaaggagttctgttggttcggtcggagaatgggcaggatgaccagagtatggatagtggatccgatcaggaggatgttcgttctgagaacagtgaagactatggtctttgtgcatttgagatgaagaaatctcaattggtttcaaccgaatcaagctggggaattactcaaataggaaactttggattcggaacttcgaacggactccaacaggtcgacaaaacggtctcgtctccaaaaacggagctcaatcaagatctcggcggagacgggttccgacaatttggaaggggcttggatctgaatgagccttctgacaatgatgtcgattttgaggttgacggggagagtcgttctccatccggtcaaattccgattctcagccctagagacaacctttctatgagccctcaacaactacgcatttctcctgcctcaccccctggaatcctctcatctcattcttccctcacgcgctcctggtctaactcgccttcaacaggtatgatatctcctcgtttgcctgcgagtcggatcacgtcccgaaagagctctgccagtagcgctatttctcatgtccagacacactctccccatatggcggcgagtacgagctctcgcgggtcgcctcctgtaccaaccacttatacatccccaccactatcgcctcgagtatctcgtcggcggcaatcgcaaaaatcaactcggctttcagccgttgctggccgatctcttccttcaccttttggcaatcatttgagtggtgaactttcggccttttctccgttcccgtcagctggactcaactcgatgaatgggggagggcctagtacacctggctatccgttcccttcaatgtatagggagaaagaatctagcggtctaaaggttccaccttatctcagagacactgacagagtagagtcaacgaacagtgtaagtgcttggtttcctgacaaacgaagctttttgataacgtgaaattaaaagggttggttctccctccttcttacttgcggatgagaatctttcaggttctttccctggctccttcgataggaccaccagactcaccgacagggacacctataagctccggcaaatcaattgatgactagtaagcaatgtatctcgttcttataaaattcaatagagctgatagagtatttttgaaccggcaatacagtgtgattcttactgaggctggtcgaggtgcttagtaagtcttctctacttcaactagcccattatacctcttggcattctgctcttgataccgtttcttttgtactcttcttcatctactcagtggccttgttaagagagcaaaacgaaagggacctgatggcgaagccgaaggagaggaggtcattattaaaatgattatcaaggtaaatacatatttgaggtcatcacagggcgctcataactaaacacaacaatttacttgcgttggtgtgcttccacagcaacgtattcttgcagattcttggaaaaggtacatatctcgtattgcgtcctatctgcatctaagccgggtgactgaccatatgagatctccataggcatcgtttgttgggccctattccgatcgagcttcatatcatggatcaaatcagcaagtttcattatgctcctccgccccaaccgcgtccctgggaccccagccgtccacatgccgatactcagaatacagaggagggtttatccgatttcgatggtttgtctgaagagaacacgccgacaattggacaaccagagacccataaaccatcgaaatctcccaatgaaaaggtgccttatattctgggccaccccaatggcgagtcttttcttctttgctgacatgattgttcttcaatatcatatgccttaatgatgctgaagagttccttcgtgtcctttttgacttttgatcagtttgcaccattatcgacttcttcgaggatcgagaatactactttattgtcatgcctcgatttggtataggtcaagatttgttcgatcgagtcgaaggcgagcctgatggacttcctgccttcgaggttcgctctctcttaggtcaaatctgcgatggaatagccttccttcactaccagggcattgtccatcgagatatcaaagacgagaacgtgattctggacggtctcggtcatgctcagcttatcgactttggttcttcggcccactggaagccaggtagaatgtgggacactttctccggaacactagactacgcaagtccggagatccttcgaggagaaaagtacagcggaaaagaacaagacgtatgggccttgggggttgtagcgtacgtcctgcttgtgggcgagactccatttgtcagttccgaggaggccatggttgggcttcaagtcggttccaaggtggagtcttgcttgcgtgagcgatgttttggaggcaaggatggcggagagactggaaaagagcctggcggaggaggtgctttgggagacgcgatggattgggtggagagagcttgcgaagtagatttgaaagatcgaccaacagtacgtgttttatttcgctcctaagaatacatcccgatcagatgcagccactgatactcatcatcttctgccattctaccaggctgctcagctgctggagcatcgtttcctcaaaggcaacggaggctggaccggattcagagggtttgaatcatattgagagaccgaatgttatgaatactatacactctttccctagcgcttcgcactctatcagcatttgtggtgtaatgtaatagagttcgtctggcctgtacagttgcaatctgcttcttttgcctctctctcattctgtaatgctttgttctctcgacctagctctgaaatagctgatacttctcatgaatagttctaaagtatgtaccggtgcgctaacacgtcgaaactgacaggctctggacctgtctcgacgctcggcttatgttgatacacggccaggaaaagtaattgacatgattgtcccttgcgtctagcttttgggtgatttgccactcgttccttaaatccagttgggttcttttcattcgacaggcaacaggattcagctttcaccgacacaccattcctttttcgacatgtcaaatcagaaaccagaacccaatctcttgacattctggaacctcgtctcatgttctgtctgtcggcggtcgatctcggatataggcccgactctatccttgtggataacgtcttgtggacacatcctgtgcgacgatcatcgaggtgggctgtcgcttcgacattgatttgatttgacgaagttccaaccataagtatgttgttagtctcatccttgatatattctgtagaccctaggaagcgatgcgcagaatgtcagagcgagaacattcttcttcaacctcttccatcggcagataaagtacattctttttgcacttggataagacagcatgctttccttcatttcttcaatcttatcactaatatcgatttgtcttaaacctcgcaaagcctccggatcaattcgctgacttcttaggttccattcccactcagactgtgatggaagcagtcgaggttcgaatatcttaaatcattgttctgagcttatcatcaccatatctgaccgtaaagtattattgttggagctagtttcagcagagatatcttattgaccttgtcagctactttaaacggaagactataagtcaaaaggtgcgcatatagccaaccgaactcctctatatgatagcacactcacttcatgaccggtattacttacgctacctgacagaatgttctatcggatgtcaagactcgtctagccgctggcatggagtcactcgctcgaaatgcacgacttgagcaagaaatcctcgatctgagagcagaaaaccgagctttgctagctcgactcgctcatcattcggaacatggcaacccaagagaatctatgggaccacctagacgaccatcttcgacgtatgtaagtgttcacagcagtgacgagagtcggaaacgaagaagagaaggtccaagtagcgagagcggtaatacgtaaggcatcacggcttcttgattgaaccgtcctacaacgctacggaaactctgaccaaacgtgattgctttggctgcagtgtaccttctccccatccttaccatcaacatatggttccaccccgactgacaatacctccgagtcatcgacctggctcatccatacctgtaatggatacatctcaagtccgtctcagtggaagatcgagtagaccagatcgtggagaaggcgccctagccatagccccggaacgcatacagcgatcaaaaagcacgttggggtatgttctttgatgtctttgagggcttgtccaatgagatgaccaatctaagctgatgtgtcttcatgcgctgttgatccacatacctctcttcctgaatcaagcaagttgccctatgatccccgttcgagtcgacagttgacagccacacctttatcagatcgttctacaccgaatcaccggtatatgcctagaacgacacctcagccgattcacccagatatctcaaacacaactcaatacccggggagaccatcgagttctgcaagttaccgctctcagggatctaactcgacgttgatacgtcccatgccgttaccgtctcaaacaaggccaatgcctcgggttttacataccacgaggccacagtgtacgcgccatcttgttcttgtcgctgtcagataatgaagttaagcaacagtagctgatcaaccaaagttctactatattctgttgtgcggacggcctaatcgacagcctcagcacccatacggcctttccctgatccaatcatccgtgcctcttctgtaaacagttccagaagtcctttttacactcaacctccatccacaccgagatcgtggtcatctgttcacgacaaataactttattaactcaacacaaggcaatacgactcatctgttgatgaccatatgtcaataaacctctaattaacaccctttctggctcagagtgttgtctgtatagacatgtatatataattatgaatttaaggaagaggttggactgatggaacaaggagctgagattcaaaaacatagtcacgactatgatgaggcatcccccttacaaaagcctaatcggtaacactcctgcgtgaactgtttctccagaataaccttatcccaacctttctccttcatccgcctcatagcgacaagctcccaatcaattgttaaaaatttcaaaatcctctgatcgattgcgctctctgtcatatccggcggaatgtatcgatctatgggtgtcgatgtcgctttttggaccacagttatgaaatcgtcgatcgaggcatctcgattaatggagtatacgtacggggggccgatagaagctgccggaccgtgttggatcttttcgaaatcatatagatcccagccttcgggagtaggggacgggcctgaataaggaaggattacaggaactctgaaagcagaaaggagggttgaaagttattgtacatcagccatagagatcgagtgacagtttcattcgaagggaggaaacaatagctgagcttacccttgacagctagatgtacgagttaaaggaagagatagaaagatgtaagacttaatgccaagacgacggatatcgtatatttgaagactctacttacagtgcgttgaatggcgagggtgaaatcggtgggcttccgattcccactaaagctttcacacttcctaacagtttctcatactcaacccttcccatcctcgacactccttcgattccacccggcaaatcaacgtcgcccccgacttcagctgtcttgtacgctccagagatgatgttaagcccggtagattctctggtggtcgcataccaggatagaggccaagcggctggtagataaaaatattttgtcttcttggccagaagaagtattgcattctgacggtcggcgtgaggaacgacaagagtgtcggtgcaattttgaatattatatccactttagagatgacaagatgttcagaaaagagaagatggtcataagccgactcattctttgcctccatcaatattaaatgaacaaggagaaagagcacacatatatgtgatgtttccaggcatcctgtaaggacttaatgtccattctgggcctaacggattccaactccacaccttatttgaaggaacggctgcttccccataatccgtatgaacgagtcttggagggtgtccccaaaaggtcggagtgaaaagcttgtaaggcggtctaacaccattgtcccacgtacacgccaaaggttagttccagaaaacacaagagtgttggaatcaagtataaggctctgaagggggtgtcgatctactaaaaggagcttaactcacattccagagggatgagagtccgattgaatacagcgagagtttgagaaacattccagcagtaatccttcctcggaccaaacgtgggttctacagtaacgagagaaaaagagaacatggggaaaagcgaaagatagagcaaatggttctatgagatcaatatcggtcacagatcgaggttgctcgagaagtagagtgaatcggagcaacctacatcgaatgtgaaaacatatcgtatatgctagccaggttctccggctgagaagcaataaagaagaacccaagcctttgaaaagatctaatctagaagaagaaccacacaagaatatagttgaaggcgtatagtggaagagaatcgaaggttagatcatcagtctcataaatcagaagaatgttggtatgttctactaacaacagagcgcatccaaaccgcttcaccagagttctgacctaacctctcgagattgtttacccgacagagaacacaacatactcagtagagtacttttacatggctgcatacatatcttaaattgaagagaggatctatgttctcacagattgataactctacatcactgaagttttgaccgaaacagacgaacaattagaatgataagaatatcaatcgagatactgttaatttctcgagcaactaaagaggcatctgttttatggacaagagtagagagagtatgggcagcttactcagttttttctaataacgcgcacgctagatacttgtatctatacccaaattggtttcaccgaaagatagaaataggcaagaaagcgcgcacggtcactcaaaggtcagcactcgtcgtatgcataggtctggtttgtccggaactccagaaagaacttctaatcactcacccaatcaacacaagtttcaatccatgcccttgtatcccacaaaccccaccagtcgctccatccatcaaacactttctgactccatacaactgggccttattgacgatccctgcccaaccaataccctcaaacccatctgttgctcgttcgacctcctcgagctggtttagacgacgatttctttgctgatcaaattgatccttgtctagcggttggatcgtcgggtatgtctcgaaccgaccctcttcctcattaccatcatcctcactaacatcgttccagcttggggttggtacagtatatgtcgtggacgctgacggcgagggcaaagacgacgatggcactgtctttccggttgtcaccgaaggaaatgataacggatccagaatgacatttcctggtgtactaaacgcataaggtatcgaggggtagaccagtatgcaaaatgtgccgagaaagacgagaaagaagagtaatcgagcaagacgcgtccgaggcaagaaccggaagactgtcgatccttttgacttaggagggggattagagttagcagggttcgggacgagtgagaagtcgtgacgggcagtcatcctgtatgttcctcggcggaacaggaggtctttccagttatcgtttagtgctgatctttatgcttaggaggtggttgagcatagatgtgcgtatggattcaaacgaatgaggtttgggagtgagagtcggtcccgatgggtcacgtgaaaagagataagaaatcgattgactgtctaatctctccgttcggtgctcagcgggcgatcaataatctaactttttatgtacatcaattttcttttcctttttttataatatagaaaaggagagagcaaacagagggcacatgaaacatgggcacttcacgtgcagtacgccactcatatatagggaaaattgaagaggaagtaaaagatatgtaaaaacaaaagaagacgtctcatggtctaggagcaggtgcgcgctctcggtatctgatcatgtttggtcttagttggtctagtcgagtcactcctagcaggcgcatactcgtggcaatctccgcctccatgactagtggcccaaaaaatacccatagagattcatatcaggcattgaagttcacctcttgaaggacaacgtgattagaagtaaaacccactttctatgactttggacaccccttcttgaccgtatgttccgttaccatagaggaacggtctacccagcccgacagccttagcccctaggcaaagagctggtacaaggaatcaaagacggatgagcctacaaagacatgttgatacttcgaggtttgtcaagatatatcacctttcagcacatccgtcccccgtttgatacctccgtcaacataaacgtccatcttgttaaacagttctggttttgtctgtctgagttcgtacaaaacatctatcggagctggggagctgatcagaagttcagaggaagagccatgggtcatgaggtttgggcgaacagatttctcaacggacatgagaacgagacgtacaaatcgagcgaccgtcctccatgattactcaagataacaccctgaacaccatgcgatgctgcagtctccacatcatctacagactgtatacccttaataataagtggtagtttggttagactctaaaaggaggagagaggaagaaagaatgggatttaggtagcgagggaggatatgatcagcaacgactatagagatctaatcgggtcagaaacggagatgcgaacgctacatacctggagccaggtcacgtcgtcccatgagaggtttgcgtctgcaagaaatggttcccggaagtcagagatcacaagttcatgggaagagatgtgaaaaatgctcgaaccttggtagccgctaatagctgcgaggcgcgaacaagctctagtcagtcactgctctacgaacatatatcagagaatatgaggcagaaacatgagtgaaagctgaccatgggcaactcctttcgagttggatttggcgccatctccgttcgatggctaaatggaggacgggaggatgtaggatatgtggtagcgatggatgttagttgtccacaacgtacggatacttatacgatatagaactctggcaagagaggacaaaccgatctctgagtgggcttagtccttctgtccaattctctgtttcctggtaccggcgagtctacaagaaatatttcggtggaaatacaaaagtgggcaagaaaaagtgagccaatattaggaacaagagatagatgctgactaggacgaaccgacggtgaaaatgattccatcaaagttcatcgcttcgacctttttaacgagctctttgctcttctctcgatcagtgttgagatatatctgaaatagcattggttggccgtcctgcttgacgtccatcatctcttctagcgaacatgatgcgttgatagaaacctaaccagggccaagaacagaagtagcagaaagaaaaaggaaagagaaaagacaggtcagaaagcgatgatgcactgcagaactagaattaatgagagaagacgattgcgcactccatggacaattccgccttcaccagcagctctgaccaaatttcgttcaccctctggatggccgagtttggccatagcagccggtgagatataaaccggaagtcgagcctttattttacctccaagtagagatgtcgacatgtcgacatcaaccacaggaacgagtattcggggattgaaccagtaatgcgcgtatgcataggcgttttctcttctggctgaaggatgagaaaaggaagatgtgtcagcgatcggaattggaggatgaaggaaaaatagagagtgatagggaaaaccttacaatattcatcatctccagcgctctaatgacacacagaaaggagtcaaaccggtcagaccttccgagagagaaggggtcatccaacagcgaacatgaaacatacatggtagtaagcccaagcggttcggccgagaaccttccttgcttcttgctacatacatcaagacagagaaggaccggattagtcataattgagatattgattggaaatgcatacaagatactcacctcaatatcttctaaattgatgatgtcttctataggcttcatttcttctcgcgccttcttcactcggatctcatcttctgatagtttttttggcgcgggaagatctttgaaagtagtcgggtcgacaactccgaccagtttctcgggctctaacgtattctctatcatgcccttcggatggatctttgtgaacagtttactgacgttcaggacgagacaaagaagcggacgatatgagcaaagtttgaagagtttatgggagaagagtaagcagaactccatgacctacgttgcatccttgcctccctgtggtggttttcggaatagcgcaagcataagtcgcaaaaagaaaagagaaacaatcagatagattgaacagaaaaacacaaacgtctagaggcgcgctcacatgggcgagtaacacatgggctccacctggatgcatgtcatcgttcatgaactcggtaaaatcccagacgttcttctgtccagtagaaggatcatcgatcatgatccataggctgtctttggtattgtgtttcatgacttccgaggcggcaatcagcttgcgtttgccaaactgcaccccttccggtgcgaccaaagaatcgagtttgattgaaccggttggtagaagaaagtaggctgccaatgtgagagcagaggccgatgccagagctctcttccagcgggatccatcgttgaaagatggcctgggtacagatctaacgaaggatgacgacgatgctggagaggcgaacgagcgagtggaaagaataggcggaggtcgtctctcgagaactaaaccgacagctgtttggctaggtagccttttgacggcagagagcttgacaagtcgaaggcaatgcatattggagagtatggtacgtgatgaatctgaatggtcaagtggtctactcttaaaaacacatgcttcctctgattttctcttcacctatttaatcgggaacacacaggaataagtcttctgtataattcggaagttggcgattcgcccggaacggacgggccggtcaaccggttggccgtaaccatcaggctgagcgtgtaaggctcggttgttaagaaggtaaccaagtgtaatcacttggttcgcggggtgacacttaggctctggcgattaatatatctgaagcagaccaaactattaacaatatactttggataagaggtttcaacaagaatctcagcttgaggaaaactcttatccaaatgcgcgaggggtcctgatataaaacggggacgccctcgctcatttggtctgccactaaagatatacatatgacgagcctagagaggctcgagatcacgagaactaaaaagatgaagcatgaaccatgcaaactagagcatgatggaaaatgggcgaagaggcataagggatgaagggaacgaatagcctgtaggggtagcccacgtaagagaacacgtgatacttaacccgtattcctgacagagcggctgtaaccaaaagcctccgatcacgcgatggcagaaaggaagacagtctgaaagttcaggaggttgtttcctagagaacacatagtcaaacgtagacatctgggttgcaagccgagttggtttacaccacgattgacatgagctgagtaccgatttctagccagaacaatacgggatgaaacttggtcggagtttggcaaaccgatggctggtcggctataaaacaacgaccaacagctgctctacgaacttttcagattcgttcattcctgacgaaagctaagaaccatggatgcgaaacattctcaatacctcgcgccgttgccatattgtttgaaagaaacacgggagaggtagatattgactaacgaaagaagacgcctgttcaactgggtgcatgcctgctgtgagaccttttgaacccgtggttgcggccagaccaccggtggattacaagtgacccgggtcaacagaccggatcgatcattttccttcttgccgcctttggtcgtttgagtccgtccccatcgtctttgccatccttgtcttctttggcatcgttgagttcatccttggttcggcacagactgggtatcccgaacgagcacatacatacgcacgcatatacgctggatatatacagatatccatccgcacgatatcctgtatatatctttggaatcgtttcaacttcgcttacgctgaaacctccatatatcgacacatccgtttctgttagaccagcagtcccccatctgcacatcttgttcatttttaaccatgtcttcaactcctcctccagcatccgtcaagaaagtaaagagaaaggccaaagagctctcggccggtcctatcggagaaacgtcaaaccagtcagacgcacctcctacgacagttaaacgtaatagagtaaggtttacggtctgccttcatggtcctagatttgtctgatctcgtttattgatcatcagttttactcgccgttcggcttgattttttctcgttatcattcttttgtcctctttctctcaggttcattttagttgtgttgagtgcaatcgaaggaagcaaaaggtgagcactcaatgagttctcaaaagaatctgtgccatatcctcgtatgcccattgggtcgtattcggcccaatcgggattagtcttcccaagtttaatggttcaaaccgtctggccgtcttggtctccttcgatcgctctttactgacactattcatacacacacgcacacatatttcattttcattggggatgtccggagaaaacagtgtggtacgtgtgctccatttctaaccgacagattcacaacgcaaggcctggccgcgtgtagagcatctgcctcagacagtctgtccggatttccactcacgctcgacttgccttattcttttgatgtgactgtatgggtatttggactaccacagatcgagaatcgccctgtggacattgcatcacccgaaaggttcctcatctatgccggccgttcatcaatggggtacgtccgtcataaatctatgtctcagttttaaactctgatctgcccagttaatcgtgtcttcgtcacctcgcgtttaatcgtctactttgtcgacatagatcgaggaccctaatgagcaagtccctagaccatcgcgcttcatagtctagatgttgcgtcattctggagtcttgtttaaaaaaaatccttctctgatcatccctttttgcttcctcgataaactagatacgacgcgtccatccgaggtcgtttagaccgaatcgaatcacttcttcaaaacctcgtgcataccaacacctccgattccaacttcctctcaaattctggtcattccgatggggctcgtcaagatgattctgcgtccccagccgactccattagaggtatcaccccgtccgatgcaggcttgacatccggaacaggagacctcaacgtgaccggtcaagccaggttcaagggagcaggaggcacagcggtcatggcagaagaagaacacgaggacaaccatgttggcacgatgtccggaggtagattctatggaccaagcgcgatgagctcggtctccagttcacgaatgtccaagatcttgcaaaacgtgagtccctctttctccctcaacttcttgtggagatagccaggtgtaattcaagtcaagatctctgacgatagcctggtttcctccaatctctgacaaggacagtttccgacgacgtccatcggagccgccgcgaccgttctcgctcatgaatcagacagtcatcatcaccattcgcatcatcactcaaatagcacaagcagcgcgaattcttataacccgttcgaaggacctttgtcggatggattggaaggcatgttggaaacattggacgagagtggaatcggattggacaatatcgtttcccttttcgagtgagttcctgtgcagacgcgaccaaaagctgacgatgtattggaggagcgtcgaataggatcagcgagctgatgttattcccttctcgtgtgctacattgccatatgcctattggggattcagaaaacttccggagagggatttgagaaacagtcttgtggaactgtattggcgagagattgagtacgttcaggccttgaccggcgcgtctagatttctctttcatctgatacccgtctctctttgtcctcgaatagttggacacgatataaaatttttcaagactcgtttcagacacgttatatctcctttttctcccacgaaacctcgtcaacatattaccacccgccagaaaaggggtatccctataggaacctagatgttggtggcttaaaatggttgcccttgttgttcatcatggtcagtcaagccgttgaatgacgcgtcttacctctcgaattgaagagaatggcgcgcttttcttgcatatactcactctatcggttttctaaaatcagatggcgattgcgactttgactgctccactgagcttgtaagtcctgaaaacatgaatagagcctacctgagcttatcgtggtgttgaacggcgaactgactgccggagaaatcgtgcatagatttggtgacgaagataccaggcgaaaatggagcagaagtctctatggatctgccagtttgtccctaccttgcttctttgtctttatcgttcttgacaagaagtcattctaactcttctgatacttggcgctcaacagggaaagccatgaacatcgcgcaggtccgtttatcctattcttcttcctcttagaagggtctatccgagtaacgagtctctgaaagtcatatttttctcttttgctccacattcctcaggcacttcaacgggacaatcttgatattgtcatggctggactattgattgctcgttatctgtttgtggtttcgcgacctgtctcgaccatctgatgtgcgcgctcattctgtcactcttctttcactttcatcttttcaaccctatagacttcttgttcgacgggcagcagaaggtttcactccactcaccaccgccctccagctcggtctgtacagagatggaactgttctaggaatcaaagataaacgcgagatcgagatccgacgtaggttgtgggcgtacagttaccatcacgaccggtcagctccaacctcctatttttcttggatccagatgaaggatctgagtttggaacttatatctgacttcatgttttcctttgcctgtttacgggatggaccaatggattcttagaacggcctctttgctcgttggaagaccaactttgatctcggactcatggtgtgactgtaaaccaccgtaagatcgtcttttgacatctttcaattggcgcgatctctccaatagctaaaccaacgggtcaaacactatgcttttttttctcgaacagggcgaacctggacgattatgatctcttaggagacttccccgaggaaggccgacctctgtcccaaccaacagtcatgacccatgttgttctcaggcattcattggcgtctatcatgggcaggatcagtgataagagtcagtcggccttcgtcatgctttcttttttcctgatcgacctgaaaactgattgggttatctcttcgatcggtttctttaccttggggaacatgggtctatcaaatctttctcggacaaaataaaaaagccttctcgctaaaatccccatcgtattctactgtcgtcgagcttgacgcagagctgatcgaatggaaacataatcttccttcgtaggtcttcttcgacttctcggcttaatcggatttgttcggatcttcggctcaatccactctctttttcctcttctttctcctcttcggcttcctgcactatgacgagtagttacttcaagttagagaatcccgatcgatcaatggattctaaataccattacttggcgtttcaccgacagatgttggccagtgaagtgagtgttttgtggctatgtcgtcctcgcgcgcatccgtgtgacgtttgtcttttggctgatgcaaacacccttcacggactatagttctattatactaggtacgtcttctcttgtcagatctctctgttcttatgaatgttatgtttaccagcaatcttttcttcttgaacactcatgcagaattacatgtaagtcatcttaaactctgtgggcttcttccgggacagtagaggaacgatctgaactgatgtcttcgctggacaactatagtacatcgaccatacattctaaggaaacgggactcatctcagtatgagtatagtcgaaaggcggctatcgaggctgctcgagcagatttgattggtcgaagagactttcagttgaacaaaccttctcatctaggcaaacttccggtaggcgcatattgggtattgaattcatacagtatgtcgttcttccctctttctgtttatattggtgtgctcttatggatagcaagagctgagcatagatcggttgtttgatgtaatcttgatagttatcattggaagtgagtttctcatcgaacgcgtctctcttgtcatgctttctagcaacataacactttttttccgttcgttcctctgtgctgacatcttctgtttgtttggtagttgctatcttgttagaacccaccggttctcaagcagacgaacttcgaaatctgttgaatgttgtgacaggtcgagcgccggaccaagatggaagagtatccattactaccgtccgagagctagcggttgtcgaacttttcagtcaaaaggagaaaggattcgactcgaggccgccgtcgcctacgtcttcctcttctacacatccaaacaatggcaacgggagtaacggttatctccagcttcttccaggcggatcgtcaaatcagtacccaaagtctcagccaaactggtcgacgagtcgagcagctgtaccggaaccatcactctggggtcgacctgatcctgtggatgaactatgtaagtgcatgtttcgcctcgtctctttcttttaggcctctggcagagtttctgatagctctcccaacggctacgttttggaaacctcctcaacttagtgatctcataccataggtcaaaagaagagccaacggctaatgagagacaacactctggtttgagctcgtctccacgtaggagtgcaccaggagattcagcatggtccgcgcgagcagtcggttcgtcatagctccatcttctattccatcctgtttatcttttctaatatttctgtgtttctttctatcggtccttctggtacaataagggatgggcgaccacactgttcttcggccgttcgctgacgaacagccttctgttcatagatcgttttcgcaacaaccctcgcctctgcaaaacacgtctcctatacacagcacctctcctgtgcacgatccttcatctctgttgcacccatcaacaggtgtttatcggtaccctccttcttcctccatcagggacaaccaaccgaacccaaagttgttcaacaccgaccctgacttcctgtcaccgtggacgcatggcttccaggcattttctggcgcgaccggcacaaggacaggaagcgatgatggtgggggattcagtgatctactgggtgatgagaaggaggttcgtttattactttttatttccgttctcctttttttttcctcatcgtatatgttggcataggatttcgtctgatctcgagaatctttctttcccttcctctctgtctatctctcctcttggatgatactcacaggtcgcgttcctcaaccaactgatctctgctataagttccggagacggtccatccctttgaaccacatccttgacattcacccgttcggtttcgatcgctgcctctaacatcattccttccctcgtttccttttcgattgattggtacgtgaaccttactttctttgtataattactaccatatctacatagtttattcctttctcttcgtacatatgtacaaatatgattatcggaatgatgcagacgaacagggaaaagcgtggctgagcgcggtttatgaactgattgggttttagaagaggcggtaagggctaaggcatgccctctgtagccgattttcgttatgtactgtcttactgcccggatctttcttctctacgtgattcacttagtctaattggggtatctaaactggcacactcgactttcgtcttttgttctttgctgactggatttgtctgaacaggatggacagggaacatagtacgacaacgaaaagcattgaatcctcagaaaggaataatttactacaaaacatagagaacagagaaaggcggggaatttagtcacgaagtttgaagatgatcggagatgacgaaagggcaaaaagaaaaccaaccttgacgggaacgtatcggtgagcgttggtggcaccggaaccagctcgtccgtgtcggacgggcttgtatgtcatggagaactctccaaggtagtgtccggtcatctcaggcttgatctcaacggtgttgaagacctttccgttgtagataccaacgacggaaccgatcatctcggggacgacgatcatgtctcggaggtgggtcttgacgatagcgggcttctcgttaagagggcactccttcttggcctttcggagcttcttgatgagacccataggtcgtcgcttgagtcctcgctggaaccgtcttcgggctcgagcgtggacaagctgtgggaattgaagacacaagaaaggaaggagctcggtcagcacgaggtattgcaaagcgagtaaaagtttgtatgaaatgaaacggaaacgtacctccatgaactagtaatttggcaaagaccaaaaggcagcaagtgacaagtcaatactatgtcccgtaagccagccatatgtggtttctctatgtacacgtctacacgtgtatgtatcaattttcaagtctattcatatctcaaacacccacctgctcgttggagagatccaaaagctgctcaaggtcgacacctcggtaagagaacttcttgaaagatctcttggacttaagggcagcagcggtggcagcgtcggtgatttcgttgtcagccatcttgaggatctggagaagaggacggtcgggttgattgtgattcagagtggaaacccagacgtagtttttcaagaaaagacagtcaaacgaaagcgtatgatcgagcacgacagaacgcagcacacaaagtaagaaatcaaacagaaagaaacatcataagctcggtatttcttctaaaactcctcaaagaagtgtatgctatccatcccaaccagaaaacgcgcaaacttaccggacttgtcgagtgtctggaaagagaacacgccgaccccagacgcacgacgctgtctttgtcggtggcacgcacgaggggacggtgcaaaagtcatacggtaaaaaagggaaaagtcaggcgtcgcctcgccactcacgtgacccagccagaactcggggattctctcgtcggggggacactgtcgaattctctcgtctagccgtaggatccttccgtctttgaacctccaacctcgtgagtgtctttatttctaggggtcccgttgcccgtggacaggccatggagtcaaggacacagattgctcacgacttgttgtcgattttgatggaagggcatcaagcactagtcagcctcggcttaaatcgattcgtgtagcctttcaaactcgtaaagtaagtgaaagaacagagaaaaattgagaagagagtcgaacggtcgtttggagagatagcatgctgactccctatgttttcaactcatccagaatgaagcacatcgccgcttacttgctcctcgccaccggtggaaacgttggtcttatcaaacacttgtgaaaagatcgagaggaaaagaatcctgaatattcagacttatgaaccatccgatttcctcttacctcaattttacagacctccccctctgccgccgatgtcaaggccctccttgccaccgtcgacatcgaggctgatgacgcccgacttgagaccctcatctccgagcttaacggcaaggacttgaacacgtacgtcttttttccttatacttcgcgttgataaagttgtcaaggtatttaccatgtgttttcttcattctctcgccttctttagcctcatcgctgagggatccgccaagctcgcttccgtcccctccggaggagccgcctcttccgctgcccccgccgccgctggaggagccgccgcccctgccgctgaggagaagaaggaggagaaggtcgaggacaaggaggagtctgacgacgacgtgagtttcttccgtgtctcatcttttgctgcagtcttgcctcggtcgctcattctttacgttttattgatcgaccacagatgggtttcggacttttcgattaaactccttacacctttttcaaactcttcgttggctcgagaatgctttggccgtctcttccgtgtcttctgtcctgaggactgcttcattgctgtactttcgggcttgattgcgatttgatgtcgagtatctgagaattcttgaagccgtcacatgttttgtttatgaaaacagtctcgcaactatcctacaatattcatctggaaagactggaccattttctgttgattgtcactgactccctggctttggctgagcgagagcaatctgaactgatggtgatatcgtggacgtgagttgtgcctacaacaacaggggttcagtctgagccacagatcaaaatagcgaattcgactcaagaagaataagatctagaaagtcaagtttgagtatttgccaagtcgagcctgtgcacattggtgattgagaacgacagcaagactgtcggccgactcgactactctgaggttcatgttgtatacttgacgtcggatgtctacatgaacatcgctgagactagctgcatgcagttcgattcaatatatgacctccatcataagaatctctactttgtttcgtcgttcttctgtttctatgtctcgctgctccttaatttcttggtctctttgatacttgctcccagacttagtggaacagagatgtgaacgcgtcgcgcaacatgctgcacctagccctacaccgggaggagaacaagggggggagaatgccgggctttgatgctgtcgctagtgaggctaaggctggcagaaactaaacccatgacccatgggatcttagtggtctgtggtctgagggcctccaagtccaaaagggccatgtatcgaccaccatcggttgaggttgctctctagtagccaaagccatatattgtgaaaggtatatgattctcaaactacagagttactgaacaaaagcggtgtgcccaccatactaaccgcacggaagggccataagcaagaagagatcgctggatgtgttaggagcgcatgcgctgtgcgactaggagttgtggcagaggctctgtagttctcaggtcacggacatgcaacccccaggttgcatctctgacatcctgatggtccatggtctgaggacacccaagtctagaaggatcacatgtcgaccaccatcggttgaaattactctcaccatgcctgaggtatctataagcattacgtatgaaagcgccgattgtcttgagagattttctaatataagtaacaggcaacgtctttcttcacaccacatctctctctccctcttcttcctcgatatagcccaagactctcaacatgtcgtccgaagtccagactaacaaaggtaagtgcttactctccatcagtttgccttccattcagacgtacaagtctgatcggtctgctccgatgggcagcgattgccgtcgatctgttggagttctaacgttttgttttatctgtcccctactctgaaaagcttgctgcactatccctcctgtggaggctgagtacaccaacaagggtgctttcgaggtcagtctctgttcatcttgcttccttgatgcttactttcgccgcctctgtttaccttgtccgacagagacaagatgaatagggatgaacaccttgttcataaatatagactcgctctttttagtattgacgtatggaaaaaaaaaatccgccaaacagaccatcgatggcatcaagacctacgtgactggggacaaagacgctaagaacttggtcatctacgtttatgtgagaaaacattgttgaatcacattcttcgactcagcatgtatgagacaattgagctgaatgtgaaggtctgacactttattcatacacaggatatcgtacgtctagttctggcctagaaatcctaataatagacttatccggctctgatgatgttccatctccacagttttcatacactcctcaagctttccaggccgctgacttgatcgccgctggaacgtgtgctaaagtgtttgtccaattgttctacctcagaggttcctcttcacgagtcgaatctatgatctccaaatttgaacgttctcttactgacatggactggtctcatctgcaccaaatatccagccatatccctgacttctttgacggcgtcgtcccggatgccagcctcttccaacccccctttactcctgagaagtgagttgaggccgtacaatcaatcgcgcttcctacatactcttaatctaattaagagtcgcattgtttgctttcttggacgcgtgtttagggacgaagccaaacagaagctcttttctaccaccgctgcgcctccgcctcagatcgagaagctcaacaagatgatcaagcaggccaaggaagccgggatccagaaggttggagctgtcggtttctgctggtgcgctttgagggtttcttcgttactcttccttattcatccttctccaaaagacgttcactcatctctctctctctctctctctcttctgtacgaaactcttcgttcggtcaacatcttacaggggagcaaagatctgtttcaagtcacctgacttggatgccaaggcggctttccacccgtctttattagctgaggaagacaccaaggacttgaacgtccctgttgctctttggcctagtggtgacgaggataaagagctggtacgtctctctttttgtttcgcttccgaatgtgcgtcgggttgttaaacccttactctcgctgatctgtgaatcaatactctctactgcgaaaacacagatggccaaattcgagaaggcgctctccacgaacgagtttgcttccaagaacaagtacaagctctatgaggatagacgacacggttgggctgccgctagagccgactttaaagacgagactcagaaagccgacttttacgagtcgtttgtcaacctgtgcaagtttttcaccagcgtcctctagattttcggtctttgcctgtctctcttgtttttgctttctgtttctttaagagaatgttatagctctgtagttgtgcgcttgaactgagatgtatcttttgctcacgttttctttcttgtaacatctaagatggacgtgttctcttttcgagtagataggaacaaaacgaatgtagtgggtattagagaacatattgatattgttcaactcgtgccttcttttttcttttggaatctctcatattgacggtactctgtagcggagaaaaagaagaagaaagtcgttcagaacactcaagaaaaaagagaaggatgaacaacatagaaaaggcatacctctgttcaaccgtttctcctcatccttctcacccgtttcctcctttctccaacctctgccaccttcgtcctcatcctcgaccccatcctcctgtttggccagaccctgcttggccctccaggctgccttcttactctttctgatcctaaccgcctcggcttcctcgctgtgggcaaggagttctttgacggacggcacggctgaaccggatagaggaaccagccggccagatccggccgtcggtggaggtgtgggtgaccgggaaggcgagcgggagtatagccttgtagggttgtactggattaaaggagatggcgatcggttcatcctcgtagaggtcgtactcgactctggcccaggagcaggcacagaggcggagacaggggctgagtggtcgatcgaggatgaagtaggaacagaggaggaagtggtaggattggatccgaaccagtcgcgaccagacgaaggctgagcgattggatcagtctcggtcttgagctgatcatgatcatcttgagcactgccgtcatcatcatcgtcatcatcatccgcgtcgggctcgtaatcactgacgcctccgaagatgtcatcctcgtccaacgaaggctggacaagtggtttagcgtacaccttctgtttggccggcaaaggcgctggaagtgactccggggagggtgctttgatggggtcgaccatagttgccgtagatggatcgacggatgaggcgtctggcacaccacccgaagtactgacaacagatccgtcctcgggctgaccatccgtcaccttcttctttttctttctcatcttcttctctccctctagtccgacggcctcgttctttttctttttctttttcttctccttttccttctcgccgatcggcttaaacttgctattcaatctaggtgcgtccgggacggaaggagcggccgatccgagcgcgcgcttcttgctgttgaccgcagcgagaatctcttctctcgatctcttctttgtggccggcaagggatcagcgttaaaggtgctggaagactgtccgtgattgaacgcctgttcaagttcgtcgtcgtctatctggttttgggatgcctcaagttccgccttgtttttagccagtaaagcaaagtccaaccctgattggatgtgaccatcgcgacgcgacgcgataagagaaagaagacgagaatgagccaacgaaacaggagcctagaggatcatttcttaacacattccctgttccttcagacagatgttattgaagggagaagaaagaaggtgcttacctttgaccaagattgaatggtcggcgtctccgcccaagtactttcgtttttcttccaacgcggctgcgtcctcaccctctgctgccgctcttctctcgaattcatccttgagcgcgatgacacccgagtactcatcttccagccctgctcgtctctgggatgctcggtcttgatacttggactgttccttctcatctgtcggtttcctgactttccgaggcttgaacgcctgactagatccctcggctctatggtgggaagagagaaataagtgattggacgcgttgaagtgaaaagaagaagcaattcaacgaacggtttctccttcttggaaggtggaggctggtagcctcgtttgggaccggctcctcctagtgaccgagtagaggatgaacctgcagaggcggccgaggccgagtctggtcgcggtgcagacaagaattgacgaaaggattcctggaagaaaaggaggagtaaggtgagttcgatatcaattgaagggctgaccagatgtatacattagagacagaggagaaggagggccgacctggttcatctagaggatgtgtgtgtgtatagaagacgaggaagaatgtttgagtgagctgatggaaactgaacggaatgagatcatgtaggttgtatcggactgtgttagggttagtgaatagatatatgaatcgaatcaatcaagtatgtataattacgtatatataacataagtagtaaaaatcaaaaaaatttcagatatagacatatgtacttgtctgtgtattcatctacacgggtgcctgatcgactatccatctatttattcaaatatatattcatctatctacctatgtccccgctctctcttaaccttctctcccagccttgtcgtttttcttttctactccccaccggaaaacacacaaagcgcccaccatagcgacctcacgcctcaatcagaccctccgtcacatctcttcttccatcgtcaactcccgcaccatgtcctacacccccagagttattggagtacgtctctttctttcttttttttggtttgctcaaaagcatgcgcttgttgtcgttctcttctctcttctattcgttcataaagctaatcacgccatctctcttttccttttttttttctttctttcttttctctcgttcctcttttcttcccttctctaggctcctaataccctcggtaagctagcctgtttggtgtgttgtacccttcggacgttgcctgtgacttatcgcacgaattgtgcgttgtgatgtagagcaccgagtgtacatcgagaaggacggcaaggtcgtctctcccttccagtaagatctttttctcttgtctcgttcagagctcctactagttcatcttagccgacaggaatgctcaagctcatcgtttctttccgctcttctctcccttcagcgacatccctctcttcgctgatgagtccaagaccatcctcaacatggttgtcgaggttcctcgatggaccaacgttcgtactcccttttaaatctcccaccagtgcgaccaagaacataccaagtctaagtttttctctttttggcaccgcatacaggccaagatggagatctccaaagaggagcacttgaaccccatcctccaggacaccaagaaggttagcttgcattcatccccgcttatagattaaaccggccgaagtctaacatatccggttcatatctttgtagggcaagctcagattcgtccgaaactgcttccctcaccacggttacatctggaactacggtgccttcccccaggttcgttctcccttttcctaccacgtctgacaacccgttatcatacaaacatcctgctgacctcttgctcgctcctatccttacctttctctccgcgctaccagacttgggaggacccctcccaggttcaccccgagaccaaggccgctggtgacaacgatcccctcgacgtttgtgagatcggagagcaggttggatacgtcggacaggtcaagcaggtcaaggtcctcggtcttatggcccttctcgacgagggagagaccgactggaagatcatcgtcgtcgacgtcaatgatcccctcgcctccaagttgaacgacattgaggatgttgagtcccacctccctggattggtccgagcgaccaacgagtggttccgaatctacaagattcccgacggtaagcccgagaacgtcttcgccttctccggagaggccaagtccaagaagttcgctaccgagatcgtccacgagtgccacgaggcctggaggaagcttatctctggagagagccccgccaagaccaaggactacgatctttccattgccaacaccaccgttgagtcctcctctggattcaccaccgctgccaacgttcccgaggccaacgcccagcctgctgcccccatcgatccttctagtgcgtgtccctgtctgcctttcctctgtttttatacggtcgttttcaagaatttaatagctgacctggcgttcttgcttgttctttcgtgatcaatagtcagcaagtggttcttcatcgctcagaactgaatgtagagttagacgcgcccataagattgtaatccatgattttttcttattactgtcttcttccccgctcgaaatcttctcgtgtcgattcccattgagacactgtcaaagtctgctccagaacgtgaacttatgacactctgtctgactgggtgttgccctccttcgggaagactatgctttattcatcatatctagcaatgcacacatcttttcgtttttgtcttttcaattttcaactagcgagccagccggcaagccaactctggacccagatcggccaccagatcacccagaccccgacccaacaccaatcaccagagacctcaccctcttcgatcaatcggatcacaccctctcggacagactcaaacccggatagactcaccgagctgtccgagtgagagtcagatcgaaggagagcacagagtatgaggataccaggtggcgagaagaggatgatggatgtttgtttgagtaggaccgtcgtctttgctagaactttttgtgtcgtcgatcgttctgacacagaagggagaggattggaagggaaagggtggaagaacaggggcggaagaaggacggatcctagtaatgtcgcttgggggaaattcaacattgagagtgtgggtatcaagagacccgttatgagatgagtgaacgtccggatcgtcacttctagtgtccttctggatcctttttccaacgccgtcgttgttgaggaagaagagagaggggaaaaggtgatcaggctgaaaaggagggcgagggttgtcaagagcgcaggttggaaagtcgtcgtttgctaattcgatatcccacgtgaatttttttctctccttatgattaacctctccgttctcaacaacgaggaagcaagtagagaaacatcaaaaggactagacgtaccaacatggcacggaacgttccggatcgagtcagaatccagaaagtcaaccaaccacctaaatgggttcccaccaccagtgccgccgccctcaataccggtctcccgccatccgccacctgcgcccaacgtacgagtcctctgatggtgatccctgagccgatcaacactcctgcaggcagatagcttcccacttggacggtccatcctgggaatgggtacagataaaagaacaaagaggcgtgcagtctctccagcaggttgtttgtcgatcggagggaagcttctaacagtctgccgagagcatggaagccgtgtgggccggaagaaggtcgagcaaacaaggtgatagcgtcgatccgatatctttacgacataaaaacggagggaaagaaaggacggttaaggtttctgagacttctttttcctcaaaaaagtgagagaaaaaaaaagaaagaagaaaaagaaaaggaacgctttcccttgggaaataattaacatactgcaagaaagcgccatgaacgcctgagcttcgacccaagccagcccaaaaccaatgctcccagaggcctctcgcttctcgcgcataacttgccaatagatgccacgtacccgatgagcggattatcttgcttagcctaggccatgctgttgagaactcgtcaagtgaaggtaggtcggctgagagtttataaagctggacaggaatttgggtatagtactgggctatggtggatacactgttgagcacatcctggttaggcagccgaccgttggtgccctctttctcccgtatgccattcatattatcaagatgagaaggattgagttccagggggcgagtacaagatcatagagggaatctacacaccgaaatataaaccaatatggctgaaactatgacctgggtaatccacacagagcgcggtccaaatgactccctttggcattcctcgcaagtcaccagcaaccaagtctagatgaattagagtttgtttgaaacaaaacatcagatccgtgttcaaaacaataataaggagaaagaaaatagtaacgcactcgactgatgggttccatggtaggaagaaaggaaagcctgcatcccttcgagatggtcgtctgatatgacaaagatgatggtcttagcgtagtggttagtgcctggagaatattcacgaccagatgtttgagaagacagatgataagatcagctcaatgttggactaagaaaaatgctggaagaacggcgcaacagatggaaaacgtgactgacctcggaggtactctgctatacttaataacatagcaactcctcgtatgttcctcatcctctctcttccgttattggatcccactgtgttgtactcttcaatcccctctgaaaaatcacctttgaaagcaagactttcccaactggcggctagaacgatcgcttccgttccactcgtccgaggtgggacaaatgccgcccaggtattctctccggatttagaaccaagggatgtctgaaaagtgtatggctgactcgaggtagggagtccgagcgccgcaaactcggcttgaagatgggcgcttagcctgatgatcaaacgaaaccaaggaagaaaaaagaaagagtattctcagatcagttcacttagatcgcagtgaagaagggagaagtcgagatgacgaaactcgtgcgaggacatattctgggcgtgccaacgagatatcttttcaagataccggtccgctagctggacagaatcccaaccgtacttgatgctagcctacaaattgatgggatcgttgtagcagtcatcagcgcagataactgagcaagccatcgaggacacgaatcttgccaactcacctggccgggctgcagggcatgttcgtccacccgcactctctctcctagctgttgtacaggaatacagagcaaccacaatgagccaatcactattagcactgttctggttgattaaacgaagacggaaagtccatcagagacaacagaaacatagtcagctgctgattgactgcttgccaggctggctacagacgaaaggaaagaatcatcatcggaaatgacatacgaaactagggagccataactcttgagtttggtctccattgactgtcttctatcataccgagcaatcaagcgttgagactcggtgacaggcggacctgaagaagagcgtctgagacctttcaacctagctagaaggcccatacaggtgtgatggctgatggctaatggttgacgattgatggttgatggttgatatcctcatcctcgctttcaccctagatgttgatcagcatacccgcttacataagccatccctccgagagattagatttttatctttggtagttgatgtgttggctaaacaccatcagcccaacaacacctcgtctggatcctcttcaatgtctttcgttcagcctgggcagagcccacacttgtcaccttctcagatcctttccttgaccgctccgccaactccttctcagcctgctccgtcgtccccggatccgacggcatacatcctgtcgatcaacccgcttgctaactcgccctcactccttctcactcatgcgacgtccaacctgacggtcgtcgacagatcatcctttcaagtggttgataagtggattgctcctaatgggagtggagagatctcaggtgttgtaggtcagcatggtgcggagggtttggtgtggacgtgcggaaaggagggaggaatccttggttgggatagcagggtcaaaggaggaaaggcaaccaacaaagtgatgcgaggtgggtcagcgtattctctacttgttcttcgagtctcgttcaatgaaattatatgagatgggattcattcattcctgtttttctcgttccctgtgacacatgaacaaccacacaaacagttccgggaggcaagaccgtcccccttctatcccttgcttcttcagctgagcaccaccttttagcagctggaaccgagctcaccaaccacgaagcgctgatagcatactggtagctatgtctatcttctctggaatggtctcagaaacaaatacacatgaacgatgtctgacctctatgaaccatattcaccagggatccccggtcaccatctcaaccgctctacacgcattcgaccctccattcagatgacatcaccaccctctcctttgcgccctcttcccttcactctcttacatttcctctgcaaccttcgaccgatccagatattccgccacccgctcaaccgcagtcatcggctatcttactctccggttcgaccgatggcctgctcgcgctcagcaacgcgctcgagaaagatgaagacgagagcacactcggtgttggaaacggagaggccagcgtggctgcagccggatgggaagagaacggaggctggggagtctggatgagaaatgatatggatggagtcgagaggtgggatgccagcgacgtaaatttccttcctttctcaaatatagcctggatctttcttacataaagattattgacaaaagcattgtggattccttttgattgaacaaataacagttcacgcttcgatcgaaagccgagtctctgagactggatacgcctgaaggcgttccttcgacccaggcatggacaaccgactatctgatcgatgttgtaccctctttatcgacagcttcgtcttctagaatcggcggttgcttggtcggagacaacgcgttcgttctattcttcttctcctttttccttcttcctcattatacgtatgggaagtgatttgaacgctgtttcatcaaatcaattttcagtggaaacatcgcactcttcaacgcatcaaacggagacgacgaagacatggtcatatctaaaaccttccgaggcggtttcaggggtcaccgggatgtcgtccgagctgcctactatgattcttccgtacgccgcatctttctcttctctactcgttctgacgactccgtcttctgttcgtcgggctcatgattgttctcttcatgatgggtttgtccaaccctatgcattcatgactcttttggtccggacagtctcagacgatgtacactggttcagaagattctgtcctttgctcttggtccctcaacgatacttcagggaaagacgaagacgaagatgtcgagatggacaagcatgctcaagtagatggagatgatgagatgaacggggtaaagcgaaggagaccggatgagcccatgttgggcggcgatgggggttggggtaaaaggggacgacggtagagtatttcgaatgtcaatgtagagatgacacagtatcacgagctggacgagacagaagaaccggaaagagagtgaaaggaaaggaggaaggaaggacaaaagatgagaatgcaaagcaaagcagttttattgagaaaccaagtatcttagataggcaagagcagtccctcaaccctagaaccctgtgggacctctcctgaatcgcccgcctcaacaagcaccaacacctcagctcgcttcagactagccactcgggacgaccgttgacctccagtggaagtcactttgggtaatcctgtcgggctgaaagagagcgtgcaacgatgatatgtcggtcgatctgatttgggaagcgcatgagccaacttgatagagaagtgaccaattgtggatgtgcaaacgaaagctcaatcagtacacaacccaacctagcgagaaggaatacgcgcacagacgaacctcaacccagattggttttagacctctttctttctctggccatccaccaagcgctcgaagaacgggtacaacaaacacccagaacgttaccagcgcggatgcagggtttcctggaagggcgaagaagatcctgtctccgtgactttctttcgtcgatgatggtgatgatgacgacgctaatgatgggttaggaaccgaagcgaatgtagtaggttttccaggagccatggcgactctcccaaagtgaatgttggctttgaaagtatgttccaagagaggctgaaagtagaccaagatgaggaaccctcggtcagttcagagcaagactttgtctccagcttagtatcaggtcatctcaagacctactttgacaagatcaccctctcccatgctcgtccctccggtcgtgatcactacgtccgccacttccaatgctttcctcatcgcctcttcatgagcgccaatttcatctctcaccacacctatatctataacctcataacccattccctcggccgcacatctcaagcttggtctgtttgagtcatagattccaccccactggccagcttctgtgttgatcgtcgcctccgcctccgaaggcttgtccagtgaaagattaattaactccgatccagtactcagaagggcgatcttaggtttccttttgaccacgactctttttctaccaacagaggcaagcacaccagtttctccaccgcctcgggtgatcaactcaccagcggacataacgatctcgccctgcgggatatcggaccctggaagtcgaacgttagcgcctttcttggtggacgaagagagtatccggacgatgagttcttcaccggcttcagaggcagaaacaagctcggtatcttcaaccatgatcaccgtgtcggctccttcgggtataggccccccggtgttgactctttcgatctgacctctttgcaaaggtaacccagatcctcggggcctcaccaaatattctccaggaccgtcttctacatgaaccgcgtatccgtctacgttggtcgagtgccaacggggaagagggtgctcggcctcgaccgactcggcaataatatatccggctaggctagagtccaactacatgaggcatagttgatcaacacagatgataaaacagaaaatatgattgacatcagacaacatatcgagtggtgaatttacctgacggatttcggttcccaagccgatcatcgctcctatatcgtgaactatttgaaccgcgtccttcaagggaatcaaaggatggggcgatttgcgttgccgcgcggagactgcgctagccgaagatgatcatcaggagatctcgcacgaaataagagaaacccatgatcgaatcggctaaacttacctgcagtatttggtttgggatgatgtctatgatgttctcccgctctatcggaatgatggatgcacgtatggccttgattcttgaaaggttgagtgtccaccggatcactcactgttctcggtccatgttggctctcgatctgcgttttgcactccggagactcccccaagaaggatagaccatgtaagagcaaaggcgcgaggacggccatcccatctttgacccctcctttacttccaggaagagcaacaacgagtgtacgggagagacgagtggcaggactgatcaggccacagataggattagaaagagaggccagcggggttttggaaagaccatatgccgtgatggcttgtgagagcgccggaaggtgtttactgaacagcggagccaacgcctgtgatgtggtatgcaatgtcatcagaaaagagttagataggagcatgattagagcatcgaagcgatatgtaaactcagcatacttgcctgaacggtcacatctctcgctccccagccagtccctcctgtggtgatcaccaagtcaactccttcgtcggcccatgttcggacgatcttccggatatcgtcctcgctatcagacacaaccgcttggcttaccatatgatcggaagcaaaaaggccttgaatcccaataagttgcgagcggatatagggtcctgtagtatcgagagatagatcgtgaggagcggccgccgccgtatccgagactgaacgaaacgagcggagtagaagatgattgatgaacaagccgactaccggttcactctcagaaccaagagcctcgaggaatgcttaccggtgagaactgctgctctgtatctggaagtggacatgctacgaaaagggtataagctctactcgaagatcctcggacgcacaagtgctgatggtcatttcaacatgatctgtgtctaggctaatggaataacgatgatgcgcgcagtcacgtgtttttcagccgtggtttccttaacattgcaccatccgaccaaatgtcttgcactcaaccaacacctcacatatcagccagcatgtccgactccactgcctctcaaggagctcctgctatgatgtcttccatcaagtttggagacgatggagcgattcttatcatcaaccagcttcttttgccgtgagtttgctcgttcgacaagagaggctgggtcgagtcatgctctccttctatatatcgacgtttaaggagctgacgattgatactctcgtcatgtttgtgtagccatgtggttcgatgggagaaggtggaaactctggaggaaggctacgatgccatcaagtctatgaaggtatgcttggtttcctctattactctccccctaatttatgattttcattttttttttctttctgctctcattcaacttcatgtatactttcaactcggcctgacaatgaaaatatgtttagatccgaggtgctccggcgctcgcctctctagcctgcctggttcttgctcagaacatttcacgatccctcatggcctctcctttgc

SEQ ID NO: 2112 - DNA, 4844 bp, Xanthophyllomyces dendrorhous
  misc_feature (3599)..(3608): n is a, c, g, or t
cctcatggcctctcctttgccggatcacctcaccgatcagcagagtttcttgacgtatctcaccaagtcgaccgaatacctcaacggagccaggccgacggctgtgaacctcggagaaggcatgaagaggatgcagcaggctggagaggatgccctcaaggccggaaagtctgctgaggagagtgcgaagctcgtggttgaggccggccagcttgtgagtacctcggtctggatgagactaggacgagggtcaccaaggttgcgaggatgttgatagagctgacaagatcatgggcgctgatgaggaaacaggttcacaacgaggaccttgctcgaaacatcctgatgtccaagcacggagcggactggatctctaaagtaaccggcaagaaggacgatatcaggatcttgactgtatgtcgttttgtctctttcttgtatcgtacgcaatcttcgttgacctaatttctggcccttgtgctcttcaacggtaccgctttcatccaggtctgcaacactggttctctagctacatccggaatgggaacggctttgggagtgatcaccaaccttcaccagaccggtcggctcggccgggctttctacactcagactgctcgtgagaataaaattttgttatacagatagaccccgaggtagttgtctttttagtcttctaaacatccgacctctccttgccttctttgacatgcttgtctatctgtcgttgacacgatagcctaccaccagggtatgtccttattttttctgtgaacagttcacattcaagcgcttgaacgctaactttttcctcctctgaccttgaccgctaggatcacgtttgacgtctcttgagctcttgacgctccagattccgtctactctattggctgatactatggtcggctcgttgttccagcaccaccagatcgatgctcttgtggttggtgctgaccgggtggttcgaaacggagatactgctaacaaggtttgttctttgttgagtttcatcatgtactttggcggatctgtatccggatcgtcggctcaccgccgtactttctctgctcttttccgttcttctaattctcgtccggcgccttttctcctaccgataggttggcacgtacaatgctgccgtcttggccaagaggcacggcgtcaaggtcgtcattgtcgctccagagacgacgattgatgtgtctgttgccgatggatccgggtaagcgctgtgtgttttctcggagttggcatcatgtcgcgacggctgacacagggatttctctctccctctctctctgttgtgggttgtatgaaattcaacatcagcattccgatcgaacagcgaccggcgactgagctctgctcggtatcgggtaaactgctttctatcaacggggaggcccagacgtcctctgatgtcagtctggcgactgtgcagatcacgccgaacggagttggatctttggactactctcaatgctacaagtgagtcttgtgcaggttgaaagaggatattgtgtgcaggccagactctgactccgactctacccctctctctctctttaaagccctgcgttcgatgtgacgcctgccggcctgatcgacgccgtagtgacggagacgagggtggtggagaacgtcgagggaaagatcgacatgactagatagatagatagatagatagatagataggtgcacagacaaacgatcgaacgctatagatgaccctgtgcacgcacaacatgcgaccgagagacggacgtaggcaaaagccgtaatacgttccgtagtacatttcctaatagcatatagcccagttgtgtaataaacccgaaaagtttctagaattttctcggccggctcttgacaaggtgggcgattacgaaacttgtcgcttttttccgccgcctttttttccgcccgctgcctttttttccacccatcctcgcctccaccgcaccacatccatccacctcgcatcatctaccttgcatccaccacatccttctttttgtctgactccttaaacagtttcttcaaaagatgtactctgctctctcccgatctgttcgagccagctcgtcgtcccgaatggccttccgagccgctaccgttagtgcccttttttctctttttcttcttttttccttttttctttttcttcggctcgttctctttccgttttttctctttgccccaagtccgttcgctcacacccagtcttccccatctctctttggctacctctctttccaactctgcccactccacacatcccgtactccgccatcgatgcgtccggcttctttctccacccgatcggcccacacagcgaactcccgtcctcgcccgacctatgtccaacggcaaggttaacggaccggtcatcggtatcgatctcggaaccaccaactcgtgtgtgtccgtgatggacggaaaggttccccgagtgctcgagaatgccgagggaggccgaacgaccccttccgtcgtcgccttcaccaaggacggtgagcgacttgtcggccagcccgccaagcgacaggccgtcgttaaccctgagaacacccttttgtgagtttcgggttttcactctccgatcgatctcgaaatttcatgatttgatcataaagactgatctcgtctacgctttcgcgctttcttccttccttctcagtgccaccaagcggtcagtccaacacactttcgattctacagttcactctccaagaacagagaaagaagaagaaggaaaagaaaactgaacatcgctcttcgattttctctgtctatacatcaccaacttttatctctatcagactcatcggacgaaagttcaaggatgccgaggttcagaacgatatcaacaacgtccctttcaagcttgttccttccgataacggagatgcctgggtcgaggcctttggcaagaagtactctcctgcccaggtcggagccttcgtcgtccagaagatgagggagactgctgcttcctacctcggaaagcccgtcaaccacgccggtaagcctttgttcccttctcttgacaatgtaatttgactgtggatcgaacgctgatcatcgcttctcccgtacgtcgatttagtcatcaccgttcccgcttacttcaacgactcccagcgacaggctacccgagatgccggagccatcgccggtcttgaggttctccgagtcatcaacgagcccactgctgccgcccttgcttacggtctcgacaagaacgactcttccgtcatcgccgtctacgatctcggaggaggaaccttcgatgtttccattctcgagatgcagaagggagtcttcgaggtcaagtccaccaacggaaacacccacttgggaggagaggatttcgatatcactctcgtcacctacctcgtcgaggagttcaagaaggagtccggtttggatctctccaaggaccgaatggccatccagcgaatccgagaggccgccgagaaggccaagatcgagctttcctccacttctcagactggtcagttctcttgtacacgtagttgaacttgaaggccctcagaaaatgactgacaattgactttttttttttttttcttttnnnnnnnnnnttttttccattcccttcctctctccccagacatcaaccttccctacatcactgctgacgcctctggacctaagcacattaactccaagctttcccgagctaagctcgagtcccttgtcggtggtttggtcgccaagaccgtcgacccctgcaagaaggctttgagcgatgccggtgtcaaggcttccgacgtcggagaggtcattctcgtcggaggtatgtcccgaatgcccaaggtcatcgagaccgtcaagtccgtcttcggccgagagccctccaagggagtcaaccccgatgaggccgtcgccatcggagcttccatccaggccggtgtcctcgccggatccgtcaccgacattcttctccttgatgtcactcccctttcgctcggtattgagactctcggaggagtcttctcgcctttgatccagcgaaacaccaccatccccaccaagaagtcccaggtgttttccaccgccgccgacggacagaccgccatcgaggtcaaggtctaccagggagagcgatccatggtccgagacaacaagctcctcggaaacttccagctttctggtatccccccggcccacaagggtatcccccagatcgagatcaccttcgacattgacgccgacggtatcgtcaacgtttccgccaaggacaaggccaccaacaaggaccagtcgatgaccatcgcctcctcctctggattgtccgactcccagatcgagcagatggtcaaggacgccgagtcgttcgccgaggccgataaggccaagcgagacttgatcgagatggccgtcgggtccgactccacctgcaccgacacccagaagtcccttgaggagttcaaggctcagctcgatactaaggaggtcgagtccgtccagaagttgatcgacgagctccgagagctcgccaagcgaggacaggagggtgaggagggtgtcaccgctgaggagatcaagaccaagaaggacgagctcctcgaggcttccctcggtcttttctccaaggtccaccaggccaagcgagacgccgccgagtccgagcccaccgttgaggccacccccgagagcgagaagaaggacaactaagtgcctgaattctttctagcttttcccccccttctcttctcggttctcaactctgttttgtcccatctgtttttcatgactcacgtttttggctcaaacccaacgttcccctccctccgttccccccctgtcaacaaaac

SEQ ID NO: 2113 - DNA, 11732 bp, Xanthophyllomyces dendrorhous
caacaaaacccccaaatgcctctcttcatttgtcttttaaatattacacctagtgatcattagcgtattagcacaaatcaactttcccgtttgtttctttgacttttcaatcccaacccccgcctctcaaccttttctacctttgtgctctgcttctctatacatatcactgtctccctcttaccctccccgctttcaatctaaaacgttttgtttgtaaaccttttttttctcctgttttcttaaaaaaagggatattcatatttatgtatctcaactctcaaattccttgagccacgacattgtggtgccgtggtactgcgacagcgttcatacaaagaaagaaaaaatgaaaatagaaaaaaaaaaccggccgggccagacggagatcgtgtaaagagacggtcagtccttggcgcaagaggaaacgaaaactcaaactagaattaaaaaaaaaaggttgttcccgatcgacgtccgatgtcggacgtcggacttcccgacatacaacgtgttgagtgcaccggtctcatcaggacgatgatcatcttcccccctcctttctcttccatcggtccgttctctcctcccaacccgtccggtccttcacattcgggtgtcaaaacacacccctgttcttctactacgcatacgggatcatcatcgtggtatggtcatgtatattcgtgatagcgtgaactcaaccaagaggtaacaaagcaagcgataaggagcgagggacgaaagggaagggaaaaaaaagtccgacgatcgtttggtatgagggttgaggatcatagggttataaacgtggattgaaaggaaacggccagtaactagttaggtgagagatgagatcgagatgcggtggggagagagagagagagcaagaagacaacatttctccatcaagccgaaagagagaatctcaggttcaaatgaaagatcatcgcttaagcgctctcgagctccttgaggtaagcatctgcctcagcgtttccactagccttggagagaacctaatcccgtaagaaggaaagaagtaaagagaaaggacaagacaagcgcatgttcagatctatcatccgcgagacgaaaggacgtcatagcatagtgatccaaaacggacaagaggaagaggcaccgggaagaaagcaagaaaagacgaacccgcttgagctgctcaacatactcctttttggcatcctccgtagactttcccttgacttgggtccaagcgttccacttggccttaccaacaaagtccactaaatgcgcgttcgaaagaggaacggaaagagagggaatgagtgacagttccaggcagtctaatcaaggcacagatgatggtctcactcaatccaggcttgggagtgttgcagtctccaacagaagctgttctcgtccattcgcatcaaacgagaaagaaagaaggcggaaggagagaaaagatggcagaggacatccggataggtttagaagggaaggttctggtcagcctctctcgtacggtttactttcgaacctgaagagaaagcttagaggagagaacaaaccctgcttgaacagagcgtagaactgatcgaaagagaaagaagagcatgtggtattagttctttgcgctctccaaacagaaaaaaaaaccaagaaacattgcggggaaagactcagaaagagagaaactcacgatgagtttatcgtcatcggaaggcctaacatctccggtcggaggaagcttagagacgatggcaacggccttatcaaattgagcagcggacatatttaagagagtatttggttgattgagagagatagagtcttctttcgtcgtcgtcgttgatgagatgagatcggatggttgacaaagagaagaaggacaaaacttttttctctccccattaatttgtgaactttggggtaaacggaatttcccatcggaacgtccaggggagaaaaaaccagaacggtgatgtaattctcgttttaggcgtaactaagccgtgccagacaaagctcacttgctctttcacctttctctatacttttcatactaacaaatggttctcaagtggctttgtattacaaagaagaaatagtactgtatgggttggaaaatgaatgtggcggactataaggagaaaaagagaagaggcacgaggaatgagatgtaggggatcatgggatgaggaaaaaccagtcgaaacgataggatgctgttacgacggcattttgagggagagagcaacgcttggatggatgaccggataatcgtgctcgtgaagatggctcggagagggaaagagagataaagaagggaagaaaagatcgagatatacgacaaaagccaggaactagagacgactactactaatagaaactcttggctgaaatcaacatttcttccatatcgagaggacacactctacttcttctcagtgatgacggcacttccgtccttgccttctcgaacaaccttcgagtctttaccgcctcggacgtcctttccctggggcttcttgtaagtagatttgaagaaactgttgggggaaagagtaagatttaataagataaaaaaacaatcagcaatagaagagaaatacaagaaaacaaatcatggctacgtacgcaataaacaagaacaagtaactgctgatgagagcgcaaccaaaggcggcagctccgggcgaaccggcgcaatcaccaccgctggggagccaaggagcgtaggcggtagcgaatcgtccccaacctgtaaagtagatatcaattcagtcggaaaggataaaggtcagtggtcggctcaagcaaacgcgcacccctggtctgtaacgatggcaggtgtgtgattacaacataaagtatgtaggatggtcgacgagaccatgtttaagagtccaagccaagggaacagacgactctgggacgttgttcacaccttgaattcagatatccgtcatgatctctgaatttaagaaaaagggaagaaatcgaccaggggatcgaatactacaagactatggtctgtggaattcaacgcgttttcggtttgggaaggacgaacgggcaaggaaaagcaacgtgctggcatagtagatgatgcaaagatcaatgacgaattgggtgatctggaaggtggtcaggtacttcttccactatggaggaagtgggggtcaaaagtaaacgcggtcaactttcatttgcactactggtcgataaggtccagggaaaggaagattcgggtacacacccagagcttctttcctccagcagtggcgaagtagtagtagtctagtagtgaaatgagtgaacatatcatgtcgaatcagagttggatcaaacgaaaagaagaggaatgctcatatgaacgacatacacatgatggtgtgcaccaagaggttgatagtgatcacgacccattgctaccggagggtcaagaagcagaaaaggcacctcgggtcagagccaggtactgataagagacgatgctggaaagagctgcagcactcaccacactggtagttccctcaagctgagtgaagcacaggacggcggtagcagagtggtggaagacgtggaggaaagctggctcaaagtacgatagataggtcaaaacccgacggtaattagagcgtattgaatctaaacagataactcaccaagaggcttcttcttgagaaccaaaaagacggtatcgatgagctcatagtacttgaagaagtagttaatgatgtaataggtctcaagtcgctgatgtgggaaagggaagggagtttataaaaggcagctgggtgagctcttatgcgtctctgaactgattgtgatagaaaggtaacggacaggagtgaacgctccggggtggcagatcgagtagtggaagccacttccgccaatcatgggaaggctaaacggcaagaggcagaaaggaatggttcgccgggtcaaccagagaaacctcgtggctgtagacagaaagccagaacgaagagctcaaagcttgacaagtcactcacagttcctccagcatgagggcgaggaggagaccggatccgagggagagaagcaagttgtgtgcctggaagaggaactgcatcttgaaagggggcatcttcctgtggaacggaggaagtgagagagagacgaagcatcgaggagagagagagcaaccgggatagaaaggaatgaagatagaccgggttgagtcgggggagcgaacgaaaggagaggaagaaagagtgaaagaaaaagggttgaaacaacggcagatcagccatcaatgcagacgcgggaaagaaaggagataggcgataagtttgcacatcggcctgaagtcgccctggacgagttcagggaccagcaagaaggtgattctagcaaaaagatgaagaaaaaagacaacgacggaagggcgcggcgatgtgtagtctttgggctcatccccaaggaaaaaaaaacaatacaaaaataaaacaagaaaaaaatagaaaaaaagaacaacattgttttggaaaagacacgaacctcatgagttccctaccggaaaagatgacgataaagtaggtaatcatcgcaagggtgacactcttgacggtagataacggggtggaaccgggagtgtaggtctgccaggactgtgggaggtgcaagctttcaggcacattgttggccaaaagttcgtagagcattacgacgggagagcgagtgaatggaacaaggaaaacgagagagattggaaacgaaggaaatgaactgtgaacggatagacctgaaagagagaggaagaaggaaaggaaaaacgagggagaagcgagccaacgaagagaaaggagaaggagagaaggaaaggtcgaggtcgagggttgaaagagagaagagcgaggagagcagaacaaggggccaacgtgtacgagggagggaccagaagacttaaggtaacaatcagatatctatctattttggggggttttcctcctagctcccttagtgtctgtgccttaaggtctgcatccggacccttggtgttcgtgccctgaagtctgttggacattgtctatgatatatcgcctcaatgggtctgtctctgtatctgtgctcttatcgggtgccctgggctctatggtgtcatttattgtaggcgaacgttctggcgcgcgcgcgcgcgcgcgtatgtgtaggttcctactgtacatgcccttgttgtcaatgtgctcgtatcggatgtctctccctgaggtgttccaggcagcattcggtgatggcctgtatgccctaatattagtgccgtacctgcgctccatcttgttccacagatggtgtatgtgcgcgctacagacactctcgctttctctccatctctctttttttccccttccccttctcctcacccgcctcctctccttcaaagagtgcgccctgttgtctgtgcgtagtgcatgtgaatgtctatacaataccgctcgaggattgccggacgacgcgtcgagcgttgtttacggcgtgtcttgcgccagacacgctctctttgctctgagtccgagtctgagcttacgccggtccttttccatagagatctactcttcctcttcttagcatcactatgaatgaaccagagggtgtgcaatttgattagaccaacagcttgttccttctgatgtaacatcacgctcttcgttgtcggctcttttgaattctcattcttattctttcaataggcattgatgatatgatcggtgagcgggatggatggatggatggatgaatggacaaacgaatataagcgtatagagcgccctcgtaatcgaatcgtaacccaagctggttacatcactcgtttgaccttaccttcctcactgtttctctcttcctctctttcgatctttcgtcgctttccttcaaacaaggtctttcctttctagatctccttcgccttcactcttctcctttctcctctaaggatatccctggagtgttttgacaagatccaatagaagtaatccaaacgagagcttgataagtggccggtagatacacctcccatcggttcatgcactcctggctcagtcgagttttccataaaccgagcacctcgtttagacccttctcttctaccctcgaccggacatccctcctgccatcgattgcaggcactatcaaggtcgccactcccaaaagttacatgcctatagggcacacaaatctttcattcaactctagaacacatctgtcctctctgccaggtttgtgttgtccagacgagcatttcagtgatcatcgttccgagctgacatcaccggtttttttcttccttttctttgcttcttctctttcttttcttgtctctctggcctcttccctcatcttccttcatcttatctctcctcttcccttctttctccgtctccagactcacccgtcaactgtgtaccaaatagacctccccgcttgtcggtcagaccattgacagcctctcacgaacaacttgaccttcaagatcgtctcaaagcccagtccctcaaacttgttcagtctctttctcctgaaaacttcagagtaccttcaactcactgctcgcgtcaagacagatctcttgataattgcctatctagctcatcagtcactcacactagtcgtcaagcccctggatcagtagatttcaacaaccccagagatcatagccaaaatcccggcccggtcaccaccaccacctcctccgtcaacccctcatcctacagatcatccagtgctaaaggccaaaagagtgaacgcaaaagagatttcaaccgagacgtctcttccgaaccgttgatagatcaagagagaagatagtgagtcccttgacgggtcgatactatctctagcaggtccttgattgacactcatcatcccctctcaactgcttccatagctctcgacctcttttactaatccctcagagatcccgttctcctcagcctcgcaaaagatacgcacgtccgtcgtcgcctactgttagtgctcagtctctcagacctcgctccatttctcattccgctaacctttcgactccaacctctccccggttctctatacctcaggccgttcccaacaaagtttcacagcctatccgagcattctccactaccgtatacaaacctgactcttccggtcgcaaaagatcttttgactcaagtaacgcctctatcgaccagacctacgatcacatctacgataacaacagcgcatacgacataccatacagtactcttcgcgacatgcctcctcgatacaacaacaacaacaacaaagctcgatacggcaagcactctgcgccgaaagccaacaagccatcgctcgaagtgctcgaaggtcctctccacacccttgacactgtccaggccctatatcagacccaactgaagtctgcttggttggttgagccaaagggaccgctcagcaattatattctctctagaacaaacagccataaaggtctcgccgccggtggaaacagattcaagaacgtgaagggtatatgcgagggcacgccgatcgtcaggtatccatccatctttgtcttctgcccttcttacatcagtctgttgaccaagtcctcttgggttctagatgctccgtcgttgccgatgaagagctaggcatcatcggtgtcggcgatcatccggtcgcaaaagaggccgaaaagattgcctgtcttagtgcgctcttacagctcgcccaacagggccaggtcagtctctccttcgttccaattgcctttgagggtgtacgcatagatacctaacgcaacctcctttgctaacccggactcgtccttttccgaccttgatatactcatacacccactgcgttctttctcctttgtctctaggtcgatactggctttggcaaatttaacccaaaactttctggaataacactaatgggcaatcaaccccaggaggctactatcatgctctccaacagagagaccatcacccattctagagctcgtcagttcatggacttctattgcaaccgattcggtttcggtaagcccatcatcacttattccgattcggcccctcctggtcaacttggaggagccggcaatcgaaagagccgggtcccacaaaccaattgggacgctgtgatgaccgtaggcggcaggaagattggcatgggtaccggctctagtaagaaagatgcattgacgaaatgctacttggatgtgacccaatacctcgagtcttcggatccgccgttatggatcgagttcaagattaagaacccattcgaagccggcgctagcaataccgcccatgtcatcttttctatctcggacgaccttgaagaggacatccgagatctatcgaagaacattcaggcttccagcttgtacgctaaagcgatggacgcctcaaccgtcgccgctgtggagatacccccgccagtagaagtccgagcggcggcaggaacgccggcatcgttgttagaaacaaagtcgaaacggctgatggctcaattagaggcttaccaagccaaccctcggatcagcaagctccgggaccaacgggcaagcctaccggtatcttcaaagtccgatcatatccttgcaaagattgagtccaactgggtgaccatctgtatggccgccaccgggtcgggtaagacgacgcaaatcccacagattatcctcgatgactatatccgtcggggggacggcgcgagctgtaacgtcgtttgtacccagccccgaaggatcgctgcgatctcagtcgcccaacgagtggccgccgagcgagatcaacgactcggtgagaatgtcggctaccaggttaggtttgacacaaagatgcctcagccgaacggatcgatcacgttctgtaccaccggaatcttcctcaaacgactccagtcggctctcggaaacgaagatccaagttcaaaaagctggctcgacagcgtctcccacatcatcgttgacgaagtccacgaaagagatctcgatgttgacctgctcatggttgttcttaagcaaatcctcaaagaccgtagagatcgaggcctccccctccggatcgtcctcatgtcggccacgatcaatccagcattgtttcaacagtattttacagaaccttccggtcgacccgcaccggtcgcagaggtacccggccgatcgtacccggttgagaaacacttcctagataccttggtccccatgttaagaaacctgcctcagaacagaggtggctgggtgtttggtgacaaggacgttctccggttcttgaatcaagaattggttcctggcgggttcggaccaaacccgccgtcggacgagcttaagacgccacacgcgttggtggccttgatgatttctcatatcgttcagacgaccgaagagggtcacatcgtgagtacatcctgtttggagtttttcttttccttccttcttgaacattctataatgacgtctttgcttgctctttgccgttcttctcttcaatactcagcttgtattcttggatggaatcgacgccatcaaccaagtcaacaaagtcctgattgatacctatcgatacccgctcggtgtaaactttaacaccgaccaaacccctattcatatcctccattcgtctgtccccgtggccgaacagcaaagagtgttcgaaccctccggccctggccaacggcgaatcattctggcaacaaacattgctgagacgtcgatcacaattcctgacgttgtctatgtcgttgataccggccgagtaaaggaaaaacgatacgactcatcgaaacatctgtcttcactcgttagtgcttgggtcggtcagtctaacttgaaccaacgagcaggtcgagcaggtcgtcatcgggagggtgaatactacggagtcttgtcccaggcgagactcagagtactctcagagtacgcaatggtagaaatgaagaggtctgatctaagtaatgttattatgcacatcaaggtgtgtatctctcttttttcgctttctttgccgtttatcttagcttgtcaaccaagataggggattcctgctgttattatcattttcattcctgttgttgttggtctgtctctgaccttacgtttgttttccttcctctcgcccacgacaggctcttaacttcccaaacatggaggtggaggaagtcttggcggacgcaatcgagccaccaacagcgactgctgtagaaaatgcaattgttcgactcaaacaagttggagcgttgacagactcgaagcagctcacctcgctcggccgggttctccaagagttacctgtcgaagttcagatcggaaaactcgtcctctacggagcgttctaccgatgtctagactctgcgcttaccttggccgctgtgatttctgatcgagatccgttcttggccccgatggacaagatgaccgaggcgaacgagatcaaggatagttggtcccctcctggattcagatctgatctcttagcggtggtgagcgcgtacaactattggttccaaatgcatgcctccggtcggttcagagaagcctctgctttcctccaagcaaactttttgaaccgaacaaacttcttaaacatccaaaaggtcaaggaacaaatctggtttgccctggtagacactggagtgatcgcgatctgtgcaggtggaatgactttgccaaggcatggcggtcgaagtttgacggccatgccggcggtgctgaactcgaattccgagagtctaccattattggcggcgttgattgcgacctcatccgctccgaactttgccatccgagtcgatcagaaacagtaccgaacctcccaggacaaggttggtttcctcccctttctgtttatgcctccttctattctcatgacttactcgacgcatggcttctctcattctctttcggcgatctcgcgctttcttctctaatagaaatgtcatatccatacgagcagtgtgaatcaacatcgaagagagaacccacatggagagtctccggcgattatcggtgaaaaggcaatcctagcgtttgttgaaaagacatcgatcggaccggtcaaccagaatgcgccttcctccctccgaacgacgaccaggctggatcccatgacatacatgctcttcggtgcttaccatctcaaagtaacagcccaagggttgatctgtgatgattggttgccgatccaagggcaatctagtctggattcgttggatgaagtgcaacggttgaaggatctactcgagacgtgtatgcttagagtgtttgagggtgttggtcaaggactcgttaaagggcgaagcgaacggtcccatcgaagagacgcccctcataacagaaccgccaccaacaccgccgccactccttctcaaaacaacaaagataacaacggtaacaatggtgacgagaacgatgatgaagactcagatgacgaaggcgagcatgaagtcgagaccgaacgggacgaccgaaagtctgatgatcgttcactctcacaaaccgaaatcatcgaactagacaacttaacctcggatgtcgtcgccattctcgatcgatacgcacaggaaagaggagcgggtgtctctagagcgagcaccagaccctcgacccctgctctgatgatgccttcgatgtcgatcagacagcaggagggtcctgccggtgtgccaccgccagcttcgtacgcagcttacgagaacgcgccgtatcgacctccgtcgatgagatcgtcgatccctgccggtcctagagc

SEQ ID NO: 2114 - DNA, 3426 bp, Xanthophyllomyces dendrorhous
atgataggaggaactaccagaagaagaagaaaaagaagataacagttgaatttcttaacaaggagagtcgcttgttatcttcccttgggcttccatattctttccgttgcatgtttatttattccccccgtgttgttctttccttgttcttctctttttactattttaatttaaatctctaagaagaaatttgtgtattcaacggttcttacttgcatgaatgaatttcttttgctcattcgattggagttcgaataagaaagtcaacgaggagtatgtttcatcgactttctacatgaattaagaaaaacgaagaaagaaaggtatgtagaagtaatgtagatataagtataagtagatgtgtgtatcctaatatacatggagcaacgaatccagatcaccaaacaacacaggatcacagtttttcacttgaaccaagaactgcaacaggtgttcttctccgatcaaccaactagaaggatccgaacttgccgactcgagttctccttcatcgttcaagccgatcgaacgatcgaacgagccggataccccgaaggttaatgtcggccttgagctacccccacgttcactcaacagaccgatcgtctcgcctagtcggccggctacgaaaccgaatgggttctgggcaagatcagccgagacagaaatcaaccgatggaagaacctcaataccacagcattacagcctatctttcttctcatctctgttctcaagctcgcagaggctaaaaagacaagactatagagtgaatgacaggactgagcgacgatctggaaccaacccgggtgggtaccgaaccgatgaaattcttcgacagacatcggtagatgttgaaccaaagattcgtacaaccggagtaacttcccacctggaagccctcccaacacagttcggttgtggtcctggtaggccacttgggtaaaagcatcgatggcggtattgagcagttggggaaactgttcatgttgttgttgctgagcctggtagtccccggcttggttcgatcgatcgaacacaaacggaaggctgtcggtcgagttgtagataaacgaagtgatgagatccagccaacgatcaatgaacgttggcggtaatccggccaagctaactctgatcccaatcccgatattcgcgtagatctcgagtacctgtttccgaactttaatcatgtcgaaaacagtgaaaactggttcggggcatgaaggatcatcttcggcaggagaaaggaacccagtggaaggatcgaacgaaagaccggctagtcgagggtcacaaatgtaaacaagtacgcgaagtaaccgggcgaaagtcaccatcgggtggaggttctccttttgactggacaaatcaccgagaatccccaggatagccaatgcgatctgcgctcttcgagcgatcgaaaaggttgatattaatgacgacgaagaggaggaggtggatgtcgaagaagaggaggaggaagctctggtgggaccactcagcgtttccctcgcttgaaagaccaagagtgaatgacaaagtgttaattcccaagctgtcccatccgtctgtttctgttccttttccttttctttcaaagggtctctgtccaaaaactcttgggcttcgtccagaccaccttccccaaacacgacttcctccaacagatcggcaagctcctcgaacaactctgagcagtacatgatcgggagcatcccttcgaacctctgctccgcctctaccggcgctggttgagcggccaacatttgcacggccgtcagcgcgtacgaaacttcggaggcaagtctcgaccgaagtgacatggtgagaccctcgatgtcgatctttcctaattcggctaacgggcgagtctgtcgagtggctatgattgatgctcgttcccgctcgagagcgtcaatgtcccacccaccgtacgtttgagattcccgacaaagaggcatataggataccttggctcgcactctagggggaagcgtaggcacgacaacaggtgcaggtgcaggtgccggagccttcacaggagcgctcgtcggaagagaaggcggtggcggcgttggctgtggtaaggattggtgaggagatgatgctgtcgggaacggcgatggggtgtcctgaagaaaagaggagggaagaaaagaaaggataggacaagaatgtcagatgggcgaaactctcaatgaggatatagatgttgaatgaagaccgacttgaaccgatgcattagctttggccagcatttcgtgagcttgacaagaaataatatgttccccaaggggtaaactcataattaatccaacatacccgcaagtctcgctatgaaattagagattaagagaggaactaacctttacgtttcttgcttgaacctgtctctttttctccactcgtctgcgctctctcgtctcctttcgagctcggctcttgcctctgccctggtccatgcggtgtagataaaccaggaagcgcagtcggagcagacactggagtctgatatgctcctggcgtgagcgcccgactagacaaacctgaaggaggaggctgcatcgaaccgatcgccactgatgatactgctggtatcggcgtcactgctgttgcaactgttgaatcgacgttggttccagtcggacctattgtaggcacagatggaccggcggataacataggaggctgtgaaggtatggatgatggctggatctgggttgagatttgcacagacccaggtggaggtaacacccctctagaaattccatcagatgggttccctccttgtttcggtatgctgaccaagtttgaggcgagagttgagggctgggacgagtcggaaggcgttgccgttctgtttgaagggatgtttccttccgaatgagggtttctgtcggagctgggttggccattctcattctgctgctctgatggacaaggtccagaactttgtccgccaattccaccgttgatatcgctagcaccaccagtaccagccatgtttggaggagaggacgcgagaacgtgcatatgttgctgctgctgttgtttctgctgaagctgaagctgctgttgttgtagctgttgtcgttgctgtagttgttgaatctgctgctgaaaagattgctgggatgtggaggagtttgaagattgttgcatgatctgttgagcgagctgttgttgctgtagcaactgttgctgttgcagttgttgcagttgttgttgctgctgcgattgttgttgttgctgtagctgcaattgttgtggttgctggggttgctggggtggttgctggggttgctggggttgctgttgctgtggttgctgctgtagtgaaggcggctgttgctgttgctgctgttgctgctgctgctgctgctgaagtttgtttgcgatctgcctagccctgaagtcctctagag

SEQ ID NO: 2115 - DNA, 1297 bp, Xanthophyllomyces dendrorhous
gccctgaagtcctctagaggatagcagatgcttgaataagcggccacgatgacttcgagcgcgttcgttgtaggtggtcgatttgcgaactgtggttcatgtgccaacattacgaacggcgttggttcgggtagtgtcggcggaagatggaggagagtgagaatcttcacgaaatggggatgtttcagagcctatgtgtaagagaagagggaacaggttattggatgtttgagattcctacagctcaagggcggacagaagagtgtatgctcttcgaaaaaatctggtatgtgattacttacctcttttagccctcccatctgggctattccggcccaaagtttccagacttcgattcggcgtccaccccctgatccaccatcgctacctacgccttttccaattccaaatgtgcccaataatccgccttcgacgccctccccatgtgtgaaccatctgggaagcggagtacctcgtctgatcatgaactcagtaatcatcttgagaaaatgagctgcctgagcttgtttggcttggagttgctgttgagtcacctggctaagttgaggaggctgctgtgcagactgagattggggttgaagcttctgaggcaattgagattggctttgttgttgctgctgttgaggattttgaggttgggatgatggtcggttcatcggagggttgctcaatggggtcgacatcggattctggtttgttggttgcgaagcaagctgttggttgacggcgtgaggggtcggactcgacgccagcagtggtggcggcggtggcggtggctgggaagaaggttgttgagacggctgaaagggagaaacaggcgcggcggaaggaggtctaggttgtctgaacgcctgagactgcgattgagattgagttgagtgaaactgctgaaggttgacaccggtcaggcctgctcctcctgctgttgtcgaccctccaccgccacctccggaaggctcggtcatgtgagaggatgtcgaggccgaggaaagtggtctgggcggttgattgagcgaagctgagctagctggtggaggaaacgcgttggattgcatcattggactaaatcgggcagccattgcttctcgaggcgattcggttgctgtcggtgggttgccgctaaatggggacgagtggtgactggcgttaactggactgctagctgtagccatattggatcgttgacgagctcgccattcttgtagagcttgcatctggagatatcgccaagagtgataagattaagaaggatgcagcgaaaaaaaaaaaaaaaaaa

SEQ ID NO: 2116 - DNA, 11229 bp, Xanthophyllomyces dendrorhous
aaaaaaaaaaaaaaaaagagaaataagagctcgagaacctggatggtaaagacgcgtctcgaaagacgcgtgcgaacgagcagatagaacgagtgggacggacctggcgtatagtatcagaattcatcaccatgctgggagggaaatttgctcctgaagactgttccccgtttccagagttatttcttgccatctgctgttgctgcttttgaaaatgttgctgctgctgctgaagctgttggtgttggagaagctgctgttggagttgaagctgctggtattgctggctctgtggacctagctggttcgggttgatccctgtggatgctgatgacccagcttgctgctgctgctgttgctggttcgctgctctttgttgtagaaaatgtgcgctctgaccgttgccgccggagggtgtccgttgggtctgttggatttgtgtcggtccgacagagaaatcggtgagagcggaagagaaggctgagttgctcgaagacggcctgggagatggttgagtgttgggattagatatgacatttgggttggttgccgttggcgaaacagcattggtggaaaacctggcgagaaaggcctgttgagctgcaagaggattatttccgactgccggttgggacgcgtttgcagagagagaaagatggtgttggctttgggatggtgagggctggcctggggtcggatagatgggtgaattcggatcgaacgagggaaacatgttccgagaattattattgaacgccatgtgaagagatattctctagatatgaaggacaccagaaaagaacaagaagaaagaaaagaagaaagagagaacgcctggatgaatgagaaaaggaaagggagagaaagagagaaggagtggagatgaagaggtgtgggtgtggctagattcggtggttatgcgtaaccatgatgctgcccaatacgaaagtttcagacggctattaggcgttcattaggacaagcttgtagttttttcgatattgttacaagctgtaaggggccgggttatagggttacgcaaggtgactgtagttgactagggatgctcgaggcgtggaggtttaggcttccaggctcagggaagagaggatgaatcgtgattgaatagcactggtagctactaggttatttaacaaggatcctaacttgaagaaccacatcttgaaggagcgcgcacgcgatccttttatgtgttctagctacgatgaagtggccacctggttgccactcgattactaaactacaggattatcaactagagattatcaagcaacagatcactaatccatatcactaatcctatcactaatcaagggaacgtagctgagaaggattatcaagcgcataaggtgaggagaaggagcataacgaaatggaaggcatgatgaataatggaatgtgagcatggtcacgctgtcgtgtatatgttacctaactctggttcctgacacaagctgtgcgaaagctaacacacgtgatgattacctaatccactcctttttgttatccaatctatctgtgatccgccgatgaggattcgaatggactttttaatagaagctcgatgaaattcctaatagagctacggatttaattcgtaataaaaatccatgatacctgtgcactacgaaaattgtcttggccttacgaccgcagaacgggtctttacctgttccttcttcttttcgtgtccgttctccggtgatccccatctcccatccacatcaagagtcaatactacccttttcaaaagtttcttatcgttatgcgttggtcaccttctcttgctccgtttcgcctttgatcgttcatccaggctgatctgctcatcttgggttgtcactcgtaaacaaaaccatcgtgacctgttctattacgcgcttgaaacagcctccggcgaacatacccctcttctctctgggaacccacataggcacccggtcaaggttgcacctaccgctctcgcctcagctaaacatcttctctacagctggttcaacatcctcctcatcgctgttcccttcaccttccttgctactttcttaggatggaggtacgtccgttgaagattttttccccttccctgatttgttttggatcactcggtcgttcttctctttctttcactctgctcttgcttcattctctccctctctctctctctgactctccttcatgttgtcaagacacatatacctaacacccgtctctctatcttacgtctcatctttttctaccacgtagtgctcaagttcgattcgtcttttccttcatctctatcgtccctctggctaagcttctcggagatgcaaccgagcagctctccattcctcttggtcagactatcggcggtcttctcaacgcgacgttcgttagaatctctttcccgtcaaaccttctagataaaggacacagagtctttgtcggcatccgctccgctcatcgtactgacctggttcatttctcggccatattcgctgtttacgatcaatcgtttcaccttccatgcgctatgacgtatgcaggtttggaaacgccgtcgaactcatcgtcggtatcgtcgccctccagcagaaccagcttcgcctcgttcagactagtttgctcggatccatcgtacgtacatctctcttctcgtgctgatagcgaatgagcgtgatcgaccgagattcgccatgctaatcggtttgcatgtatcactatttctggacacttggtgatttttgatcgaacctttctctgctacatcagcttagcaacattcttctcgttctcggtatgagtttcttcgccagtggatttaagtttgcagagtctcacttccaagtgacggccgctcagacgtgggtttcttctttctttctttctttctttctttctttctttcttacaccgtctacgctggccgtcatttgggcgctgacgtcgttgttgccgctacctcctctgtttgtgatataggatgagctcccttctggttctttcgtgcatcaccttggtcgtccccgcggcctaccactcttccaagatcgacagttccgcctcaagctcgatcgtcaactttttggaaaccgatagtagcgcgcctcaaaccgggcttcttcttctctcgaggggaacatccctcgtgctgttcttcgtctacttggcatacctctacttccagcttaagagtcatgccagtctgttcgaagctgatactgaggatgtcgaggaggaagaggtctcgatgggtttgtccgctgtctgtgctcctatcaacgaggcaatcaaatgttgaccgtttgcatatgtgcttcgttcacttttacctaggtgtctgggcctctggtatcgctctcgccttggtcaccatcttaactgccttctgtgccggtccgtaccatttctatactacgctcctcagaaacaaatgcgccagcattaacaagatcgttgccctgtttgtttctgctagaccatcttgtcagttcgatcgatgaaacgtgccagcagtggaatatccccaagacattcgttggtctgatcttacttcctctagtgggaaacgctggtcagtccttctttcggttatgacatacgaacgactgatatagaaacatagaccttgatacttattgtaactcgttgccgtcgttctctattactcttaactttttttgcttctcagccgagcacgttacatctatatggatggccatgaaaggaaagatggagcttgtgatgggtatagccgtcggatctagcattcagatcgccgctggttcgtctattgtctcatgtaataatctcgatattctccgtcgagattggaatgctcatcaagttttctgttgcgctctattccacaggaatgattcctttgctcgtgataatcggttgggctatgggtcgagagcttaccgttcgtttttccgctctcttttttaacaagattatctgcttgtataccatacttaaccccctttattatctatcatccctgtagctcttcttctctaatttcgagacaatcatcctgtttgtatctgtcatcctggttcacgttctcattgcagacggaacaagcaactggcttgagggattgagtcagtcaatctttccttcttttcaagtctgagcttattttaacctttcttccttcttgtttctgccttctagtcctcatggcactttactcggttatcgcgttggcatgtaagttctatcatttctgttcttcagtgtcttgttgattcgccttgtgagaagaaacactcatctctttgaatctattggtcttgcagtctgggtctcataagtagaaccaaccgccctcaagtgtctactcctactttgtcgccattatctacgccgttctttctttttccttctccgtttctttctcaacgtgtagtctattgcagagcgacatgtacccgacgttttactctgtctgtctcaattcttctgatgttccttgatacacgaatgatttctcgctcttaaggagacagagaggaaacattctgcttggattctggatcgatcgttctttactaactgtgaatcaaagttcttggcaatgacgctgagcgtgagtggctacgagatccgtaaccacggttgatcgggatcgagatcgggtaaccgtgtggatcaagtcgatgagggtgcgagtttgatctcggactgtgttcggcttgccggtcgactgactatgctgacttactcggccacgatggacatctgagaccgagagcacaccgatataaggaattctgttttacttctcaactctctcctctctacgttcattcacgcactcgtcaagatggatctcgaacaagataacatacgcaagcagaatcacgagaatgagctcccacttagccctccgttaacgtcgccttctctctcgcatacctcttcttcttcagagaccaccatccaaacttcttctacctcgagtcaggtctcaacgttggcccagaagtcggatcaatccaccggattctcgacagtcattgagggccatgtggcgatgaagagacattcgaaagaacctgtagggttggaagagaaactacatttaccctgttcgttcccgctcccggcgtctatcttattattctcgttttattagaagaagtacgcagagctcacccatgcgcgctacatttgatgttttcctatgtgcgcctacgtaaagatgttccgagagcaaacattgctgtgagcacagaaatgccagacggaacgcccggctggagagagaagcacagtcatcagagcgtgatggagcagcactgtctattttgggatagagatggggatggagtgatctggatgactgacacatttagagggttcagacaggtctgtccttatcttcgcttttcaaacggataatccccttctgtgcttcgtgtccgggaaaacaaagttactgatctaaccgagcgcatgggtggtgatgggacagttgggatataacctcatcatgagcttcctgggcatgatgatcatcaatcctgggttttctttcttctcaggaaatagtatctttcctgatccttgtacgtctttggtatttcttttcttctctcgtttgcatcgctgttcctaacatggttcttttcctctgggcattcttagtctgccggataacacttgcgaatatccatcgggctaaacacgggtctgactcaggcgcatttgatacagaaggtcgattcgtgcccaacaagtttgaggcgatattcacgaagtatgatgacgaaggaaagggagggatcactttttggcagggcctaaggatgttgtacagaaatagatgtatagccgatggtgctgggatcgtcgctgctagcttcgagcaagtcctatccttctgccttttaattgtttcgtttcccagaagagttttgtcgatatcgattactgacccatcacttggggttctctcaataattctagatggatcatcacatacgtgctgttctggccggatgatggggttatcactaaagaacagatgcgcacagtctacgacgtgagtcttgcttcctctgattcttccgtctactaatgctgttatcggtatgagtcttgatctttctgtcgagagctgacgaatgagaagcgtcctttttactctactccggaactacagggctccgtatttttcgagatcgctagagaacgacaacgactaggtcttccgaatgctgctacggatctactatgattcgctctcttattttggcctttctcgtctgggcaccagtgctcgagtaatagattgaaccgggcggccatcgtgtttttctctcaataataatcgttgcctttctttagtctcttttttcttctactcgtgcatgtcctccacggaaatcagacatcgatggtgaaatggacacacgttggtcggccatagatagatttaaggtaaaacagacagggcgatcctcgagaactattagggttaaacgtaatgaaagaatgatatagccgatgacgcgtcgaaggaagaaagcctgcttctcgtatgtatatgaaacgtctatctatccgtccgttttctcataccctgtagatatataatgagccgttgatgagattgatgaggtatagatcagattaaaatgtgaatgatagatgctgtacactgattcatgcgaatgattcacatgaacggaatggaatgacagtgaaaactcaatcgacctatatccatccgagcacagatatctcagggaaacgcccagactcaggaaggcctccaatcggtgtgggtccgattcgtattccccatcacccttcattcaacccactcttctttcctcttatcggacttgaatcccaagcctatcgatctaatagtcccagaatgaatgacccaaacggaagatccactccattagcgccaggtagtcagtttgacgcggtacttcctcagcatctcgctgctcataaggcggctgaaccggccgacttggctgataggctcgatcgaccctgtaaggttctgtctttctgggtcccttggtcgtccttctcgttctcttatgatttttcacgaatgatgacgaactcatcattttgatcgaaactatcgttcgaacgaaacaaaacagatctaccaagggccaacttggcagtgagcgatgagactccggatgggacaccagggtggagagaacaacacaaagatctcagcgtcttgcagcaacactgcttattctgggatagagatctagatggtgtcatctggccgctggatacctttcgagggtttcaccagtgagcccactctcttacgtctcttagttctctctcatggcacggtggctgattagaaatggttcgatgtggaaataataaatttgggagggtaggttgggataccatatcatttggtgtgtgatgtcggtgtttctgattcatagctcattctcctacttcaccaactcaagctggatcccagatccatgtgagttccctccctgttctaagcatagtgagcaggactagaatataaaagacgacgaacgctcatcgtgatctctggctttcataccgttgtcaaaaagtcttccgagtttacttgccgaccattcatagagctaaacatggtagtgacaccggatcatatgatacagaggtccgatatctttcttctctcgtcatctcggcttctcttctttactgctttcgctaaagccttctcttcgttcggtacagggtcgatttgttcctgccaaattcgcagcgatcttcagcaagcaagtcatctttctctcccttcatgcgcgcgcgcttggcatctcgtcccaaagcatagaaggatcaactaaggcttatgatcatgcttatatatatatatggtggtgatgacgatggttgtatagatatgacgaagagaacaaaggagggctgacgttctcggacggtcttcgaatgatctatggaaacagaggtatcgctgatccaatcggttcgttccttgcctctttgtctgttcttttggtccttcttatgctgaatttgagactaacgtacatatgtatgcgcttgtgtatctatcggtcggacaaggttggatcgcggctttcttcgaatggttcgcaacttacctcctctggtggcctgaggacggattggttactaaagaaatgatgcggacgacttatgatgtgagtccattctttcttccacctcatgttttgctccttattcgatctgagaggactttggagactcaacgaaccaatgagtgattttgttcaatatagggctcggcgttcttcctgattgccgagcaaagaaagaaggagggcttctactccgcacctgataatctcgagctgaaacactaaacatctcttggtcttctccgcccgaactgtgtttccttctctctcttttgtttgatgtcctgcttgttctcgttcattcgaagtgggctcaagtgtgtacatgtcgataagatctatggtctgacttgtttacttcttttcatcaatctgtctcgttatacatagatagaaccaagatagaagggaatcctagagcaaagtacagacaagagaggagcaggggagcacaaagaaacagagaaaaagaagaggaggaagaagagaaaaacatttcctaaccggacacaagagagaagagatgggaaagtctacttttgagcaaggagttcctgaatctttccctccatactttcctgtttgtttcgcagatttataagggcaaggaaaagagagatcgttcgtcatttcacgataccgaatgacgggcgaaggacaaagagaggcacaaacaggcttggtggtggaagagtatcgtccttcaacgtttccgtttcggtcgatcaagaactataataaacgtatgtaagcgagagagatgggtgagacagctcgtctagggcatacaacctctgactgagggcgtttggacaaaccttggtaaagttcctattatgtacggacgtaacagagtagatcaataagatagctctcctgaaacagaggcgcaaacacgtgtgagagcgatgactgaccacttgatggaggttgttcccaaaagccctggcttctcggttttgagatacttgaacacttcgttcgtgtcatcaccattcacgttggactggacaaagcatacttcgagatgatgataagagaggcggttttggatgtagattattactgaaatcccaattagggagagcgtaccttggcagcaagtgggaaagttactccgtggttgatctcgcacaccgtggtgatatcgtcatcaccgtcgggttctgtagcattttatattggttcgtgtttgagtttgacggccaaggcaaatataaagatagacgaagcatatattgaatcagccaaacgtaccttgattcccaaactgatcacaagggaatccaacaatctacaagtcgtttggaacagatagcagttcgatcagtattctttctaagtgcccatccagttgaaaattctggatgaagagaagataggacgaacggcgagaccctggtcggcgtacttagtgtacaaagcttggagagccttgtactgaggggtaaatccactgccagagtttatggggaaaatagacagatagaagatggtttcagaagggttgaccttatatcggatgatgcaaggcggatcataatcatagacacgaaccactttgaggcggtgttgacgacgaggacgactttgcccttgtaatcagaaaaagggatggtctttttcttaggaaggttggcctagttttcgattacaaatgcacaatgaagaagacgcatacgaggacaacgtcaatccgatggttctcaagacagagcgcatacagaaccgtaacttacgacaagagagtagaaggagtcaggcgtgggagacatttttgagattgaacgaacgatgcgagtggaaggtagattggcagtaagagttcggatagggaatgacattcgcagacaagaagatcaaagaacttgtcctctttaaagcaatacgtacagagtaatagaacccggtcggcccgcacgaccaaatcgatcgaccccgaaaacgccggcataaaagttatattttgatcagtttgttcagtctgattgttcattcgtatgtgcgcccatctttaacgtgttgttccccattgtctgtctctgttttcatcattttcttcttttttgtatgtataatactcttctcacgttcttctcagaactcatcttggatatcgaattcctgggtccaaagaaacagagaaagggaagaaagaaccgaacgttgtcgcctcttccttgttctccctctgggtggattccccatccatctccgacaaggttaatggccggtacataagcgtaaatgtgctagggttggttgacaatacatcgtaactgtaaccaggctatgcaatccgagaggtgagcggcagtgggctgactgatgacatcactcatcccatcccggttgatcccaggcttatccaaggctttgtacaggctctttgggtttccttcaggcatctacccaaccccgcaggaaatttcctctcctgacgggcttgtggggagaatttcgttttcgttctgtccccttcgtttttttctcctcttttccttcttttttcccgcttcttccatcacatacaacttataacactcatcccaaaaatctcatttacctactctagacaaatctttttaaactttcatttttgtttctacctatgagtatcgagcctccaaagtttttctctgctaccgaggatgacgctcccccgaggaagctcgccgttctcacctctggaggagattccgccggttcgtcatatttggcttcctgagccttttatccataacgttagcttctttttcttgtgctcatctactaacgtatacgctctggttcttgtccttttctctgtccctcatctgatgatctcttaggtatgaacgccgctgtgcgatccgtcgttcgaatgggtcttcagtcgtaagtatttcctttccctgaatcgtgtcttggcgcctgcgctttcacggtcgtaccccatttctcaatctccttttgtttctgcgtccgtttccatagtggctgccacacctacgtcgtccgagagggttgggagggtcttgtccgaggtaactctcacgtcaacaagaccgtcccctccacccccaccacc

SEQ ID NO: 2117 - DNA, 6662 bp, Xanthophyllomyces dendrorhous
tccccgtctaccattcccctccccatggcagctaaccaggacccattggcttcgacccttaaacctaagggcttcatggatcagcccttgacttttggaagtggagagctcctcaagtaccaggtgtacgacagtttggaggatgaagatgaggctaacgagagcccagatgccggtcaccacggaggaaagtacatcattcgagtcggatgggatgatgttcgaggatggttgggcgaggtatgcctctgttcttagtctctttatacatctgcccagccgtgctaaacatcttcatatactccatactttccttctatacagggaggaacccttattggaacagcccgttcggcagcttgtaagttccatcagatactctcgttcatcacattgttcttcgcgttgacccaatcacacacctcgttaatcatctcaatctcatctgaactccagtccgaacccctgagggtcgacagcttgctgcccttcacttgattgaacagggaatcgactgtcttgtcgtttgtggaggagatggatccctcactggagccgatttccttcgaaaggaatggaccggaatcgtcaagattcttttggagcagggtttgtctacctgaatttttatagcatcaaagagcatcggctgacagtgtgtttgtttgataggtaaaatctctgaggtccaagccaagactcacaaccacctcaacatcgtcggtctcgtcggatccatcgagtgagtttgatccgttgttttgttagctacagctgtctgcttgattcgactgacgatgcctacttaatgattctgtagtaatgatatggcgatgactgatttgaccatcggaggtctcaccgctcttcaccgaatttgcgaggccatcgattctatctcgtccactgcttcttcccattcccgagctttcgtcgtcgaggttatgggtcgacattgtggatggcttgcgcttttggccggagtgtcgaccggtgcggattacatcttgatcccggagaagcctcctgcgagtgatgactgggagtctgagatgtgtcacgtccttcagggacaccgatcgcttggcaagagaaagtccatcgtgattgtagccgagggagcgctcgaccgaaacctccagcccatcaaggcagcccacatcaaggacgtccttaccgaccgacttggtttggacactagggtcaccactctcggtcatacccagcgaggaggagtgccctgtgcattcgaccgaatcttggccacccttcagggagttgaggccgtcaacgctgtgttggaggccaacccggagactccatcatacgtgattggtatcgttcagaacaagattgtcaggaatcccttggagaaggctgtccaattggtgggtattccttgttgctttctctttctttttccgaaacacttatagtttcgacacaggctaagcgtaacgttttattcaaatcatttgaatacagactcaagccgttgctgaggctatcgagaaccgagatttcgacaaggctatgtctttgcgagacgccgagttcggagacaccctcgaggctttcattgccagtgctacctctacccacgatcactctttccgattgcccaaatccgagcgaatgcgagtcggtatcgtccagtgagtggcctattttattacgtaaatgcaggtgttggacatattaatattctaaatgctgacattgggattctgtttttttttttccttttccgaaaactagcgtgggagctcctgccggtggtatgaacgccgctactcgacaggccgtccgatactgtctctctcggggccacacccctgtggcgatctacaacggattcgccggtttgctcgacggaaacgtatctgagcttgactggctccgagtggacggatgggcaacccggggaggttcagagctcggaacgaaccgaaccttgcccgatgttgacctcggtcacgtcgctacggccttccagcagtacgagtttgattcgctcatgctcatcggtggtttcgaggccttcaatgcgcttcacattctcgagcaggcccgaaagtcttacccgtcgttccacatcccgatggtccacttgccggcgacgatctcgaacaatgtgccgttgaccgagttctcgctcggaagtgacacctcattgaatgcgttggtcgaggcttgtgatgctatcaagcagagtgcatccgcgagtaggaaccgagtgttcgtggtcgagaccgctggtggaaactgtggctacatcgcagcgatgggagctttggctgtcggagctctctgcgtgtacactcctgaggtcggagtttcgctcgatctcctccgaaccgacgttcggttcctcaggaagcgatacgagcttgacaccaagggaaagagtgaaggtcgactgatcatccgaaacgagaagtcttcgtcggtctataacaccgagctcatcaccgatatcctcaaggaggaaggaggcgctctgttcgacgcccggtctgcctcgctcggacacacccttcagggtggaatcccttcgcctttggaccgagcgcgagccgtccgattgtcgacccgatgtatccagttcctcgagaagcaccacttggctaggaaaacaaagactgggctccacaaggctcgacatgacgagccttcgccagagtacgttaatgagtctgcggctgtgatcacgattcagggctcaaagatcatctttgccccggtggaggatgtgttgaaggagacggacatgaagaagcgacgaggaaagcacccgtggtgggcggacatccgggctcttgtcgagcttatgggtggtcgaaagggtatggccgagggttaccatcacgacgagttgaacctttaaagaagattacaaaaacaaagcataataaagaaacaaagaaaaagagtaaaggaggtggagtttatagtgtctcgtgtgttttccaccatgttttctttccttctctccccctcttctttttctttctcttctcctaatcacctccttttctcattctcttaaccggtctacttttaaatgtatcttgtagcgattttcttttccatattagagtttgttatttcccaagggattgcctgagtgatggtgaaagcattgccatagagagacacaaaacaagggaaaagggacattgtttcgacgaaagatatagagatagacagataatacaactatttgacttgagcacaatctccactgtcgaggaccgagccaggaagtgaaatcgagttagatccgaggtgttgattcgaaaagaataagatgagaagagacccagatcagaagaaaagacgattaggagaatccggtcacacgattgttgacacaacagaatacctccgggcgataaagagcgagagatttttagccctgacggaaagagaaaagaagcgataagcatgaattccatcctcactgtggagactccagtagatacactgtgtcctcacagcggtacaccggcacgtctggggcatctgggggcatctaaggtcggcgatctagaattcgaaaagatagagttttcatgaatcaaattcggatagcggtccgtgggcgtgcgcagcgatcaggcaccttggcagaggcacaggtgagggggacaggggcggttgaaatttcaggcggttagtgcgcaaatcgcgctgggcacagaccgcttatggtcggtcactcaccgtgcctggctggtgcctgtgtatctgtgcggattgactcgatgagacaccatccacacgatacttaaagaacacgctgtgtttctgtttctccttcgttctttccctccatcctattcccccatccacacgtacctttctcgttccttctctctcccgtactcttttcttttccttctcttgtccactccgctccctcccgttctatcatgaagtcctctacctctgctcccgcgttcgctcacaaccctgctcttttggctccgtatctgactctcgaccagggaggaaagattcaggcagaggtgagaatgtccttcaacattgccttcgtgtactgcctctctctctttcgctcgctctcagactcacgcctttcttccttatgtttttcgcacttgtagtacatttggatcgatggtgatggtgtacgtcccgttatctctctgggtcgtttgacaatagaggggctccctcgcgctagaattaatttcccgaagacgtcaagctcacttcttattggctcgtttcggtctctgtatccgtgctcgtgcttttcgaatcttttcagggccttcgatgcaagaccgtacgttttctctctcttgcctttactcgttcgcgcaagatcgtacctctaacactatgttcttcctccttgcctgaccgttctttctaggctactgtcgataagccagtcaaggatgttgccgagctcaaaggtatgggcgtttgattgccttcacttttcctttgctctttccccaaacattttccgagtgttgttcccggcaaccaacccataatccttcaccttctccgatgttcgattctgtttttcccatctagaatggaacttgtaagttgttcagcccgatctctgtcttcctcgatttaaagaaatccttatctcaattcgattgtcttatcttttctccctctcttagtgacggatcttccactggacaggctcctggacatgactcggatgtaagtcttacactttgcttctcgtttgcttgattatgtattgacccccaccttggatttctcttctatttcaggtttatcgtaagcttccaacttgaaaggtccgaactgtcaacgatagattcatcgtattaacatatcgtctatgccgcacgatcttgcagtccgacccgtcgccatcttcaaggatcctttccgacgaggtgataacattttggttctgtacgtattcttccttgttgtttttcaatgttgtctgccgctcatccggccctgtttccgatcgttcagctgtgagacctacaacgccgacggtactcccaacagtgagtgcatcgatcacctatcattcagcttagtgtaattactgatctctcaatctaccttatcgtcttgtagagatgaaccaccgattccacgccgccaaggccatgaaggccgccgctgaggttcgcaatactttccttcacgctattgctcctttcaccaatctgatgtccttttgtgtcgaatatagcacgagccttggttcggacttgagcaggaatactccctcctcgatgctgatggctggccccttcactggcccaagggcggtttccctggtccccagggtccctactactgtggagtcggaaccggaaaggtctttgcccgagatttgatcgaggcccactatgttcgttacacctggcaaacttcttttattctctaaccactgttatactaatcgaactcctttcttacatcaaatctagcgtgcttgcttgtacgctggtgtgaccatcgctggtatcaactctgaggtcatggcctctcagtgggagttccaggttggaccctgcactggtatcaacatgggtgatgagttgacgatcgctgttcgtacctgatttctctattcctaccttctttacatcaaatccttgtttggatgtacatgcttaccatcattgtgtatactatctcgtttatcagcgattcctcttgcaccgagttgctgaggagtggggaatcaaggtgaccttccaccctaagatctgcaaggatggagactggaacggagctggttgccacaccaactactcgaccaaggagatgcgagcccccggaggaatgaagttcattgacgctgccattggcagactcgccgagaagcacttggagcacattgccgtatacggtgagggcaacgaggatcgactctctggaaagcacgagaccggtcacattggtgacttcacctccggcgtcgccaaccgaggagcttccattcgaattccccgacatgttgccgcccagggctacggttacttggaggacaggcgacctgcttccaacattgacccttatcaggtcactggtatcatggtcgagactactcttctctaaatcaaagtggtttttctcttttctcgcatcctttagcatcgtgtcgggtttcttgtcgtttcgtttctcttgtcgtcttctctttcgcatccctcgttcttgtcgtgcgtggccgttcttcccccctcgtctcttcacacgaacgacgttcgggtaatttgttccttctccttcgatcagttttcttttgagttgtattgtttcagttttcttcacatacatcgaccctagtcgactttcatatctatcaactttctttttctctttcgggccatcggcttcgtttgccttcgtctgtcttttcttaatatacttctcttacacaatggacacaatacgcatgtcttcatcaccaacagcgccgatgataagtggtggaagcacagacacacattgttgaaaattgatgccagtcttggaccaggttgagctcagattcagaacaggttgatccaatgagcacgccgccatttctcttttttctctgtctgccgcccgtttacatcaactcgttcattcatcctctcatcctcctctctcaatctctccatgtt

SEQ ID NO: 2118 - DNA, 744 bp, Xanthophyllomyces dendrorhous
gtgtatcagaagcttatctgctgggcctgtctttcttgctttcatccgatctctatgtgacacaggcgttcaaggggttcaccaagaacaagcctgctgtggtctctgtggctcgactaagccagatggcctttgctgtaagatccttgtctacatctcatcttgactgtgtatccgttgatcactcttctgacaagagccctttcggatccttatctgtttatctggaaatcgtatctaggatgagctcggtttcaactaaattagattcgtttgcaagccgggaagaggatgtctggagacgtacagagcgcacgaaggccattgttttcaccccgtgtgatttccgttgatattcgagggagagggagcagtcgggaggggactgaataaaaccatgaatcgttctttccttttctttctttttgattcttcttgacttgtttccacctccttgggtccaagagagctttcgtttctgttttttgttgtctctttcttttctctcctctctttttgtttttttcacccacctcttattgttcttctgcttagtcgttctttctctcttaatatctgaacttgatcttgatctttgatgtcttccctttccaacggtcacaatggcaacggcaaggaaaagagacaagagacaaggagacgaaagaaagaaaaatctaatagcacgcgtggatgagatgggggtagtcaagacaacgaacatctttttttaaggggagaaac

SEQ ID NO: 2119 - DNA, 2450 bp, Xanthophyllomyces dendrorhous
gaaagaaagaagaaagagtgaagggacagaaagaagacccgatggttgatgtcgatgcgattgccgatagcgatgagaagatagagaggcaagggatttcaaatgtttgaattcagaatatttacgacctttccggggacgggaaggtaagattgaatatgaagatcatttgctggtcagttttccgttcacctcagtcaaggagtaaagcaagggaaaggaagagagaagaaacgtacatcttgtactcgacctttgcgccctgtacggcatcgccctccttctgaacgtcaaccttgtaatcgatcacaatatccaaatccctagggttgatggcgttcggcttgcaatcgagcgtacccctgatggtctgaccttcagagatggtgatggtttccggggtgtagaaaacggtttgcttccagtgggtgtactgtgggcacaacaaggaaccagagaaaacaaagaaagattgtgagaaagaagccaggttgagttcgaagagaaaaagggtcaaaaaagaggatctcttaccttagcgtggggtccagtggagaacttgacaggcttgtggcagcaagcgaagttgatgtcgaaccaggagaggaaagcgtgaacgtctgatgataagagttgattgcgaaacggcaatagttaagttctaagcaagactctttctaaagcaagagacaagagaaaggagtcttacagtcgtttcgggtggcagtgacctcgaagtcggccttgaaagtaagatcctccttcttgacggtgagcaagtcgaggtgctattcacaagaaataataaaccatcagaaatcttgatctgaacgaagtacatggagaagcaggaacaaaccttgatggtgtagggctcggtaacaacgctcttcaagtcgacggtatcgaccaacggctcccgcaaggcaatctccttgatgcacgagtagtcgaaaccgtagacgtcgtcccagactggttgcgtcgaaagatatggaaggagatgataagtagaatagggagtcagcaaacgacaacgcttcccatcaagcaaaccaagaggacgcgtacagttgatcttctcatctttgtagtcctggtcctcgatggcggcaatgtgcatggtagcagtgtcagggaagatcaatccaccaggaacctgagcgattttgaaacaagaacgaaaagcgcgcgcagaagacaattttttaggcttgagaacatttaaaaaaaggtgaagcacatggccgaaaaggactcacaaggtacttgtctcgggcgagaaggacggtgtcgagcatagactcgtagagaaggaagtaacccatccactataaaagacagaagtacgtatggttacagtcagtcatttggcagccttcgagagaaaagatccggaaagaaagctaacctcggagataatgatgtcaaccgacttttcaggaagatcaatctcctccatcttgcccttgatgatggtgatctctgtgaagttacatccgagacaaaccgatgagcgctgtcatttcaggtagagaacagaccggaaagagaaacatacgatctttgaaaccgttggcctcaacgatcttggtggcctggtcggcaatgttggacatatcgatctgaaaagatagagaaggaaagcgcgttcagagaaattcgaaactacaattctacaggatcgactcacaccgtagacgtgcttagctccggccttggcagcaaacatggagagaataccggttccacatccgacctaaacatcaagaatttgagtgttaacattgtccgttgtctttctactagctgttgtgacagccagcgcacaaggatcgagtagaggacgtacatcaagaacgacctttcccttgaaaaggtgagggttgtcctgaatggcctttcggtaagagacagttcggacggtatccttgagcatctcctcgtgaattcctaagaaaagagagaaggaagaataagacacgtgtatagtgcacacaagagagcggaaagagccataccgaagtgagcgtaggagtcggcgtagctattgatatgacgagcagaatttcaaaactcatcaggtcagcaattttcccttctctctctaaacgcatgaatttgtgacggaatgaacgcgaatgatggtcttctgagaaacccgagatccaaccaggtggtggaccaagagacagctggttccactcgaaaacttgccaagcatgatggaacacgggaggaaaggaagcgatgatactaactaatccctggaagtgaggttctcaggcttggcactggcggccgaagcagaagcggtagaagtagaggcctccatggtgaatctagggacaaagagaaagggagaaggtgaagggaaagaaggaaagggtagtggtggtggtggtcaaggaaggtctatgaaaaagattgaagaaaaaagaaaaaaaaaa

SEQ ID NO: 2120 - DNA, 30809 bp, Xanthophyllomyces dendrorhous
aagaaaaaagaaaaaaaaaagaaaaaaattaaagaaaaaattaagaaataaaaaatataaagaagagttcttacataagcaaaccggtccggttcattcaggttcatatgccggttcgtctctggctgctggcactcgcaagacctattccgtctgaaacatcgtccagcatcaccttacatacgaccaccatcatcagatacactaccagcatcttctgttctcatcatgactgtcaaagagcaggaagtccttccattcccagctagtctgttcagcgatcttccctcgtaagttctctctccttcggcagttctgccttgctcccactcggcactgaaacacaccgtcttccttgccaagatagactcttcatttatgtgttcatcgctggaatagctggagttgccgtccgatgggtcaacaatagatattttcgaccggaatcccgaggggtatgtgtttttttttcctttcttttctctcctttcttgcccagtatcctatcgcgcctcagtcaggctcacttttcaccgtacgcgtctcttagctcggacgaaatgctccaggattcctcacctcggttcgaaaggcatatgtcgagaacccaaacccgggtcgacagatcgtcgaggttgatcaccgacatctctaccagtcagatgttcccgctccgtcatcaacttcgacctcgactggaacatcttacgcgtcggccgtaaagtcagaagagaagacgtgggaggacgagtggttgccagaaggaattcagaagaagaagacggctaccggcggactgccagggaagaaatggaagggtggaaagaagtaaaggtttcattggcgaatgagtttatggagtcaacactactagagttcaaacatgggttatttattcctgctttcacctctacgcctgtcgagattgaccagccgagatcgagacatccacaacgaactaacagatgcctcttcagacaaacatcgtctgacttggcgaacgcaaactagcctgatcccacagaaagactcctgcctttgtactcaccaagatgtgatttcgcttgctgaccgaaacaggaaccgcgcccttcttcttcttcttcctcctcttcacctcccctttgtttttctttgcgccctttgcttgctgatcttcttctctctcctccttttaattccactctttctgtttgtttctcgcttgtagccactgaccatcactcgtccatacgtcttccgcggcctcttccctcccttattccctgtcctttcctctttttccgtctgctcgacttgtgcaatcatggaatgggacgctattccttacgaccaaatcatatggggagaaaaactcggtcagggtagtttcggagtagtcttcagaggtatgtggtcaaggacagccatgtgtgaagttctcgtagatgcagatggcttgtctgcttgttttcgtagcccctcttggtttcttcctaaccttcggatattcgaaattatctcataacaaaaccgatcgcctcgaatctcgtgtacacttggccaacaggcacatacttgggagttgatatcgccatcaaagaggttggtccatcggaccttttgccggttccacaatcttttcctataaacaggaagggtttccttagctgacgtttcgatctggtgttccaggtcctgcctttgaccgattatgaagttgccaagtactttgaaagagagtggaggattatgaggttcgtccgtagatttcaaagaagggaataggataagacgaatcaggaagagaatctccgaagattggacttgttgaccagtcggtgttcatgatccgtcaagcctcttacagagaagcaaggcacccaaatgttgtgcaggttggttcatcgtcatacaacatctatcattcgccttggactaaacgcactcactaacatcggattcgttgttgaaacgtcagtatttgggcttgtcgagagctccgcctccggacggtcggactttgttcgtttgcctgatatctattctggccctgatgttgtggccttctctacgttacttggtgtactgaggttggcttccattcttttcctttcgcgctcttggttatagtatcatctctgaatgtatcgagaacggtcagtatcactccactatctttttctgctctttttctttctgtccttcatgccctggccgggctatctgatctgtggtctatgaataaaggcaaccttcgatcttacatctgggacaagcgcacataccctgattttccatggaggcttcggatcagcttcgctaccgatatagccagggcgctcgcctatctacacgctcgaaaggtcagacttgattgttctctcctgcatgcccgagatgactagctgatcctgatgaaattcttaatccatgttgtgctcatctctactttgtagtgcatacatcgggatctgaaaggagagaaccttttgataactgcaaacaagcggatcaaaatgaccgatttcggttcgtctcttgagtctgtctcgtcatgtagtcagccagcaaagtgaaaagctgaacgtaacttgtgttgctttcatattcctctgatgaatatgctcaccaaacgtctatactttcacaatcaggttttgcaagaatagtagcgagaaatgaggatgaaatgaagagaatgagttattgtggaacagacggctacgtaagtcgaaaactggtcctcgtgtctcatcgctgcattctttctgatttaatttatacgtacacgtactttgtggtcttgactgatgtggatctgatgttttggctgatacacaaaatcagatggtacgcccttttcaatgctttgagagactgcaggcggacaaacatgctcgacaactcacttctacgaaacctttcttctttgatagtcccctgagatcttaatgggagctagatttgacctgcccacagacgtgtagggatctttcttttcattttgcgcttagaggataccttttggctgatattttttcctgatataccgagttcaatagatactctctagggatcatcgtacgtctttagtctctcttttctattttatcatgagcgcagtttatgatttacaaacgatcatccgtgtcttgtcccccagttctgcgaaattttgtctcgtcgattagtagacagcaacacattcaagcgaactatgccgacattcgagttggacattgatgaagtcagagatctggcttcgcctggatgtccggaggcattcatcgatcttgccttggaatgtgcaactgtagaggtgagtacagacttaccactatctattatatttatgggaagagcgcgcactcagttttgaactcttctacattagccaaaatgtcgacccaagatggaagaagttctccgtagactccgtgtgattgagcttgatgtcctctccagagagaaggaagtcgagcacgttggttctctgaaacttgtacctagacacaagtcaaatgcgaacaaacgaattccttccttcggtcaagagatcgggaaagaacttaaacactctacttcgtccggacataagccgagtacttcacgcacgcaaagagctggacgcgaggaggacggttcgacggaagatgaagacggggatatggatcaagaaaatttgaaggacatcttgaaagatctgggacgcgatcatctcagaccgaaagataacgcacacgacattattgacggagagaaagtaagagaagggggcgcgcggaaaaaagccaagtggggaaatgacccggttgtgccgagaattgttggagatgatgaagggaaggaaggtggtaatccatcggtctacgaggatgcgaatgaaacaatgggttcgtttctttttcctggtctgcctcaaaaggaaaaaggaacgtagttaatgatagttttcagaacttgcaggttatcaacacttgctctccgatgtagcgatctacactccttcagttccctccaacctttcattccagtttgatggtcctgacctagacgagaataacacagctaccatcatcctgcctcgatcatcgaccccagcctgggaaaatcatgaatcgggttctacgttgactattcgtgaacgaataacggtggatccaaagctgacgagcttgatcaacatacctagtgaaattccaatcacacctcctcccgttgaggctgcgcatctagttgaccaagcggcctcccctccccctgtgcatgcctcccctacaagaggctacgcgtttactccctcgatcgaatccgatgccttttcacctcctgatgtgcctacgtctatttcagaaacgtatccatccaagatccgggcggtagatctgcttgctcgtgttcgacaactcgactctcatggacgaccttctactagttcaacttcaggatctaaaccacactcagcacaaggccagactcaagtgcaaaagaaatcaacaatgacccatcggttcacgttgatcaaaccaagcttgaacggaaagatcgcgcccgtgacagggctgatcggatggggcaactggttctcgaacggtctggcaggatcgatgggaagtggcttgtcaagcgcaggaagtacaacctttgattcgagtagattgggcgccgttacagaaggcggacatgccggaaagctcaaatgtggagtttgcaagattgttcgttgcctcctcgcacctttattttccccctgtccccattcgaactaactgtttttggagttatctgctgatgattttgggatttggtattcatcagaaagtaaagccttctagaccgttcatgtgttgtgacgactgtaaacaagtcgttcatataaaatgctctatcaacaaaactgtacgttcatatacctacacatgatatcgattctgttcttttcctgaatgttgaatggtggtctgtctttttgggttcgcttaattcttgtgcgggttgaaatagacgagctgccaacctgtcgatgctccctcgacggcgtactaaatcctctgtattcatcagtgtcctgtcctctcaggtcaagctatatacatccttgctacattatatcaacaacttgcctagtcttctggctttagctttaactcttcgtggacaccttcttttcttcagtactcttgttttgtttgtctttctttggcctttgtgcctgtctgcttctcatatgctcctcgatcatgttgtctctataatttacctcgtttctcctcttgttttgttgaatgatacctgccatatgacgcgatcgttcgtgtttgtattcatcgcgagcgtatcatgctccgctagtgacctctccattcgtttgtgatcctgggcgtacatgtgtatcaacgtgaagacaacgcatgatcgtatctacagcttttctctggatgaagaatctttactaccgatatccgccagcatctgagaaagatggaaaacacagaggaagagaaaccgatcagatcctcgtccatccaaggaatcaactcgacttcagcagcaagaatatatgcttacacttcgatcgtcctgtcgtaggcgtcccggctcccccgcctgttccttcacctctcggtctcctatcaggcgagtccagatagtccattctgcctttcccgttgaacctatcgagcatcgccttcaccccgtcatctcgctctctgtctttccgagcagcatctctccgctcggatttcttcattgagctcgagctcaaactgtctcctcctccacctttggactttaatgacccgtacttgctcttatcaggtcctgaaccagacgaattcgaagcagaaggtgaagatggagcttgcggggaatccattcccatccgtctcaagatggaaggctgaattccagaagcaggagtcgactgtaagtcatttccagcgttgaacttgaaggagaaccctcgttttagacctgttgaggatgcagatgagcccccgccagattttcgactgtacggcgggttttcttggagatattctgcttctagttctgtaccggttccgccactgacgtaaggccggggggaatcatctgattccgggccgtccttggacttccttctcttcttcttttccctcttctcggatcggtctttgactcgtcgagagctaatgttagtgtggttactcgaatgccggtcgtcgtctcggtctcgatggcttcgatccgattttcgatctctcttttccgatcggttctctttatctctcgactttcccttgatgctgattccgttggcggcagaagtcgatggtttggaagatttcgaccggttgaaccaatcgtcctcatcctcatcctcaccctcgtcctccctccttctcgttttttcataagcccgatttcgttctcgttctcgttctttcccacgtcggccgacgttctccatcatgtcgggtacttccgacgtcgagccagagttaaatcgagtatgctttgagggccgagacgaattagaggtggacgaggtagatggagtccaaaaaggtgaattcgaggcgttgtaggaggagaaagcggaatagtcgacaatggggattcgagagcttctatattgagggcaatcctgtgaaagcgcgcacaccaaacatgcacgcacgtcaaaccagaaatcaataccaacgtcaatcaatcggcaatcaagatgaagaaaacacgcacatctccgaaatgaccatccctggcacaattgtaacaccagtcacccgacccatcttcgtctccgtctggatccgcctccagcacgtctccctcaaaaccgccttctctcttgaggtgctgtcgttcttcaagcatctgtctccgatcgtccaacgttaaataagagtatattctccataaggttgggcagttctatatgtttaaaaatttatggcagaatgacaaaagaacgattaggcaatcacacttgcataaagcccgaccagaagaaccatgggatcaaacttacattactgagatgtgtatccgcgccacatctatcacaatgtgtgtttcctcccccatatcggttatatctctgagacttgggagcaggacagtcctatcaatttcagccgaaagaaatcaaatgaaagttagcacagcatatctacaggtgtatgtcgttggtaggaaatcaacttcttcacgtaccttaacccgatgtccacgctgtccacagttgaagcaagtgagagctacagggcaacttcttgttgaatgttcatctatagctccacacgtcaaacactgcgttgttgatgccaaagcacagatcaagattttagtttgtttctcttctttctctattcatgaggatagattaaggtatttgagtagacttactacttcttgtttgcattcgcgctgagtatggcccctctgtttgcaaatattgcacacaatgcttgcctttcctccagatccaaactcttcaccatcagggacggtatcaaagtatctagtgatctgttatgatttgaagagtcatcattcttcgataagcacaattgtcagatagtaagagtcaagaagataggacaaacctgtttgtcttctccgtccaaaaattcgatcttgatgagttcgtcggcaaaaacctctgcttccgtcaacggagctgcctccccctgttctctatctacagtcggggcggagacttccaacgtgatgtgatccggcaatatcaacccgtctgttcccgttcctgtcgtatctgcactggcaccatcagcagtggtttcctgttctccggtggcatttgcggttgaggtaacgaccggttctgtctcccatgctctgtttttctttactgtctgaggggcaatatccacaaagaacaatgacgaatctacaggagagccgggagaagatgagacaatcggagttgaaactgaggaaggaggtggaagtgtcgaagctggtttcgatacaggtgacgaagttgacgctcggttctagtttcgttccaatccaaaggtccaaccaaaatgacagatcgatcagctttgggaagaatttgactgattcaaagaggagaacagtccagatctatcctacaaatatgcttacgtctagagaagacgaaggtagaagcaaaatggaggacgtactgcgttctgatcaccagctgtatcaactacgaacaaattcccacccatcagatcatcctcaatctccccttcttctagtgtttcttccacaggcgattcctctatcacttccacttcgctatcgttcttatcaacagcatcggtgtcaatatctatcacttccttcggttcattcttctgaacgacgataggttgcccgggttgtttttctaaccgtttgggtgcaggagaagccttttgagagcttggcttcctctttctcgaaaaatgagaaaccatctgtccgtctatagtccgttgggtgtgtacgtgcgtacgatcctgacaagactgctgctcctgcctacttgatggaggagaaggaaggagataattggcgagatacctctaatcttggcttccgtttccgtttcgacttttcggcagcctttcttttttggcacgattacgtaaccgatgactatttggagtcagggaaaaggttcatggcaagaatacagtcatagcgcgaagatatcaaatgaaggagaagaaggcgaaaagagtccattgcgcggatagaaatatgtccaaaaaaataaccataggtacagaagagcaaggaaattgagaagaaaaagaggggaggaaaaaaagaagaagccaagggatgatactgatagcagtagtcaagagacgtatgaacactggattgccacaatcctcttcagaacgatctggacaccatgactatgaggttaagcctgccacgtccaatcccaatgactgtgatgagaaaagaaaaacgtcagtcggtatatacaaaagaaaagaacactgatgtacggcaaacacgaagatgggaagaagagggagagaaacgaacctcgatttcggccagggtgaacggacattcgaagctgacagagttcttgatcgtaggcgaaaccgagatctaattagatgaggcgaaagaagaaaaaaacagcgttccgtcaagatcaatctaaaccttgtcacccagatgagggttgaaacgaatagcagccgtacacttagtaccgaaatcgacatatcgagggtataatccaatgtaaggtcctttttagtggagcttgagagaaagccgcaatcgtttataatcttaatgtaatcaaagcacacagaatgagggaatgagtcaggttagacagtgagatgccttcgagagcgagcaggcttacatccgtgatgatcgttttactcgtatcggttgaagattcatagatcagctcgaatgggacggtaaatgtggttttggtattggatttgaatctagatgacacgtaattcaaggaaacatgaaaacaggtgagaaattctgcgcgatgcgagatgtcgatcaaacagaaacgaacttacttgactgattttatggatctggtggtcatcggttgccatcaattcaggaacgtccggagaaaatatcaaagagaaaaagtcagatattgaatgtatattgtccaaagatttcgcttgatagaatccgaaatttgaacgatcttacccctctccgactgatgagatcgttaagaaggaaacgcagatagttctcaatcagtctaggtagtcttcacaacgtcgatcaaagagagaactcacctgagttggtgacatcgggccagtatgcgagagcttccacgttcttgatcgacgcagaaaagtagtttggattcaatacttccaagttctagtttcagcacggtgtcaccatgaacatgtcagtcagtcagttgtacctaatagcaagagagcgaaataagaaactggacgaacaacattgaactctacggtgagagctgtcccgttgtaagcgggtgtgccaactttgacgctttgaacgatgatgtccggtggctgatcgatcccataattgaaacaacgatctttgtctgtcaaatctcaaagacttccaactttgtggatgttgagaagaaaacgaatcaacacgtaccttgatgaacattgccaaggagaagacgatcgacaacagaaggatgatcccaaacatcaatgtgcaagcaagacaacgtccaaagaacctcaaacctccgccctggatacacacaccacggataattcttgatttggtcaggtgattgtgaagattccctcaacgtgttgacggtcaaatgttgggcacaagcatacataccctcataaggatcttgcccctatcctgttttctccattcacctacggatatcgtcgggggcagagcagcgagaacaataggaggggcagggcggacgtcagctttctctgggtcgacgcttgatacaaaggtagtcatagcgagaatgggcagatagaaggtcgattctccctgtacggaggaatatgtgagtgagtgagtgagtgagtgtgtgtgtgtatgtgcgtgtatgtgtatggatgcgtgtgttggtatgaaggaacaagagttgcaaggaagagagcgatgcagctcaaaggaggaacggaagatcacttgggcataacagtacagggtccccggaacctcttcaaaagaaggatatggaacttgaggaggaacatcaacaactaacctaacaatccagtcgaccgagggggcgccggtggcttctcctctccatagacagcgtaactgtaggcggattgacgagcatagccagagccacctgttgcgtagttttcgtatggtctctcttgggtttcgtatgctccttgcgagactgagaggtgaccaagcagcagtatcggcagtagaagcaacagcagcagcagtaacatcatccgcaacatcggcatgcatcagcagcagcaacaacaacatcgttgaacagaaatagtcgcaacgactttacaaaataagaaaagagaaattcctttacacgcaccctgaccggaatacggatctctgtatgccatcgttgatgctgacagtggaatgagagcccgtagtaaaaaaagaaagcaagctcggtgtgatggtcgagagagacgttgcttgatgcttggccttgttgctgctgatgtttcttcggacagcccctctggcaaaaaaataggactgcggaagagagaggccttagatggtgaatcctcacacatcaactttcttgcctcacacgagcacgaacagcgcataggtcgtatacaatacataaccagccctttgcctatgagtgctgtgtttaacggtctgccagcagatgatacgaatagaatacaacgaagctcattctctaaatatcccaatgaattctttctgttctacaaagttttcctagtccaactcccattctcacttcaactcgactaacttgccatcttcggtaatctggcttcctccgccaacctcaagcagatgccagtcaacctcaactccgttctccaggaatttcttttggatgctctccgccaaggcttcgaagccgtgggtggccagagcgaggacagtcggtccggctccagagagacagattccaagcaatccgggatgggtcgttggagtgtgggaagaaagcacttgaggaagtccaggaatctattgtaggaatgtcacaaaagtgagagggatatacgattggggaaaaaaaagaagaatcaaaggctgtcagtatcggagaggttcgtgttctcgcgcgcgcgcgtgcggatttcaatatcatgacaagccgccctcaacaaaagaaactacatacaaggacgtttcggtaaggctgatgaactcggtctttcatagcttcgtagatcagatccgcatcaggaggggatcgagcgagcgctgtggtcaagacagccaatcgttgcaagttgaatacctggtagaagggaagtagaagagaataatggacgacagaaacgaaagagaaagaagccaaggtgtcaccatcgaagtttagtatttataaaacaatcaaagaagcgatgcatcataaagaaagaaaaacgatagacacgaaccaaatccttcctggtgtatgcttccggcaatacctctctcgccttggcagtggagagctcgaacctaggaacgatagcgatggccttgatctccttcgcccaaccgaactggacgtagtggccgattccaaacggtgggataggaggatccattccccagttcggtcccgcatccgatgggtattcgggcaagacctcggccaaagggaccgacgccgcgtgagtctcctcgtggctgagctctcgaagataacttccgacgaagccaccgacgagcgcggcagagacgttgtctgggtgtcgctcgaccatgagcgcaaaatcaagcagtcgagccaaaggcagattaagttttccaatgtgtgatccgagaatgacaccaccgatgaccgccgcgccggacgagcctagacctcggccgaaagggatttgattatgaacgtggatggcaaggtgaggaggaaagtctcggatcccatgggatcgaagaacgtagagcgcagttctggtgatcaggttcttgtaaggtgaaagtggtacgcctacagctccctcgccctcataggatagcgtggtgtcggacgggttggaactggcgtgatagtgatttgatgggtttagcgatttcagttgcggtattgttttaaaacgaaaacggagaccgatatgatccaagcgttagtattgtggtccatacgactgatctatctgcaaacatagatgctcggccaagcaataataggaaaaaaagaccctgaaaaaaaaagagaagaagaacaagaacttacgggttgatgctgatatccatagtaacatgaaggctgagggagagtccaacgacatcgaaacctggtccgatgtttgccgaagtggcagggactttgatctggaactctctcggttctgacgggcagtctggcatggctgttagatagatgattctgacgagatggaattagcaaagaagagagatgttgtcgatagccgaaggaagtgttgctttttttccgcttcttctttgaatttctggcaggtaaaaagtgggccagtcattagtcgtatgctgacgtaagcaacagttgtaaccagcttgaaaggctacgcgttaccacctgtgccaacgacaaaccatctctccttctttctttccatcctctcatacatcaaacctcacaccacacactcaccactctctctatctctttcagtccttctttcgttcgtaatcatgtccggtagatcccagcgtgtgatggttcagcccatcaacatcatcttcaagcaccttcaatctgtacgtgtctactgttcttctcgctagtttttgcgacttgtttttccaacaagctttgcatcaatcgatatcaatcgaccgagtacattgttcgtctgtccgaaagatccaagcctgatctgattttattgggatccctttatttcctattgtcctcaaactcctgtcatccggaatctgtgtagaaatccaaagtccagatctggctgtacgataatgtgtcgaccaggatggaaggtgtcatcatcgtacgtatcgcccttgttctgcgtttgagtctagcacggctggtctcgtccttttgctctttttctttctcctctggccgaaagaaatcagcaaggaggtccatagatgcacctagacaagccctagcgctgtttacgagtctaaaatgcaacgtcctgacgcgtcactttctttgttactcttcactcttacccgcacgtcctctccttcttgatcatatgcatcaccatgtattctgttatcttccaaaacgaaacggcttcttaaatcaatggaaaaaacaataaccgacggaaaacaccgtaaactaggggttcgacgagttcatgaacgtcgtcttggattcggctgtcgaggtcgggatcaaaggagagccctcaagagttgagcttggttcgtctttcttctctttctatttctactggaagaaaatacgctagaaggatcgatagggaaccgaaacgagtgagaaagaaagatgaggcgaaagacgctgacgtcgagacaacccggatagatcaagaaagtacgttcagactgacacccaacttttctctccgtttcccactttgattcaacaggtcgaatccttttgaaaggagacaacatcactctcatccagcctgtttctgcataaaaagaaaaacgactataaacccaactccttcgattatctcttgttattttgttatgtctgtcataaaaagaaacccattttctatcattctatcttctagttcattataacatcacgactttgggatcctcaaaaatatctttttcctttccctcttgtgacctatcgaaactgagcataagagaaacgatgacaactgggatcgagtcctatctggagtgacgatcgcttgtctcaaaaatcgctatagcaggcatagaagtgccaatgtccaagttatttcttcaaaatccatgcatcatctaccactctactctcaaaactcgctcaagctcgaagagttggtcgactaggttggagcagagaggaaagaaatgaagggcgtttctctctcttcgctccttgatcttagatctctccacaggactcgacaacaatgggtcctcgggtccttccagactgagatccctgagcctcgatggccttgacgacgtccataccctcgatgacctcaccgaacaccacgtgggctccatcaaggtgaggagctgtcaggagagaaagtcaaataaagcactcaatcagcattggaagaatcacataaatcctatacttggccgaggagaacgcttactagggacgatagtaatctgaaaagccgaccaagagtaaactttgtcaattggtagtcctgagaagaataggagctatgaacaagacacatacaaagaactgagatccgttctgtaaaaaaaagaagacagagacggttcatgttgcacagttatgagcacgaaaagcaaaggaaaaggaggctgaagagggatgaagcagaacgaacggtgtttcggccggcgttggccatggaaagaagtccaggcttagtgtgtctcacgtctgttcagttgtcaatgaaaagaatcatggtttattcctgtgcctcgaaagcaatatagacaaaaaattgaacatactgaagttctcgtcctgtgaatgagaatcaagaatcaagaatcaaggtgaccggtcaatgtcaaggctagatttcggacaggaagaagggcgctcgaggtgacgtacagcgaacttttcaccgtagatggactttccacccgttccgttctgtcgagtgaagtctccgcctaaagagatagcccggttggagacgtcagagagatccggcactaaagagatctagaaaaacaaagaaacaacgacataccctgaagcatgaagtctttgaagtttggaacaaagattgacgtcagcctagtggttttgcaagagttacaacaggaaaaaccagaaaccaaaaaactcactgggaataactcggtggaagggggacttggcgtatccgaaacctgtatatgcgttggacaccgaaacagaaagaaaaagcgtaagaagacgttgagatcgtgagaaatattgacaaaagcaaaagcgcacccttctctccggtgcaaagagctcggaagttggtggcagtctgatcgggccgcaaaaacaagacagatctttaggttcattcgaaacactatatatggcaatacatcgagcgaaatcttaccttggggacgacatctgagaaaaaaggggcatacgtaagagacagtcaggtcaaccgaaaggttatatcccccgagtttgatagcttaaaacgtaccatcgtagagcttgaagacgattcgaccagcaggcttctgggagatcgaaacatcgaactatgtgaagacacaacagatacaattcaaccgtgttgtcagcaggctgtcgacgagaatgtgatgtaaagagattgtacgatgaagacctacgaaaacgttgctagcaaaaggcgatcgagaatggcaagcatcggatgtaagaatacgaaacaaacaagacaaccaaaggactgcgaaaagccgtcactcacgacttgccagcggcagaggagaaggatcgagcggcagccttgagggacatgttgatacgaatcggttgagaactaaaagagatgaaaggattgatggagtggatgttgaagatcaaaaagagagcggtcggatcgaaaagatcctaaaacagggtctaatacgtttttgtaatgttgtagtttatttttctagtttattttttcagtgcgctcatcatctcagcatacatccatcacagcatacacacacacacactcacacaactgaccaaccatgcttagacagtctgctcttagattgttctcttccgccctcaaagggatgcccacacggtttgtcgtggcatctaggctgcctatgatccatcctgcgttccgttccatcgcctcttccgccgtcaacaggtctgaccggttgtttgatggccttcaggagtacaactatcctggccgggcattcgttcaggctgtatgtccatcttgtgcccgtgaatttgtgtctgcagcagcacctgatacacatactttttgttttattcaatgaacacagcccgctcctgaattcaagggaaccgtcgtcgagaaaggagagtttaaggaggtttcgttgagcgactacaagggaaagtatcttgtccttctgttctacccaatggatttcacgtaagtgtcatcctcgcctcgacagatggtacatcgtgttcatgtgattatctttactcttgacaccagctttgtttgccccaccgagatcctttccttcgaccgagctctctccaagttcagagagctcaacaccgaggtcctcgccatctcgaccgactctgaatagtgcgcttctttttcatggcccatatctcctgctttcactcgctttgatctaaccgaaactctgcccttggttgttcgctatctcttgggaatcagctcccatctcgcttgggctaacttgcctcgacagcagggtggactgtatgtcttgctcgcttgggtttatctatccatattgacagattgtacctttcgctcactttttctttcttttctcgacatccatagtggaccggacctctcaattcccatgtttgccgaccgaaaccacgagatgtcgtccgattatggtgtactcctcagggagggaggcatcgcccttcgaggtctcttcatcatcgaccctggtgcgtgcaatgtcccgagtttaaaggtttttatttcacagttgacttacgtttgcctttctcatacaaccctcgtgtacacagagggtatcgtccgacagatcaccatcaatgacttgcctgttggcagaagtgtggaggagaccattcggttgatccaggctttccagttcaacgccgagcacggagagggtatgttaacttctttctctcttttcgatatcgtgacctattgctgattcgtcttgcatgtcgaatgaaccaaatctgcagtctgcccctctggatggtgagaatcctctttgtttctctcattcacctcgcagcgtacgcacaagttatctgatcctgtgtgttgatattgcaaaaataggtccccggagaaccccgagtcgatcgaccctaaggatgccatggcttacttcaagaagcagtagacaaatagatttttggtctttatctagattcattgttacagaggatacttgactatcatgtcgttagatatatcaaggtgcaattctcgatcgtagaagtgccgttgatgaaagaagagagcgtgaggagaataaagaaaagaaaagaaaagaaaaagaaaaagaaacagaaaaagactagatataaaacaatatacaagtacaaactccatctccttctcagcgacgacaacgacgacgacgacgacgatcatcgcttcgacacaaccacgtacatacgtcaaggatcactcgcttaccctctctggttcatgtctcttgctatttaccgcccatgatgacgtccctaactccacaagaggcctttcctcttctatcctctgatatcgaccccgcttggcttgtccaagctgttcttctaatcacctccgcttcaacaacagatctgcccgacattcagaaggccctcgaccgaggcctatctgtctctgcctcttctgaagaaactgcccgcttggctgtcgagcacactctctcttctttgtctggagaggccaagaccgcgcgtgacgcctggcaggaactcttgagcgaccaacaagagctgaaggacattctcagtgccaggtcagaattaaagaaaagaagaaatagactgaacgcttggttggagctggaacaaagtggcaatctcgatgataaccatgagggagtaagtgaagagagtttgcccgatgcgagtggtgagactggtaacgatgtcgagatggaggacacggaggtcgtgatagatgacgatccgtgggctcaagagagcgatgaagacgaagagaacccaataccgtcctcctcttctccagttctgtccgcctcttcaaagacctcagatgatgtagataaacctgtcgtcatcccgagaccatcgtctccactcccatttaccctcgtggaactcttaacgaatcctgcattgcatctcgctctccttctcacgaccccaacccaacttcccaacttgcttattttgatcaaacacctccattccgagcttgttccctatcgattctccatcctcgaagctattccagattgggtccctcctgaagaattccactcaatcctacctcggtgcgaaccgtttggtgaaaaggagaccgaatgggctactcagctcatttcttcgtcggacaaccaggatgattggacctgggaagcatttgctcaagaaagtctccagtcttcaaacggctcactttctatcgacacaacctactcacctaaaccgtttccagcaaccgcgtcggaagtttcagactggtacaggtcccgggtggaatctatcgaggcaaattcgggtctggttgatatctcgctcgtctacgtgcagcacgcggcttcactttcggtccccaatctggactctttgggcgaggatctcagtcttttgtctaagctgatctacgacgcgccgtctattgcatcaacctctgtcttgcaaggctacaaaaatggcaaaccggagcccagttcaatgttagtagataaagacgattggacgctcgctcgatggagaacgtcttcaccagaagaaatcacagctggatatctccgattcgcaaccccatcgactattatcccactctttcagtcgcttgtcttcccatatctatacgtattggtttctcgatcagaacgaacagagaacccaaaccctgggcttccttctcagttagttcaatcttggctcctttctgccccgttggatctagccgcccaggtgtttgctgcctccaaagccatccttccagagcatgaacgaattctcaaacgagatgatgaggtctctcgattggcgctctccattctctacggatcaactgcgacaaaccgatgggacgtgatgagctcaatttttgaatgtatgcccgcctgggagttcggcccggacgacagagaagacggtgaaggcgagaccactcttctcgcgctagctcagtttcttaaaccgagtccggcagcaccaccgccgccaccggccgaattattgacatttttcaagcctcttcagccaccagcattaagcgagttgttggacacgcttgatgttcatctgacatccgcagaaatgttggcaaagtggggagttccagcgccgctgggttggttcatcctttcagcgcaggacaagcgagagcagctcgcgtgggccaccaggttagctaggcggggcggagaaaaggctgaagcagtggcgaaagctacgaccgtcagagggaaagcaagggctggtggtgattgggaggctttgctcagtgatatgaagaaattaagaggggtcggtggaggtgggacgttcggaatgttggaggaggttgagatcgttaagatttattttggaggattgctcagtttcggaagtacgttcatcttggatctttgtctgttattcattccttttggccttactgattgtctgttgttctttatttcttgcatcgatagatttcgcgacggcaaaaaagttgttaacaatccgaccgcctcttttggatgcatcagtcgtcgaatccttggtcctagctgcttcaatcgaattctacgaaaatgcagagacaggaaacctccatgaaggaaatatgaatttggcatatacctggtaggaacacttgttcttatgatgctgaggaacgaatgtgcttctgactaaatgatttcttctggatcgttgtcttttctttgtttctccagcctgacagttgtagcgccgcctactccagctgtcattaaagagcgtttgttcatcgaagccacctcaaaaatcgcttcttacaacctaatctcgcctcaatcaaaccttcccctctctccacttgagatccgattgacaaaagataagctctcgcttgtatctcaaatcctatccacatccgaggacgcctataagcattcagaggtcatcatcgacctggtcgaaaaacttggattcgcaggcaacacagcagcggaggtgaagacgctgggtatgttggcggatgcggcagtgcagagtcagtcgacagattgggatcgaggtgttcgatacgttgagaagatgatcgaagccgttcgtgggttctctatttctgcatcatctcgtccaatcaggatggcagagagcgggaaacttcaaccccgaggatcggcgggagatagagtacccacaacggaagagatggaatcagaggccatcgaagtctgttggagaacgtgtttccaattcggtaaacaatccgaattcaaagacgtcgatcgcaaacttgatcttcttggtcatgcgctcttactctgtccgggggagatggtgccggatttgctgatttcttggcgaaaactcgaagagacaaaccttgccaacccaatccattcatctatccctggatcaacttcgttagcgacgggggctatgcaatcaggcggaagacagatcagtacgcgtgaaagattattctcctctgctcaaggacaactcctcgactggtctcattcttccaacgcgctgctgaacggcacatcgttcgatatatctggatcaggtcatcgaaaacgagatttagcggctcaagcagccagtaggacattcaatcagttgtcttcttctctttcttcccttcgacctaccgttcagacgcccacgtcagcagtcactgtagaaggagaacaaggaagagatagtgaatcaacacccagtcggtcgggctcgccttctgtggcaagtcttttcgcagggggaggagggcatccggaagaggagattttgaatacgggtaggagggcgttcactagaggtgtcggttggctgttgggcgcgaacgaggcggagatgggtggggggaatatcatttgaatgatccttgttctcgtcgtgaccagaaatttgaaaagctcatgttaagaaaaagatagacaaagatggccaaaacatagcatatatatcacggaagtctaggaaagaagatgactatgaagaagactttgctcggccgtctagttcaagcagaatcgctctcgtcaggatgatgttcgatccattctctgatgaatgtcgagctcatttttgcctccttcatcttcttcccatcttcttctccaataccctctcctagatcttcgtccgtcgtatgggacaagactccaatgatgaacgtcttgaggccaggaagacctcgttcagctcgcttgtcgtcaactaagaggatcagttcatgagtcgatcaagaagagcagaaacaaagaaagatcataggaagacatcagaagaatcagattcaatcgcgggagaacttgggcgcacaagctcttcagaatatcgactcgtcttgtcgaggaacatgacaacaatagaaagacgaaccagcttttccacccgctacggtctcccaactgagtaccaatgcttggatatctgcatcaaccgctgtaggtccgtaaacgtccccaatgggcaccacgtcgtaatccagtttgggattaactcggcggaggaatcgatggacgagcgcgagtcgaagggaaagtggttcaagctgatttgcataggcttttttggtgagtagtggatcatctgattacacattttgtagtagatgtacaacattgaagagaacggtgtaagcatgagataaagagtacttgaaggaaggcttacgtaccgctaactcctacgatgagtttacgggacgtgatcagcgcggccattgtcaaaagaatcttgtgccctgcatggaggtgatcgaatgagcctatcaagttcaagtgacaacggagcaagatacgttcagtcagtggaaagtgcacgtgttgtggacgcgatgagactgagacgaacctcccagcgcaacaacaggaaaggtcgtggaacagtcggtagatgttgtgctctgtgattcgggggtggccgagagagaaagcgaagagaaaggtaatgtgatgatttgtgtagaggatggattgatagggatctgaggagggacaggctgatcatctgtgaacggagccagaggaagaacagactgtcagcagttcgttaacttgtataccaagagatatggcactgaccgttctcaactctgaagagaacatcccagcttgtctgtttctcagaggactctgcccgttttgatcctacttgcgttgtatcaggcaaggtgctgacctctcctagtccttcaaacaatacatcaatgtcccaaaggactctgcctaagctctgtgctgttcggacggcttcaccatatatcttgcccaggaaggattggagagtatcccattggatggatggatctaacttgaggtttgatgacgatgaaaagaggggaccagtgaagtagattgtgagcgctttggtggtttgaagcgaagcctgtcttacagaatggaggtagaccgatgggctctgtactgtgaagagggtaggcagtggaagaatgacgagagctctctcgtacgtttggtcggccatctcatctgcttactcctcgttgtcgtcgtctcgaggttgcacgactcggcggtgagcagatcgttgggcgggtgtggatacgcttagtcatcttggaccaactttcggcagtctcttctgctttcgctttacttccaaccatcatctgaacacgataccacacgtaccaatatggcacctcctagaaaagaagcaccgtcagcttcatcctcggcctctcaacaatccaagcgtgtgaaatttgacgaggccggattggaagcaacagcagatatagatggagatgaagacgatctagaggacgtcaaagtacgtcttctgaagcttacggtttggttctgatcatgctatacctttacctcaaactgaatttcttattttcattctcatcagaatcgaagagaagtcaacactcaaggctacgactccgactcttccgatgacggagaaggcgttgtcccatcgcgaaaacctggcgcaaaccctgaggaagatgacaactcagacgacatgttcgccgagcctacatcttcagcagctaccaataacaaaggcaaaggcaatgccaagtccggaaaagacaagtatctcggacttggagacatcgaaggacaagaatttggaaatggagatgaagacgacgatggattcaaatcagatgattcgaaggatggaatgggttatgagctttcgtctttcaacatgaaggcagagctgagggaaggcgcgttcacggaggacggtgcctacgtgaataatgccaaggaccgactggagatccatgaccgatggatggacgggttggacggaaaagcagagataaggaaggcaagggaggcgaagcggaagagagacaaagcagaggaggaacgaaagaagaaggagatggaggaagtcagggatggaccgagacgagaagacttggtcgcagaaattgtcgcgcttctggagccctcagaaactgttctcaagggcctacaaaggttgggagctggctcgggcagtggaaagcctggcaaaagattgacatgggcggagaagcagaaggaacggaaaagagcgttgacgtcagcagcagcagtagccgctactcctgcgccttccacatcagaccatatggacgccgagccattagcatcgacgacgacgacaacggaaccgagcgctccgagttcattcgaccgactttctaccatcgtttctgatctcacagcacttggtcagcttgatctctataacatgacccgtgaagctctctcacgactccttcctccaccagcttcttcctcagtcgccaacagtgcgtctaccactggccaatcgtcagaatctgtcgttcctccctcgacgtcttcgttactggcagatgatggatcaaaatacgagtaccgatactcaatggagtatatccgatcccttccggaatcagaacgacctgtagagcgtgaagtatttggttagtgctttcctctcctcttccttctccttaccgtatcttaattacctaaccgacaaatcttgatcgttcaggccccttcccgaaaccttcgatattgcagtggagagcgcaagggttctttggtggtttaggaggagcccccgagagggtagaacttcgaagagtaggggctgcacctgagtgggtaggattctggaccctatttggttgatcaatgctgtcaattatcaattttctaggaaggagtgttttgccgttcacatgtttcagtctctagagtgctcaactcaggtcattgttagcagaaatacatgttagacgactggcagagaagggaaaaagagaaaagggaatacggggggtagtatgcaagactttatgtgggaaaagaggaagagaggtagggtcgtaagaagggaaggagaagaagtagtgatgtagcgaaaagtatagaaaggaaagaatgaacgggacaagtgaagaaagaaaccgaaaggtgaatgaataggggagagagaaaggggacacaggacgagagtattgaaaaagaaaagaaaaagaaaagatgattaaaagatgaactaaatcaaattctagtaagattcacagactacaactcctcatcgacatcgtcgatctgagaaggtttcaacagacccggaaccctcatagcggcttcccggtcgtccttggccttctgagctgtttcggcatccttgtcaaccaggaaggtctcagcatcttcaccagagtactccttcattgtgatcaggaaatctcgtagagcgagcttgaacttgttggggtcttcatgagcgacaaacatgagctcgacactctgtcgaatctgcgctggctgcaggtgagggaatgcgctgcccatgaggccgttgatgtaatctctcagatattcagcattgttgatgttgggattcggcacacttgcggggtcgaagattggaaccttaaccaagccgttcatggtgaagtgaagcagtcgctgcaagatgacactctgagtcttgaaacctgttgaaagatatgtagttttaaagagctcagataagcttctttatgaacagatcgatgtaaccttgcagtgagaacgatgggaactgacccgacttgtgatcaggatcgacaagcacactgagaatatcagtcaccaatcgaaccaaataaagttggaagaaaccatcagcgattccgagctcctcagtcttggcgaagttatcaaccagctcgagggtgactaaaataagcacgatagagaaaaagagcatcaccagccattgtcagttgatgtatgcaaacgcaacacatgaatttattggattcgagaaactcacagtttagtccgatatcagcaatgtcacgcatactatgcttgatggcccagatcgcactatcgacgataagcttgaatgttgggggaggaagggatgcaagagctgaacgaaaacaagtcacgcaaatgattaacacatagtcacgtttatatatatatagatctaacttaccagggaagcagttgagatcgacagctcggaggaatttgaagaaacctgatcgatgctcagggtactcggcaaagtcctgattgatcatggccagggtgcattcaaacgttgcatctaggatcggaggaacctgctctgtcaataaaggctacaaagcaacgagggaagataactgtgtcagataaactgcgctgtgttgaaaacattttgtggtgggcttactccaagacgcgagacgatggtagtcatgacgttgagaacctcagcatctcgagctgcagggacattctggttgtagtcgcccagaacggcgtcgagaagcgatgggataaggctggcgttgacctgctccagatcttcagccttcttgatgtaagtctccaccaacttcagaatctcttttttgattgttcggagtcctcggactttgggtgtcttggtggcaataaggcctataagtgtttggtaaaggctcatgctccaggtcagagacagctttcagatataaaatagcgaatagaaaactcaccttgctcggccacagactgactgatgataccactaacggccttgtaaagccccagcatatcactccaaattcgaccaagctgaggggcgaaaaaggtgccaatggatccacaagcagagacatttgttttgagaatgttggacatgatcttcacattgtcaggatttgacagcacatcaatgttgctagcagcttgggccataagagagtcccactattgaaaatggccaaacaacacaacatgagtatggttctctgaaaattgcatgtcaaagactttgaaggaacatccgcatacagcgttgttgggcatctccatgagcttggcgatgagccgctcttgcgtgggcttgttaggctgagcagcaatcatgtagccaacggcttcgtagaatgtgtgaacctagtttattggagacacaagaaggcagcgtctgaatatatatttactatgaaaccaaattctgagacagatgaaggcgtacctgctgaggcgagagatcgactgtgattcgatgcaaagtgcggagaatttcatcgatgaagggctcttgctctccagactgctgcgccacaaagtgccgtcgacatttttgagcaatcttgatgaacgtatcacaagccatatcctggacacctgtcattgagaagttagaggaaaagagacgttattgttagacagccatcatctcgtcaagagaaaagttttcttcatacgctcaccttcatgactctcgtgcatgaactcgaacaacttgttgacgaccgtcttcaagaacttccaatgagctctgaggaaacgagggtactgtccgacaatatacatgatatcggacgccacaacggccttgttgtccttccctcgcttgacttccaccagacctaaaagatccttgatgacctgaaccaagaatcgcttttcagcctcctcatctgttcaaacatgatgataaaaacacatcacaactggtcagtcacaagaatactcggtatgatgaagtgttgcagcttactcatagctcccgaaatagagccgatagcccaacaaagggtgttgaggtttgcccaagaccactctgaaccatcaatctgtagaagagatgagaagagtcagcgcatgaatcgcgacatacctgaaaatgacggaacatacctgtttcgataacttctcagtcataatgttttcggtgtcgagaacatccaagtgagtgaggtacacgagaacttccctcatacttttgtaaagcacgatggtgtctgactccttcatgaactctctgacgacctctccttcatcgttctcaacaaccaaaacctagtttgatgatgaggagaaagcgcaaatcgaaaatttgtcagatctttcttgtgggctcaaaaacatgaaaactcttcgcttacctcttccggcttgaccattctctcaatcatcaccaatcgcaaattcgacaagacctcggcataaatatttttccttaagtttgcgctaccaagcataccagctcctccagttgcgccgactcccaggttcaagctcatcagagggtggatatcgggtatcggtagctgcggcgattgaaaaacaagagacacatgatgagaaaacaggaacagagtgaatgagatcgagaatttcatcaacgaaccgattgaatctcctcatatagttcagcaacaagcttggcccaatattccaaacagatcttgaaaacctcccgctcctcgacttgcgagattttgaccaagtagaggtgcgcgttgagaagaagctctttgttctggtcattctctacaagcttgagatgctctcgaaggaagtttgcaaggaaaagagcgagattttgaatgagctcctgatcggcatctgaggagtcgttgtaggcaccagcgatgtctgtgagatagaacaagagaaggttgagcatttgttttcagcagctgagccactgcttggctgaacaagataaagcgctcactagtagacggaggaatcattttgttgattgaagtcataaccatctggaacaaggtcacaaacttctggttgaactcggttcctacactaagaccaccgatctctgaaagacacttgaaagtaacgttcctgaactctgggacctcgaggaactgagttgtgtgaataattgattgtgtaggcaaacgaatgtcaacgctaagatcacaatcaagggagaaagttggaaactcacccgcgatacaaggtgatcgatgatagcggtttcgaaaatgtagcccaatgggatccaatttaagaacctcaacaatgtttccaaagtagccttaatcaagctaggtttttgggccttttccagcacctcagaacaaagctggaaaatttctgaaaactctccacacatctgatacttgagagctttggtcttggcctgggtcatctgctcggcagagtaatcgaagatctcttcggaaagaagcttgagaatcaccatgttgttctcacaaagggaaagggaagtctttgaggatgcgacaatctatgaagaatgaacgaacaaagttgagaaagatggtgagttgatgttactgattcggaagagatcagcaagaggtatgtgcggatagacttacttctggaataaaagcaggccagtttgcaggccagtcttgcttaagaacctgtgaagaaagattatgccaggacagataagtatcaatcggatgtcaatagcttagcagccagaacatatgaatgaacttacctgaaccagaataagattgagcttgtttatgtagactctctgccgacgaaggtttgcttcgtccgaggagatctccataatcacaccaacaataaagtttctgattcctgtaaatttggatgagaggtgtttattcaagaagcaacgtcagcttgtagatttcaggcgtacacatgacgcgggcaacgaagatattcttacctcctctctgctcggcaggaagcgccttccaacgcgtctggatgagcttttctaagacttgtagaccaatgtactaaggtatgacacgtaaaaagagagaaaagactcgcatcaggttgtgaattcgagatgatcatgctatctaacatgccacacttctttgcacgtactttggtctgtagattcgaagcctgctgcaagacatttggaactctttgccacgcatcagggtgctcctggaactgtgtaagaacctgctgagccatttgttgctcctgtaggatgtaaaaacacgtggcgatgatatagcatacgaaggaagagtcagtcatgctcagcgagagctcatgaacgtggaaaccgatttcaagaacgacttactgccggaggcccagtatagaatgcattgaccacccggtccagaaggccaatgtctagctcggtcgagaaatcgagaatggcctacgagaacgatgtatattcgatttaagatggcagataccggagaggaaaacataatgagacaggtggagatttacatcgagcaatttgatagagatggtaagcacaatgaatcttgtggcggagagagaaagctggcatcgctcagacttacgtccatctcgttaggtgattttagggctgttgcagatgaactgaacggatgactgtatcagagcattcgaggagaagatacaaaggcaaggatgtcaagtcaggttgctcggttggggatgtatctaggtttatttttttccttcaaccctgggaggagggaggaataaatacgactttcggaggcccaaccaacgccaccacgacatatgtctatctggcattcttccatatgcaactcaagatcaagaacgaatcagacatatacgtacaatatttaggcttgaatagctctcttgatgaagactacctcagatattagatggataggaaagaaagaaagagatcaaagaaaacggagtaggcaggaacggcggtgagatcgtgtaggccaggtaagtgggcttttcataaataatattcaaatatttgtttatgtctatcg

SEQ ID NO: 2121 - DNA, 53176 bp, Xanthophyllomyces dendrorhous
tatttgtttatgtctatcgtccttgttctgtattagtctaaatcagacaatctataaatcttcgaaatctaacgaaaaccaaacatctataggttgagtgtacagtaaacccctaatgaggatggcccacagtgtgggtcctgacctcctccatactactttgcctatgctcattcagttcgtattcaaatgcagaggactccatccttccaggatctagttcacccggtccgttcggccccgtcgacgaggacaatgacgaaaagttgaacaggtttgatgcccacaaccatgcttcgtccaagacaccttcgagtccaactcgatcttctgcgtgctgttcttcgggcaaccgactcgcctgttcatgttccatctcagcttcatggtacaagacatccttgacagtgacgagaccggcgagacgaccttgatggccgacgagaataattcgggggctagggataaagcgagaattaacatggtgctgagataacacactgacatacatgttaagactcgtgagaattatacataccccatccgacggaacagttgcatcacgatctctaacggttgtttaggagacacacatagaggtgtctgaaaattgattcgaaaaatcgataatcagtgaaccaaacaaccaaataaagccacaatatcggcatcttgatatacgcctacctgatccacaaaatttccgaaatcaacctgttccctgtgtcgttcccctccttgctcagctgcattgatcgtccgagattcaaacccttccacttcttcgtcatcaaacccaaagtcaccccattgattgacgcttccgtctgtcgaaggtcgagtaagttcatggagctcagatggcgaaggggcttccatctgacggaacgtgcatattgcttgaggagaaaggtttcggacccgtttcgctttgtctgaagacagaattcaagtcagcgggtacagatactagatagatgccagtgatgtatcaggaggactgattgctaacctaaagcgaaccggagctctgctcttcggatgtaacctaaaagagtattatcatcctcattccttactacagggaacccctgaacggacgtgttctccatgatatcgtctggcaaggtaagacatgagagagaagagaattcaattgattgaaatctgctacagatgagcacaacgaagaccacaaaagagtcgtatactcaccaatctcagcccatgtcatgccgtctccgcgcatggtgatgatatccttcttcatgatgtgggatacttgagaacattcaagaccagagatatatagccaacaacaatgtgttttcctccacttatgtcagcaaacagatatcagaacgagaaaaggatcatggagtattgacgtcaactgactgggttgtaggaaggcttcatcgttaccctccggatcttctttctccaggaatggatacccgttgaacttgatcatttggtcagcgatcccaccctcgccaaatgagtctgataccgcctttgctacaagtactacaatctacaggatcaatgaccccaacgcacgcattcgaccagagacagatacaatggttgtaagaaacacaattagtattattcaaacaaggaaacgatccgatcatgggtttgtagactatcacaaaccatggtaggcagaatataagtcaacgcccccgtcaattcaaacatgatcactaccactgtgaccgtcattctagtgactccgctgtcatcgggaaagcgccgaggagcaatagaggataagattggtcaggtatttcggagtgaagaggataggggtgagaaaagttcgattgagctgatgacgaacgtaagagctgcggcagcacctaggaaagcatatgttccgggggtgatacacggaacgtcaggctggcaagcaaggaagtaagaagactcaggatttgctctgaaaatttagacaccaggagttcaaggggtataatgagtgaaaggaaccgcgcagaaaatgagttcgaaccatgagtcgcaacagaaacgcacgcttgaatagctttagagatgattccgaccattcgcccgaatgatgctccaacagccattgagggaacaaagattcctgctgggactttgcatccgtaggaaaggacaaccatccctgttcgaacgacggtggctagcaacaaagtattgacattcctccattgggcccaagttcttttttattttgatgtattcatggatacgaggtgggataaagatatgacacgcaatcaccgatcgaaaaatgaagcgttcaggtaacgattagcgcaacgttcacacagatatagtgatcagaggtacggttgattgataagacgaactggcagagattgtcgtagtcgcctcctccttcacactctttgaagaggattgacatgctctccgtcatatcgatccttaaaaacttgttcatgtagccaaccaaagcggtgatagctgccagagtgactgcttccgcgattccatgatttaaaagatgctttcgtctaaaagcagccatttgtagattgtatttgacgacgaatgctccatagagacccttcatgtcatagaggagtcaagtcagtgcaagtttgtctggttcaaccttgcagagtaaaacaagaactcacaccaaacagaccaataaggatgtaccagggcaattcaaagtaatgccaatttcgatcataagagacttggaagagaacaagttctcctgttcgataaggattcattgccttcaggaacacaaaaatacaattatcgagggtcaatgtggaagattccaacagcaactgaagagttgagatcacttacagacaatgtaaccgtggctaccagagcgcaaacaaaacttctccacattgttcgattggtgaaattgtgactcatttcctgtgaggagtaaaagctgatttgttagaagccagtttcgtcacccattcgatcaaagttgtggactcgcctcaatggcaaataagacaccaccaataggggatccgaaagcaacagctactccagctgcactcgctgctgtcaagacctcacgcattttcgctacataggataagtcgaaggagaccgaacgtcatgacgatgagtaacttctatattggagagtatcagtagggcaaaaatcgatatctggagctcactatgactggcagcgaatctggaaaagaaaccagcaactacgtttccaacgcagcaagcgacatgaacggatggtccctctttcccgacagatagaccagaggcgatagcaagtggctagatagtcataaacggatctgaaaacttagtcctgacaaaaacgttgtgacgagagcccggcaagaacaagtaacttaagaaaacaaaccagagcaagactcttgatgatcaacgtccagaatccaagaaaccccttgatgataaagcctcctagaatacacttgatttcagagatacccgaaccggcggcgtagggggcgaatgattttactattctcgcggcgacaaacgcgtaggcaatctagaaaagggaaaagaaaagtcggagcgatgagaatagtccgtgctatgatttatcagaaggaggaggaaacgtacggcgcaggtgacatagattacccaggcgagcgggtcacctcctccccaatcatgccactctggacaagtctcttctccctctacatcagcttcaagacaacaaaacttctcgttgagccaccagccagatgtacaatgacctagtcttgaggacgagagccattcggttacaatcacaatgaatgccgcgttaaggccaatccccattcctgtcgaacacaacaacaatatatgagaccatgttctctaggcttcccactggtccagcatcgtatctgaataggcgactagggaaacgcagatacgaaccaaccagaccaacgacgagccagtcttgtccttcttctaatatagtctctccagattcccagatccagccgactaacccgcctatcgattgcatgcggacagaaattccaacatgtggacgcaacgtgtcgaacgttccttttttggcctgaatagttcgttcatgaagagaatcttgaacccaatctaaaagcaaacgattatttcaaaagatcagtcggtcgttgaagaacaattcgacaaacaaaggtatctctccaacagaaacgcgtagaaccagacaagttttctctgtcgtttgaagatgagctacaatgaggttaagagagaacatggacgaaccgacggtactgaagttctcgtatcgtctgaagagaaaccgagttgcaaccgggccatgaacgaaatggactcagtcaatcacggcaataaatatcaatctagagaactcagacgatctctaaaaaagaccaaaatcatacctcatctgttcgattttctgatcatccatatcatcctccctgatggtggccgtatcgtcctcttgtggatgggatatcatatggaagatctctactcgctgagggattgattcaagagctccctcctttccttttgctaacttggtctgtctgtgttgcgaatgtgataggcaagtggtcggctcgggactcctccgaagacgctcacagcttacatcaagtcacatggttttacgccacattgtgattatcgtaaccacacccagcccgaccatctgagacatcaatcagcagaagacgacctataccccgaccgcgacttcagcttttgacttgatctcgaccattccatcgccctccctacctcatttctgaaggtagcacaagtacaaaagatacccattatggcatcagcagcacctccagctcagactcctatcgccactgacttctcgtcagctgctggctcgagcgcctcgtctaatcctgtgcgtcttttcttgctctttatcagtttctctgctggcatagcccggttaccagggagagagaactttcccttggaaaacaagctggccgatacgatacttctatggtttcatttttatggttgcccaatgatatgtcgtccttctcttctaatatctcttgatctttgactcgcttccttgttgtgcctcgggaactgtgttgttcgttcgagccaattagctcaaaaagttcaagctagtctttcttggagagcaaagcgttggaaaggtaagtagcgtcgcctggagaacatcatattagcggtcaagagtcttatgaaaacacggctgatctggttgttccgcctttctcaaacgtctttcggacataacagacatctttgattactcgtttcgtaagtgtccaatcgagattagtcgacatacttggagcgccctgatcattgaaagttcttcttctctttactgacggcacatccctggtgatttctcacatcagatgtatgatactttcgacaatacctatcaagcaaccatcggaatcgacttcctgtccaaaacaatgtacctcgaggacaggactgtgcgtctacagctctgggataccgctggtcaagtacgtcttccttcttccgccttctttactacgttgagaatgggctgacccgacatccggcatcctctttaaatataccataggaacgattccgatcattgatcccttcttatattcgagattcttccgtagcagtcgtagtatatgatatcagcagtgggttccaacctgttatctattcaggtgtggctagagatggctattactgacatcatatctgcctttgagaagatcgggcgtctttcctgaacacgacaaaatggatcgatgatgttagaaacgagcgaggaatggacgttatcattgttctggtcggaaacaagactgatttgaacgataaaaggttagtggcctcctttctcgaaagaactaaacaggatctcttcaatcctttcaaatctgatccgaatatatgttgtatttgatgacacacccgccggaatgttcagacaagtgactcccgaagaattagataagaaggccaaagatctgaatgtgctctcgattgaaacctccgccaaagctggacacaatgtcaagagtttattcaaaaagattgcgcttgctttaccgggtggagagcccgaggtaaaggaacctactgaaggagctcagaacatcagtatgtctgcttttccttgctctctctagccaacacctcagtgatattaacatctatggtatttgttaatagaaattgatgtgtcttcgaaatcagcggaggaggcagaaagctctggaggctgttcctgctgaggaaggatcacctgtctttctagctgttcgttcgggagcctatatgcttggccgttccttcgtccacttaggactttcctcacttccttctgatatgacattgcgtcttggatacacttcctcttttgcttttcctccactttccgttgtacttacacatgcttccaacctcgtcagctcatatattcagcttgctcttatatcaaactctcaaagtttcgtttactggtatactcgcagctttttctcgtcattctgatattttctcgatggcttttatagtctggtcttcttcatgcatataacttaaagagatacaagatgcagagcgtcagtacatagactgactaagtggtgagactgcttccgaaggtctcttcatatttgaaaggaggggcagtcaagtatgtatcttcaaaaggcttcattgtttctctttgagcagaaaacgaagatcttcacgacgcggcacaaagtgggccgtccatagctaaaatcgtgacgagcgcctgctcaagatgttgtctcacatgttcccttctcgttctgactattctcttgtgtttaactatcagatgtgatgcttctggtatcgttgtcactctcaagttctacacctacgttgaaagaccaggtattcaatttcccttatagtgagggcttatatattatttgaatcatgtaatgtctcgactaagacacttaaacgcgtcgttacgtaagcgagcctcgttcgtctgttgccctgcttttccaccattcgattagaaaagaaagccattcttcataccatcaaccctcaccctctctcttggtttctgagcggtatggagctcgaccaggattccttcgctgctcgagtggagagcgtgttgtctacatctgatactgttgtctctgatcccaacttagccgcactcacgtctccatctttcaacccttcatcactttctcactcactcccaaggacgcccaatcttgacctcctcgctcggtctgttcatccactctcttccaatcgaacggaacctcttcttggaggaccacagcatgaagatcggcagtctttttactctcagccggtttctttcacatctaacgggctgcctctcgcaacttcaacatcatcctctacgttgatgaactcagctcacgcttcgttccatgacagtcaagttggttcttatgatttacccagtcgatcaacagcagatgtctatcagcaacattctatggatattagtccctcttttcagcaacaaacacatcaaaatccctacttctcgtcttctttcccttcttcttcctcctcattcacggaacaagccgggtctgaccttcaatctagaggacaattctcttcgtatgcttctcagtcagcaaatccgacggattggagaggtgaatctctttcggctgcagagcgagtgaaactgttaggaagaaaacaatctgaacatgccccaaatactgacaagggaggattgatagtcaaaagagagtcagacgatagcttagtccaagttggggtggaagggagagaagaagatgacgaagagctggaacccgcggattcggatgtcgatatggattctacggagaatggccaggagcctgaaaagaagaagaagaagtggaacaaggctcctcaatcaggaaaaaattggagatcaggtctcaaggtggtcttatctcttccttgcttttgtctctagataatgaaaaggatgccccgactcattagtggtcttttgtgattgaacagagagcacctgacggaagctgggaggtacctccagaatccgccgttaagaaggccaatcaatcatccgaccctcttcattccccgagctttgttctctctctcaccgactctgccctcaccgccgaaccgtcatcaactctaacatccacatcaaactataaaaagccaaaacttaaggcgaaacctaaaccagctcaagccataggttcctcgaatgacagtgatgctgtttcatctctgaaaaagaaagtcagtcgaaagaagaagcagccagcaggtacaaattcacaaggtccgactcgatcgccttcgcctataagcggcctgccaaacgatcagcccacaccgacagtttcttcctcccgagcaagatcgtactctcagtcagtcgatccggaaggagccttggaagaagaaggaaatatcgaggtcacggggcgtaaatcaaccaagagacggagaatcgatgagaaagaaaaagagaaggaacgagaaagagaaatggaggaactcttgagaagacagagagatgaagaagatgaggagagcgaggacgatcaattgtattgtgtgtgtaatagtcggtatgacgcagagtccccaatgattgcttgtgatatgtgagtttttagtcttactctattctccaagacactttccctttggatcagcaacaaaattatgtttggagttctcacgggattaactcttcgatcgcaatgcgtttggttgatggtcattgagaacctgttaggtgcgcggaatggtaccatcctaaatgtgtagaaataccggaagaagagatcgagttggtcgatctgtttgtctgtcctaaatgtcatgaaggtacgtacatactctttccttccgttccttttccctcaaagcctgtaccgagtttgcgctttttccgagactaaattgtgttgagttttttacgtttacagagacggccgagaagacaacgtggaggaccaaatgccgatcagcagattgtttcaagccagctgtcccaccgttaacaaagtaaacagctgcttcttctaaactttcaatagagtttcttgatctgatatgaatctattctccttcttgttctacacacagatattgttctactgtctgtggtacggctcatcttacggcgctcctcgaaaccaaagatatcgatctatctagacattggaatcaagttgaaggtgctcaaagaccgtctggcgtcgtgatcgttaatcctgactttcctacatcacatcccttcaccactacatcgaatttggcttccaatactcccgtcggtcccacacaattccctgcgcctatcaaacttggaaatactaggttgacctctctagatccgagtgatcatccggcaacgagacaccttcacgttatggacggtagcctcaagacatcgatcgataaagtccagaatcaactctcgttactaagcaatcgattgactcttttctctttcgcttccaatcgagcagacatgatgccctctctcgcttctctctcgctcaaggacgatccggttgtcagtccggaacgatccaactcgggctccaaacgagggcctcagaagaagaaatcatccgctggtgccggtgctggtgccggtggaagcgggcaaggagaccgaccgtgcgggtttgatcgacggctaatcttggacgaacaagattttggcaaatatgttgattcagaagaaggtagggcgttgtttgctccacttttagaagatgatatcagtgatagcagactcaagaaagaaggagaaaaagaaagggaaggaaacgaaagcccggtcgatccgggttttgaaacgtacttgagagcaggcgagaaagatcttaaacggaaacaaaagatgatgtccgagacagacatggaggtcgatggatctacgggatcggacggtcaccaacacgtcaaggctgggatggaagacacgtggtgttatcgctcgaagaagaagtgcgaaggccacagagggtgagtgacccccttctcttccccttctcttcttcgctgctctcattgtcgttgtcatcgatcgatctctctcttctttctcgatctttatttatttttcccgctcgtgacttactcctcttgcttttcatcttctttttctttggccgcttttatcctgttcatttctctgtcaactcctccttggctgaactgtctttggactttggcaccagatggcagaaaatccggctgatagattttcagcttgaacaatcctcaaaacggaatacactcggtcttcttgaacgcacccggtctatcctccaacaagacattcagattgccgagaaacgaattcggcgtgcgatgggagagcccgaggtaaaccccgagaacaaagtcgaaactgagatcaaaactgggatatcaacggccgtcccagatcggtcgagtagttatagagaagagaaggatgattcagtggtaacccttcctctggcgactactgctgctgctaccgttgcctctgaaggcaccggaactatcgctgtcaacggtggtgtcggtgtgatctcaaactctctagctcaagttgatttaccaacgataagttgatctgtatagtcgaagtatatgttataccttgtatgtgtagaagaagacatcctttcttatagaagacatgatcagtcaactagttacagacgacgagcaacaaacaggatgacaaagagtgacttggcgatagagaggtagtgacggatattgaaaggagaggaatatatatatagcaaaaagtgggatgtattagaacagtgctggatttgagagataaccatgaggaagagaaaggaggggagatagaatacaccttaagtgaaagcatatgaacggctaggtatcccaggagagaaagacaggaagatctattgttgaacaaacgagtgatgaagcgaattcgatacaatataaggaacaaaacaagcatttccttgacaaatgtcttgttgggcaggaagttctatccaaccaaagcgagccgaaacgagacaaaacaggttggaacaagaaacaggacagaagagaaaatgcaacaggatacgagaaaacttgaccagagtttaaagtgtgaaaagcacctcgaatcacttggtcttgtcagccgagacccgccggacgtagggtagcaagcctccaaacgtgtcgaccacctcgaaacgctcagacggatccgtggatttaatggtagcgaggagaaggatggaagcagtaaccatacggtaggttcccacgcccgtaaggagatgccaccaggcatgtcctgatcacaaaaaaaaagaggagagatgagcgattgagtctatgcgagtaatccgagataagtctggcgcaccttccaaaataaggccatagccccaccagccccaaactttcctgatattctcaatagaatctgcatagttgtggatttgtatcagcaaactcatcagaatgatatcgatgatgaagcctggtccccaaatgcatcaaacataccacacatctcgttatctacgttccagagcaagaatccagcaaggaaactagcagctcctgtcagatacagtcggtttacagtagatcggtgctgctcaggcaatacgtttcctacaaggtgatttgtccgtttgagagaagcgagaagaatacaggcaaaaagcgcttgatggcacaatggattgggataggccatgctattcgttgagaggacatgcgattaacttctctgtcattggtcagaagaaatggccgcggagatgagactcactagagaagcgacagagcaaggtcgactgtgatcagactgcctagacctaaccaagcattcaccgacatatcgtatcctggattcgagttgaagagcgaccagagaaggtatgaagaaaaccaaatctgaaccggcgtcgggtatgtccgataagcgaaaggcaggagcggacaagggatatagattaataaacgtgcaagacacatgaccgccagatcaactttgcacttaccataggtaattcgtctgcaagctacagcagagaaagaagagatcaaggtatcgattagtcaagtttggctcgaggacttgaccactttgagagatagctgagacctacctgaaactcccattttagggtagcatggaacaagaaacctaatagccgaaatgataagccaagggttcattatagcaagcaaagggtcaaacaacgtacttccaactccgacgagacccatcccagcatatgctaaagataacctaggcgccatcccttgcttcaaaacatgaacgaatccataagcggccatagaaacgaaaggaatgctgttgtgttggaagcaagaccgagagcaaaagaaggaaccgaacaatgaccaaatggttaacagatctttcggtttgagatcaaaggcggtcaagggatcgaaagaaggagtgagataacggaagggattaaagacaaacttggataacgtgttggtaaactctgcgatataccgggtgacatgatagttttgctcgcaccaatctatcagcgctgagtggtctccccatactgatggcgacgccgagcaaagaggcgaacgatagatcaaacacagaatcaacccggtacacaagatcagtcatcttatttctttccataatagacgataacagaaacgaaaagaaaaacaacaacagcgatctaggaacagatgtttacaaggaactcacttccggaggctagctgacccgttcgagtgactcccattgtacttggtggtaggtggtgtacgtggtgtatggacgtgggagcgggaactggaacgggagagaaagagggagagggaggaggaagaggagaagagagaaggagggaagtgtagagagtggaagagtggaggatggaagaaagaaagaggatgaatcgattgaagaagtagagactcaaaagagatggacagagaggaaaaggaacagtcggcctggcttattcaggacggttaggggaatctgctgcggttggccatagttgctcagcgtacatgccgatagaatgttcatgttaagcttcggtaacaacaacaagagtcaagtcgagaggtgggtatgtaagggaggaacaagtagcagaggccaacgtaagagaagaattgcagcaagagaagagaatgatctaagagcgtaagtattggaaggaaaagagaagcaaggagcgagacgaagaggatgcacggccagtcagatgctggacccagggaaaagaaagcaaacagagaagaaaagccagagcgggcgcatatcgacaaggagtaaacgagtaggaggaatcaaaagaaggaagagaccaaattgagtagttctacattcccagctcatggtttcccacggtttgtccccatgagcaagctatcaaacagaccgaccgcactcgcctcgttcctgagttggatcatgtacacaattcccgttcgtcttccttgatcggagatctcgactgcaactcccgttttgccgacccgttcgaccccatcagtcaatacgatggtcgagattaacatcgccttgctcccactctcactctcaaccacgacctgtttgacgtttgtgcgctgctggtggaaaagcttcagccgggctgaaccaagtgacttccattgagcatgatcccgtttgaggaacaccttgcacttcatctgcgcagagatcactgccggtccgtttaaccctgcatcatcctgcccgccccccggcgacggcggcggtgagatatccatcgagttatttctttgttcgtgaggacctcctggtgcccgaagcgatggatcaccagacgaaagcgcttgctgacggacctcagcaaacgctgcagaaggcaacgacacaggcatatgcgggtcggtcgaccgagaacggagcgaggcttggtgggtcggacttccgcttcgactcacgggtgacaccgatcgaatatttcgctgaatatttggatcgtatccaccgggactcatccgaccctcgccatctgcgcctccgtgttgatggccgtgtcctcccgagagaggcccacctgatggcccctggggcgataggtagtttctttgttgctggtgctgtgggtatgataggtgcgatggctgcggaggcgggtgagactctacgtacatcgagttcggctgagatcttgagcctgccatctgcaaaggtcgaagacccccctccgggccgcccggaggatttgagttgtgtcggttggggtaggctgatgaagcaggatattgaggttgaggctgtcgaagcggctgttgctgttgcgggacgccagggcccccggtatatggagcatgagcatgatgagcaggagcaaatgacagaggtggaaccccgccagacggtgttggctgctgaggtcgctgttgctgatggtttggaatgcgcaagcttgttccccgctgaggaggaggtagcggtggtaatggtccgcctgtagtacgattataatccggcaaggagccttgctgctgagcatcgatcacggatcccagtcccaacgacgtcggtggtcctccaagctccatagcccctatttgctgtgaaaggctgggggcttcatgcgagctgctgttgttcgagtacgtactctcttgagaaagtgcggacgataacattcgctcacgctgatggagaggtgctacgtgcgagaggatggctggttgggaagcagaaatcgatgatgaaggtgacatcataagaggtgagacaacatgagggttttgggcgccgggagaggtcagtccaaagctattgggtgatgtagacgttggagacgtcgtcgatttggtttgaattgccaagctcactgattggagataacgaagggtcgcagcagacaagcacattcggatcaatttgaatattgcttttttaactcaggctctaaaacaaaaagaaaaaaaccaaccactagaggcgaattcaatgcagtcctggaagtctctcataaggagacctctcataagagagctctccaaccgtagcgtgaaagtttcccgcttcatgaccaacacatcgatcgtatcctctgtgagagaagaaacagtaaaatgtattgagtataggatgactagccaacttgatccatgtacatcaagaacatgctgtcaaagaactaaccactcgttccggagaacacctgtagatgcttgcccgccagcggaggataacataaccacatatccttaccacttccgccctcggctttctgcgcttcgtttggctccatccactcacaaatcagaaacaggtcgctgagaacaaagacgtgacctcgtctatgctctacgaattgtccagtcgttttcggtgtgaaggatatatggacatcaagagaccgacggaggagtcgttggaagggaagggcgggaggactgatttgtagtcgaaccatctatacgttgtattcaatttacagagtttgtgtaagaacgattagaagaagtttcagcacacaagaggaaagggatcattgctggacggaatccaaacatagaaggaaaggacatacccgaggattcattgtaaacaaatccactgtgcgctcggtgctcagacggcgctcgatatccaacaaagattcctgaatttgaggcgctgaggacgatacaggagataaggtcgtaactgaggttaaagagggacctccttgagcagagttagttgtcgaggttccggacgaccgaccattgacgctgaaggcagaggctctttttttactcaacaggcatatgtcaggcactagtccgagtacaggttaaagataattgaccaaattctgactaacccgctctgtctactactatccccacctgaactagacacgctagctctagcagttgcctgatctcgactgatcttgcccccatcgacagtcatgtctagacgactctttgttttttccaacagtgcattcagtctgtcgtttgctccgactagaagtccatgatcacttctacccggctgagtgctaactcgaaagatggatgcaagaatcaaatcaggttggtaaggagtcgccaaggaacagccacacatgaacttcgaccgacatacctcttgagtaatcgcgagtagagctttttgtagtatcgcaatcgattataaggaagtacaaagaaacaatcgagggtccaagctccgtctggggagatactgggaggaggctcttgcaaagtctgggatatgtcagtgagaatgccagccaagtttggatttgattgaactggagcataggtatcgaaggcggtaaggtagcaggtagcatagcgcgagtaagcaggctccatgtcgtcaatcttcaacgggtattgatgaaaggccatatgaacatcagttcgtgaaaataaattcaggcggaaatgtgaaattaggagcagggcacacacccagcgcataagaagatcccccagagcttttggcgaagaggggttggggccaatctcttttagattctgttggacaacagaaggaaacaggttagactcaattcctcgagtgattgtaagaccacgactagctgtgtaattgaaggcttacagtcccgaacgccctatttattttgtagattccctcgatggcgcgaaacattgaatctaaaggctggggaggaaagtttgttcttgaccaagccgccgcaactttctagaataaggattgaatatagaaaagacaaaccaaagggagttaagaattcttgtttataccaaaatatatttttggaaagaaaaggcagatggcttgggcagatagcttaagtctgtgaacagccttggcgatttttcggcagatgatccgagaacaaaagtagaagaaagcgacaaggaaaggcgaaagaaacaaaactcaaggactcactttgatgactcctccaagctcttcgacatatctcttctcagtttctatgagatctattaacggattcgtttgtttctttctcgtctgtccctcttgatcgtcttctctttcatcgatactacccgactgagattcctgaaaactggtgggaggagatgttacaacaggatccgaagaaggatacggcggcctcgttggtctccagttcgcaagcggaggctccatgtcggattggctgcaaaatacaggcaaagagagaaaggatgtgagtgagagtggatgagctactctttgggaaacagagttaggaggaatctaaacatgagagatctcgatatgtgtttagataagagtatatttgaatgttggcaattcaaatatattgtatgctcagatgctgttgggtctggtcacgtgatgtggcaactcaacacgaacacttctctccgctaccatcgcgttctcaccaccggttctttcgcctgctaccttaatcatgtccggacaaccgccacaggaaaagctctcattctcgttaggtctcaagaaacctcagtcaaagcctacatcatcttcccagccggcgagcaagcagctcaagaaaccagcattcggtctggtagactcggatgatgagactcctgtcacttcagagccagctagctcgtccggtcgttcatggggtaaaccgaaagctcccgctccgaaatcattgatgcatcaggcggttgcgccatctcgtgcagtcagagagaaacaggatgaagcattgaagatagatcaggctgctttcgcttatgatgaagtgtacgatcatatgaaggttgcacagaaggctgccagacaacgaaaggaggacgagagtacagacagacaggtatgttcgtccactcaatagatctatagagggcgtgtacttgctttaatctcttattgattgtttatcgacgcgttttgtcttatatcgaacagccaaaatacatggcgcaggctatagcgtctgctgcaactcgaaagttggaccgaattagagcagaagaaaagatgcttgaacgcgagaggcagctcgagggtgatgagtttgccgataaagaaaagtttgttacccaggcctacaaggaccagatggaagaggttagacgggcggaggaggaggaaaaggctcaggaaggtaagttgaatatgtatacgtttgccgtcaggacatgtattgatgtcaacttgtccataaccttctcacccctctagccaagatgagagactcgaactccaaaggaatatcttctttctacgccaattttctcgctcaagagtccgacgctcactctgctgccgtaaatgccgctcttcaagctaccacaacggccgctagcacacctcagaacttgacgattgttcgacccgtccagggccctgctgcgccgccaccaccaccaatgtcgtcttctaccgactcttccacaaattcagagaggcaggcattgatcgctgctcgtgaaagaggattagacgtcgagttgaacgactctggagaagtcgtagactcgagagaccttctctctgccgggttaaactttatgccaaagaaacagccgctcccttcatcactcgcctctggatcatctgctaactcgaaggcaccatctggaccatatgtgtcaaaacgggtaggcgccgcggcttctgttaaagagattagagctaggcaggacgcgctccttcggtctcagatggaagaggaggaaagaaggagagaggaggaagccaaggtcagagagaccgaacgattgatcgggactaaggagaagagaaatgacgagagttcagttggggacttgaaggcacgttatctagagcgaaagaagagaaagttggaggaagaagcagagaggaagcgaaaggaagctgaggaagctgctagtggtggaagttgacctatctaatgatccaccacggtgttctataaagtctatgtctgaccaaagtatcaaatacaaggaagagaaggagctgttatagagatgtgttcatagcaagaagaactggaatagagtcagcaactcttcaccatggttaccgaataatttgctgtgccgatcaacttcgccgattcttgcttattcgtattcgaccatctcaaccaaccactgagcagaaactactgacccaccaccaccattgacaacaatcacatcttctgtgctcgacccggaatttactatagatattcgaatatctatctttaacaggactcgatatccctctcagatcaaccttcttccctcttctctacatctcctcttggttgaatatataaatcctcatgactaccgctctctctcctcttgttcggcacaactttcgggagctgacgaagcttcgaccgtctcgccttgacttcggctcccgcctgaactcacacgctccagtgtattctcgtgtctccctcgtccagaccttgccaagattctctccgtcatttcccaatcctgctctgttgttgtctcgtcatactcctcccctggctttaccgctatctcgcttcgtacccgttctccattcccggccatactcctctcagtctcatattcaatccaaacttaagactgaagacgatcatgaaccaaatgaaggccaaaactcggaatccgtcagtctatctcaaaggctgaaagctttgttcaagaagtacggctggtgggccatcggggtgtacaccgtgttctctgtgatagacttctccatcgccttcgctggagtttcatactttggaatcgacaaagtccagcgattcgagcgacgggtgcttgattgggccaaacagactgtcggatggacagatgacaagagtctgaacgaggctgtggaagataaggtggatcaggcgaagcaggtggtgaaggatgaatcaaaagggaatggactttggtccgttattgtagtggttagttttcgccttgttctccgtctcttctttggctcgttttgatgtcatctgaggaatcagaagctgtattaagatctgaactctgttctgttctattgttctaatagtcatatgccattcacaaagttcttttcttgcctttccgagtgacactcaccggcatggttctcccctcagttcgtgttctacacatatctttatttctcagagagtgtgagaatgatctgtctaacctcgcctctccttaattccagtttgtagctaggatgaccagactcggctgggctggaagaggagcaaagtgagcgcctgtcattcatccttcctcttgatcattcactttctgccctcaagtatatatagctatctggttctgatgagactggcttttctcttttttttcctgttcgttgacttcttgggggcaaactcgcgcagggggctatcggtgaaagcgaaggaaaccgcccaaaaggcgaaagaaaccgctcagaaagctaaggtgaccgctcagaacagattacaaggataaagagacaaccctttgtggatcatgaaatgaaaattcttagtattcgatttctctgttgtgaacagaggcttgtagggttccgcgtagggaagaagggagagaaaggtggcgagcgttcagcgatgagacaaaaggctacaagtacagatttacagatacgaacgacaggaaagagagaggcccaatagatatatataacgaagaaaagaagaggggataggcaagaagaaagactctcagccgatcacctcatcagcctcctttacttctgacaatgaagctttatgacctcctgccctttctcgttgtccttctatttccgcttctactctctcttccgcggcctcaacattgtcgtctccacctccttgcttgtgattgctgaccgagtcagcgtcaaagatcagaggaagcgattcctctgcctgatctttgtgttcttctgcttgcgcgagttctagagcagggtcgatggtagctagttctgtaaccgtggtcgaggccggaacagaagcaggagcaggaacagactttgagctaaagaaagagagccttgttttagcaggcgtcgtcagaggagcagcagttgcggcagttgatacagtcgatcctgatgagatggggcggcccgtctgttctatgccactgccgaaaatctctgaagttgacatgggagagacaacaggctcgggcgttcgctcggatgaaagcggtgtcgtcgctgaggaggtggatgctttacggaaagagaaccagccgcgtgccggtggagcggcggcagtaccagaaggactgacaagagatcgagggcgtggtgctggatcttcatcaatcaggtcagaaggtaatggcggaagactaagcgtcatcgttgatgaccgatcgcccggttcaccgccagaggcgataaattctcggagagcacggcatgccgcttcgcttgcctccctggcagcatgagtctcggtcagtgtcctcttaagcacattgatctctgatctcaatgactcaagttcacctgggctggatgtgagagctaatcctgatggatcccctggtgagaggccagtcgtgttggacgtcggtgggagccagccgttcaatggagaggcaacccggggagagtttgattcaagtttcgcaagcgctgtctgccgagcggtcgtagaggcagccgaagttggcggttggtcttcgtcgtcttccgctagatccatcaccggcgccactttcgatgctttctcagatgaggatgactcgggaggagacaaagcagggacggccgagcctcccgaagtggctgctgtcgatgaggacgatccccaaccggagaagaacccgggcttggtagggagcgtaggagacatactcggctgaggcaatcgaagctctctcagcccgcctgttcggacccctgtggattgaagagggagtgtggtggttggatcaagtgcagacgatggccctccgatatcagaaaaggaggaaactcgtcggtgaccgatactcgtccgagagggaggagttggaccatgtccgacgttgagagatgctcgcttgtccctcttggaggtcaagggaacagatccggtggaaggagagcctgcggtgaacggcatatcaatcccgagcccgattgaagagtttggcgagctaactaaggctgacgaggatggagctcccagatttccgtttacaccgaggctcgttcttcgagagtccttctctgtctggagcctcatgacccctctcctggcttcctcgacagatcgccgaagggtcacaatgatctcctcgtgcagctcggcctctttgagcttggtctctgttgagcttttgaacgagattagctccttattttcttcctcgaggttggacacttgagcctgcaaagtagccatcgtcgtttgaaccactttgagagaagaaagcaaggtctcccgagatgcggcggcttctttgagtgaggccgttagctcctgtattgtctttgtttgatcggatgtaacaggcggtgcggaaggagcaggagtaggagtagaggatgtcgagactgagacgttcgactcaagccgagcaacttccttctcgagagaagcaatccgttcgtctcgttcctataaacgatgttgttgttccagcaaaaccgaggcgctcaggtcagctttctctttttggggtaaagttgatgtctggggagacatacgttgagttgagcctcccagtgcgcgttctggtcgtcagacattctcacagcgagtgtgttggggattcaaatgaggtgatctgtatccaaacgactggtctaggatactgctaatgagctcgttggtatgttgagtatgttgatgcttgttctctactctctgtgtccccgatcaatcgtccgagggcgaggatgagaccgggccagctgaaacgggaaagggggaaatgtgtgcctgaaagtcgatcgtcatggttacgtctatgctgtgctgctggtttcacgtgaattgatagccacatgctcacccacgtgctagggttgcatccgctcttgtcgtcatcaccactgccgaggacaggggttcataaggagaaaaaggtacgcaggcaccatctgcgatcgcatccatcccatcaggcacggttgaaactctaagaactcaccatcgtcccagcttgacattcatcgtcatacagaccacaacaaagacagagagtgacctatctcccatctattatctacagaagaaatgtccatcgaagttaaagacggaaaagtcttccttgcgactgaagacgtaggcaatctctttctatctgtttccagtctatcgacattcattgaatatcgctaatctttgacttttgtctataaagaaaacaagcacggccgaggtctatctctatggtgcaaccgtcacttcctggaaacatcatgcagaggaaaagctcttcgtgagctccaaagctcatctcgacggctccaaagccattcgtgggggaatcccggtcgtctgggtatgcatctcatctctgactgtccttgtgattcttcaacgttgtccaaatgtgcatctgacaaatttcctcaattattttacgcttagcccatcttcggaccgccgcccaaggatgaggagaaccttccttaccactccaagctctcccaacacgggtttgccagaaccagcacctggaccgtcaagagcgagatcaaagagtttggcattgtcggagtcgagctaggtgactgatctccatcttgttttgtcttcgcgtatgccgcatgggctcatatcaatctctttgccttcacaaacgcaagagctcaagccgaccaagtcgatctcttccatcttccctttccccttcgtcctccgatacactgtcactttggacggaaagagtctcaacgtcgcccttaccgttctcaacacacacgaagagaactacctcaagttccaagctttggtaagatatccatgagcttaaatgcgaagcccgttttgattttccgcggaaacacatgtaagctgaccgctcgatcaccccgtccacctacagctgcattcttacttcaccgtcccctcgcacgtggacgcaaggatctcggacgtggccggtcttacctacgccgacaagcttcgaggtggcaaccggttcaccgaggatagaagtgttatcgacgtcgcgaccgagaccgatagagtatacttcaaaactcctcaggagctttccttgctctacggcgagaaaaaagaaggaggactcaagatcagtgtcgagggtttcgtcgacagtgagtacacccacttctattgataaagaaaaaaaggcctctgtcaaagctacaactgaaatttcatgtctgttcctttgctcagctactatctggaaccctgacgagaagaccggctcggccattgctgacatggaggacaggggatgggagaagtatgtttgcgttgagcctggatttatcgatacgtacgtattctttactttttgtacccccacctcgaattccaacccaaccgttctgaaacttctacgttatcctatgacaactcacagtttctacactctcacgcccggagacgaatggaccgggtcgatgacactcaccgctttttgaaacgttagctctcgatcacctcgattgtcttatagtttctaaattgtagcctcttatcttgcccatttgctgtttgtttacaactatgtatcgtatgcgtgtgaatctcatcatccttgtatatggtactataagcaagcgaatgattatctcgagaagaaacttgccaactatacagtattattcatacatcccgatcggcgtccaaaagacatccttagcgaagagagaaaaagaaccgcgggaacatgagatagagtggtctagttcaatacacggatgaacccaatcaatgtgttgatgaataagccaatcaaaatcgctctcaacatatgacgtctataaggaaagttgcagagaagatgaagacacggaacagagcagtcagtatattgtatctagtgtccgctctagtctggataacagaatccgcgcaaatgatcgatgacaaacaagagaaaaagagaaggaacatacgaaaacaaaacagtgggtacatctccattcgtccctggactaaggaaactgtgagagtttggttctctaaagaagaacaatgggaggagagggaagaaccagccagtcagagctccttggagggaggatctgtattgtcctctatcaacgtctggttgaggaaacaaacaaggagaggcacagtatcagaataggagctcaatgatgacaaaggtcatggctgagaacagaccgtcatcgagggaaccggcaccaccgcctgcgatccactgatcttccaacctctccgcattctcatccactgtttatttgtccccgaagaaaagagagcatcatttagtaccactcggttttcaagatgcgataaccaggatgacatgagtgttcaaaagaaagttttggaacctacgttctgcctcggaggtgactccgtgaaactgctgacgcatgatcgcgatatccgcctcagagagcccagctgttgtccgtaagagatcaaaccctcttagcggaggtgtagtttgtgactccttgagaagcaagccgtcgtcgaaacccgtttaaggagactcgtcaggatcactcggtctttttatcaatgtatgcgctcaaggatagaaggccaggcgcacttacttcggcaggctcagtcagacttcgcttatcctcttcttcctctgattgttcaaatgataaaccaactgaacaatgtatccagtatatctcatcttcttcctcccgcctcccacctccacccttatccagttcactcgccgataaatcttcaaaggccgaccgaagggtagtggtagattgatggacgctcgccttcgtcttttccgaaagtagtcgaagccaaggaagaacgacaataagtgggttcaatactcgaccagaatagatcagtcgaagtcgtcgattcatcaagtgaggccgagaacttcggatctacccaagtttgagaggaaaagtaggtcggagtccagagtcaggacttttgaagactttgtacatacgagcaagcaagcagctggccaaatgagagaacaaaatgtcaagatgagaagagagaaacttgccatctgtttaactttctgaacgttgtccttctcacccactgagatatctaaatctcctgagtcgatggaaactccttggttggcctcatccgcgatctccgtgaaccgaatgcggatgatgcctgttgatagaggtcttgtcgttcctgctgatgtattgcctgctccggactcctccgaaggcgatggccgagctcgctgcttgccttttgaaacctctgatcgcaccggaggtctgaaagatggtcctgcgctcgacgaaacagatggttgtttcggcagcagcggttcgatgtcgttgttgttgtccgatggatatggcatagggacagaagttgatgatcgctaggatggttgttgcttggaaaatagaagagaatcaataatcatattattgaagtattatagtccgggtgaatttctaattggacttttctgccaaccatcaagcagcctcgatggacggtccatcccattcagagcagcacacagctcctccgacccatctatcgtttactacaggtatcctcgtcggacagggttcggttatcctggttcttatcctattcatccggtatgtcatattcgaagatggctcaaaagctgtagaaactgcttttcccaagaagaaaccgaaacttgtacgtgccaagattggtccatctgaaacttcccctgtttcttcttggatagaagccagtcagctctcggtcaatgtctggaagtcgaactgaccggtgggatatatcccttctgactatttctagcgtcggccttcccagttgaacagagcatcttcggcccctcgccctccaacacttccttctcaggtgctgtcaaagacgcaatatgacctttcttcgcatccggcagaatcaatggactggttgaacgttctattcggccaggtaggcttttcctcatctctaattccataccactcggctgacgagtttgtatcgtgtttttgacatgtcttacatatgcttttcctaggtaattgctaactatcggtcctcgctattagctcatagcggagaagacggagctaggcgggtgatggagtcctggttgaacccggctcagggagtttcctggcttgtaggtcatcgtcttttgaatgaaacgaacgacttgaacagctaccctatatctgcgctacatcttgtttaatgtgttgttaaacaggaccctatacaagtcacctcgttggcgttaggaagctcttacccgatcttctcaaatgcccgtatacggccctccgacgcgtcaggacgcatggtaagcgcttcttacagcctccccttcaaacagttatctgactgtcaaaacaacagcagataacatatgaatacgatctaacaccaaaatttaatccctttcctatcgtctctccacttctaagcgcgcagaaacagagatagattattcagattcagtcactctcgggatctctaccagcttgctcattaactttcctcgaccccgatttgccgtccttcccatcagcctcggtgtgactctagtagggcttaccggaacagtcagcctctagccattcttatttgcccaatatcatagatacacatacactgacgttcctcctctaaaaatgtctcaatgaaaataggtcagtatggaacttctttcaactccctcgtccacagatcctccgtgtccacaccaatcgatgcaactcgcgctccacccggatttttctctatcaattgaaacgacctctctccttggctctagagcgaaactgcacgacctaccaaagatcgaacaactcgtctctagtagactccgacaggctctcgttgaccgtgtcgtctggccaaagttctttgctgtcggacttcctgcgctaggcgtcggtgtatcgaaacagacgtcatcgaaaaagaccggggaatcatcaacgacgacgacgacaacaacaacaacagcatcgtcatctggaccaggtgtgggtgcaggtcggaaatcaggtgatactctgctcgggggagataccgtagatagtaatatattcactaaaaccggaacagacagaatcgaaggtaaacatgaccggccgaccgacagagaacaacattcactcggattcgggaacttgggtgaacagttcatgaagaacgtccttcctacacctgacggtttggatgttcatctgactgaacaagatggtattctcagagagtccacaagacagagaatgaaacctgggatgacgagaagacaaacgaattcattgttatcggcttcttcagaagaagatcttgtcgatccgtccgcgtcggtgttcacctcgtcttccaagttgggtcattccggtcaaccggccccgacgtcgaggaggagagaaacagggctcggtggaggcgtcaagacgatgcctggagggagcgattggggaccagatgggatgtgataaaataatgaaactgaacatgctcatgctgtcatcgaagaaaacaaactagctctctcagctcctttacagtgtcgcgaacgacccaacggtcaacccagaatctgtttatcatcgatgcaaaggaaagtaacttgacagaataataagagagagaaagacaaggtaaagagagatgataataaacgaaaagagagaagaggagcaagagcgatgaatgaaagatagggtagatgatatacaaacccaagacgagagcgtacgcagataaggaaacaagacaaaaaaacaaaaagggggaggatgtaaaccaagggcgaagaaggtcgaagctaggaaacatggggcaggctaacggaagtagaggagggtataggatccctgagtagtaagagaaggttgggatggaaagaaaccatagtatgaagaagagccatcagtgaagctagtcaactacaaaactaaaaagaaagctcgggctttggtcagcgatctgtatgatcatagagtaataacagatatacgagtgatggctgaaaaggaacggtagaaaactcactcgacatcggctccacaccggtcgtcttctctaaagccctggaagcgaaatctaaaggaacaaacgaagataaatagaggagacaatatggtcagatcaccggtcagcaagatatactgctcatagtttggatcagatataaaaagaaaggacaaccacatacatctaacatctggatcggaatcagcagccagcttctctagcgccgggacgattcttctggccgccaactcttggccttcagcgtccgattgaagggtcaccgcaacggtctctagagcccgagcgacgttgaaccggatgttgggaattgcatcattcactaagccgagagcagcatccaacaccgaatcgcgaatggtctggaagtttagtgacggggtgatagtctgaagaaagaaaatgacagaaacggatgcatcattagacagtgtcttaacccaggcgctgctgattctaactcactccgatggccaggatagtagtcattctgtagaggtaattcgggtgagttcccatagcaagaacttgagggatgatcgtccggctggcccactcaacaccaaacacgtcggtgagcttcttgaggttgacggtagcggactctcgaatggaaaacacgctatctccgagccaagacatgcacaggttaccaagcttgtcgtcgaagaactggactccgagttgggtcgcaaggagaggaatatattcgatgatcgcctgtcggactcgccattgcttgtcctcggcgaggtcaataatggcaggcagaagagagtgagagagaaggtcgataccaatgactacgaagggtgtgtgaccacaagagagtatgattagataagcgggacccgttcccaaacaacaaaactaagacacgaaccatcgttgacgagttcaagcttgccgatcaactgaagcctaacatccgactgctcgtccttcaacagctgcaaaaacagaggaagaaggtgctcgatggtggcctccttgcctaacagaggagcaagcccgctaatctgagctccaagcgcggccttaacgtgaggtgactgatcggcggcaaggtcttgaacacatgggagaagtcgatcaaggataacttccgcgtcgatcagcttggcgaagcctgttatgagatgtgttcgtgatacaagccaatcagccaatagactcaacaacagatacatggttagatggtgagacagtgactgaccaggaagctgcccagaagcagcagttcggacctcggcctcgtcgtccttaagaagagagacaaaagcctgaaccatctcctctcggatgatatcctctccgacagcagaggcaagctgggaaaggcaacgcggacacgataagaagaaccaaggtcgggttaacacctgtgtaggcaggtcttgtaaaggacaagatgcaaacacttacagccacgaactcgtttccaaccatgtacctgactcgccagctcttgtcagtgaaactttgcctgagcagaggcaacaagtactccttgacctcctcgggcgagagctgctcggcaatagcaatcaaggcggtaacggtaagaagtcggacagaatcttggtcatcagtagccaacttgcggtagattgggatgatgtcggaaagaagcaggttgtgggcctgagtgaagttcttcgcaaggggctaatatcaacaaccggcaaaatggcatgtccattagttcttgtgcatctgcgagccaagatctcggtcggagagttaatccgaacggatttaggaaccaagacttacacccaaccccttggcggcggcccttctgaccataggggtatcatctgaacagagtccaccaaacagcttcctcatctcttccttggaagcttccggagcattgttgtacaccggagcaaagagagagcaggccgaagttcgggaagtgaaccactcccctgtagaaagtcttctgagaagaggaaggtagtgctcggtcaattgagcgggagagagctggacagcgatctgagtgagagaatcagcagcctgtgaataatagaatgcgtgccattcaaagacaggacgtcaacaatgtctcctaaacggcctgacgtgattgcatattgttttctttctctggtgatcagattattgaaaactctgattaccttttcacggactaacgtctcttcgacagcagccaagttctccaagggccccagcaccaaatgagcgtattccttctctccgacgaactctccgaactctcctaactcctcggcaagggcgagaaggatctcgtcttcatcatccaactgatcttgaaggaagggaataagctcctccctcgttcgctgaggaccaagggcgagagcgatcgtggaaagacgacggatggaagtcaaccgaagggcaacatcatcagacttgagctcgtcttttttccgttcgaagagaaagaagaaagtttaaggattagaaccataaaggacagaagttgtcaacaaggtgggtcaagcctcttgtccgcctctcatagaatctgtcataggaacaaagcaaactaaccgataagaacggctatcgggaagacgtcggccatgatctatgcgttgtttggtaaggttctgtaccatcacggtttttccacgagaacatcaaacacgcaaggggcgagcggagggattggattgtaatttatttttcaggcgtgaaatgtgatgatcatatgttacaagagaacccgtcagcaaaaccaatatctctaactttcaaggacgatcgaaaagtgatcagaacgagtggagagaaaagataaggacggacctaatggaaagctagaggagatgggtcgggagagatgatcgcggttacaggacaagagaacggagccagatggaattgagcgacgtgtcagcacgagaagatgaaccaaccgattaaagaaactcagatgacccactcacctagaagatagaaagaacaagacttcgacacaaatgaaacaaagagtattcgaacaaggatgaggatgagtatggatgtggtggagaacgaagaaaggaaaaggaagagcgagagagacttgggaagaaacgatgtgtgagtgagttggcctaggtgcacgaaaaaacgagcaacctggttacgcccgtaaccagagtgatggctgcgtttgttcaagaggtagaaatcaatatctttcaatgtattttctatgtcacttcttcctatgtgtctatagatcgctttgtgatgctcgtggaagagctgatgtttactttgagaacagaagagaggtataattgagagcagatgatatatgctttggattatgagaatacaaatcttttctatgcattgggtatcatcgtcgtctacgagaccgtcgaaggtttggttcagaatcaaccgaccttcttgactgttccggactcccgaagtcattgatgttttctgaaggattacttatatccttctccgtatcagtctctacttccttctttgccttttttctttccctgaacgaaccctcatcatccccaccgttgctgtcgctatcagaccgattctctacagcgtccttcaatgggcgtttcctgacgttcacttcatcctcatctccttccagcacagcgtttgcccaagttgatctctcccattctcttggtttgatctctccgcctgccttaaggcactcctcccgaacacccttgaagaaagcccagtactccggagctgtgtacttgagtcccttgcgaccgcctttgggtttgatgacgaaaacagcggcctcgtccgagaagaatggaacgtccgatgatatcaaagagaggaccaaggaggcggtcgcaggccccacgcctcgcagaacacagagggtcttcatcgcatctttgaagagacttatatcatcaatcggtatcgacccagccttccgagaaagtatttgaaatgcccgtttggaagcctctacgacggaatcctcggtcaactttgcaatcatccctttcagtgccggacggttgactccaaaggtaagtttggcatccatgacgataacgagctcgcgttgggtcatatatggcggatttcgatcaagaatcgtgcgaggaatcgctcgatgtgtctcggtatacaaatcgaagtacctggacaaaggtatctttgacgactgggcagccaagcgttcacatatcgagctcaaacgaggagaaatcttggccggagataacgtagaggaatgattcatcgtgtacgagctccatagaagaatcaacaagagctaaaggaagtagcgcacccgggatcgatatagggaggaacgagaccgtcagtgacgtaaccctggtggttatgatcacggtggtttgcgctcaaaagcggtccggccggctcatgcggtacgctgttttcattcacctccactctttttctctgtgtccaaaggtataaaaaccagaaggtaacgcccacgtcgttccagatcaaccttttccaactgcctctcatctttccgtatctttctcgtttctttcaagtcaagctttctcacaaccaaaacaccgaaaagacccatctcgtcaatcttctttcaatatgtctgccaaaggatacgctattcacgataccagcaagtacactgactttaagctcatcgactacaagcttaaagagcagggagactacgacgtagacgtcgccatcagccactgtggaatttgtgccagtgatttgtttgtctctcccttgatttctttcgttctctctttctttcaactacagcagattgatgttggtttccgtctcgatctcttttcttgctgccgcgcgtacagacacaccatcactgttcgtgtttagaatctcgtctcgctcgattgtctgcttgttctcatcatctttcttcttcatctaatagggtggttggggtaaacctgatttgcccctcgtggttgggcacgagattgtgggtaaatgcacaaaggttggatcaaaggtaaccgaattcaaagtgggagacatcgttggtgtgggtgctcagatctcttcatgcttcgattggtgtgtcgcctcttctatattggattgttccttgttccaaaggatgttatccgtcttcttcctatctgaccctttttcaaatgattcttatagcaaaaactgcaaaaatgataacgagaactactgtcctgactgggttgatacctacaatgccaagtaccccaacggagagaagactatgggaggtgagttggatcatgtgccagattatatcataactcgagtagtgactaagttctcttttttctcttttttcatcctgatgttcctttctaccatcccttaggatactctactgctatccgagcccatgagcggtttgtctttgctatcccagaggccctggaacctcgacacgctgccagtatgctttgcgccggattgaccgtgtactctcctttggttcgatttggagctgggcctggaaagaaggtcggaatcatcggaatcggtggactcggtcactacgccgtactgttcgccaaggctttgggtgccgaagtttttgccttctcccattctgaccgaaaggtggatgacatcaaaaagatgggagccgatcacatcatcgtgacctccaaagagaactacgctaaggaacatgctggggagctcgacttgatcatttctaccgttgatgttgcttctggagttgacctcaacaacctgcttgcctgccttggcgtgcacaagcacttcatctcggtcggtcttcctgatgagcccctcaacggagtctcccctgcggcgtttatcaacaacggatgcttctttggttccacgcacataggtaacaagaaagaggcgaacgcgatgctgaagcttgccgccgataagggcatcaagccttggattcaggagcttcccatgtctaaggttgctgagggtgtcaaggcggtcaaggagggacatgtacgataccgatacgtccttcacaacgacatcgagtaatttctgtctcgtttctcttgcgctatgatcattgtagacgaatattgtatcatgctatttgtgtatctatgcagctcggtatacatgtacttctgatccaaacatagggatgtatcacctatcgaccaatgagatgcagcgatgcgtgacgtaagcgaaaagtgacgtgtgcctttcaactccgaggcatcacgtgattcgatagagatcgatagtttcttctagacgatttccccatcttttttccttctatttcttcattttaattttcttgttcatttcttcctttctctcatccatctctctcatcgatcaaagtaagtcggagttctctctaggtcaagacggatctctcttgcaatccacctacttaccttggcctttttccttttatccagtcttttcataatgtcgtaagtctcgttatggatagaaggaccttgaaagcaggagtagttgtccaggttcttatgtctctttcctcttccctcatgccttgtaatacatcttttcctgccttttctatagcaacgtttacgtaagttcccatctaccacaaagcatcttcttcccatctagttcatctcagtagctaagctaacctctttgttcttttttattatcagttcgatatccagagtatgtcatattctcgaacgtttctcgagccaacttgcagcagtcttcctcacgcatactctttctacatctatagtcaacggagctcctgctggccgaatcaccttcaagctctacgacggtaagcgccgacttatgaactctttacatctatagcataccgtattctgaaatggcttgactctttgttctcgttatagacgtcgtccctaagactgcccgaaacttcagggagctctgcactggacagaacgggtaagcagatgactatgctgatgtgatatttacatgctgtcattttttattctgccttcaattgactaaatgcatacaattcctgcttcacagttacggttacgccggatccggcttccaccgagtcatccccaacttcatgctccagggaggagacttcaccaaccacaacggaactggtggaaagtccatctacggagccaagttcgctgacgagaacttcgccgtcaagcacacccgacccggacttctttccatggccaacgccggacctggaaccaacggatctcagttcttcatcaccaccgctgttacctcctggttgaacggaaagcacgttgtgttcggagaggtcgtcgagggattggaccttgtctccaagatcgagtcttacggatccgactctggaaagcccaaggccaagatcaccatcgctgcctccggaactctctaagctaacttagatagtacctgacttttcttatttagtgtgcctatgatatgttctgcatatgctgtgtcccgtctttgtctcaaactggatcgtgccttggaatgttcgtacaagattgaagcagtactgatgtgaacatgaacgctaacgaacacacgggtgatctagcacctgaaaaatctcacacaagcccctggttaacagatggatgttcatctttcatatcaagcttgagatgtcaacgtgattgatgtcaccgtctgaactgtcaagagacgatggctatggggatgttcaacgtcccaatttacattgatccaaattcagttgaattaaatctttattccgtccattcagtcatttctttttcctctctttctactacctacatacatatacatacacatcgccaacttggagaacacaaaagaaaagagttgtaagagagagatgaacgtactgcctttccgatgtgcgtaatttacatgtaaccctcgacgtaaccctaacggtcgttcttgaatttgctaggaagggaaaaaaggaagagaccaactttttcacttttttctcaacagcatctctttctacatccttttcgttcaaccttccctctctctattcatatttcatcttaaacaatggcttccatcgaagagctttccctttccgacaaggaggaggagtctgtccccaccctcgttgagtccgaggactctggcgttcaagtgagattttagattcgttttcttttccttcctttttctctttttctctcttttcttccctcttttgtttgtcaatacttttctctgcgtctcctgtcaactttcctattgagcttccgacgagagatccgaatgggattagaagaaaccgttgaaaagaggttgaggaataagccccttgtttctcggcagacgagaggctctgtttttcatctctcttccttcgacacatgatctttctctaagtttgctcaacatctttctcatagtctctctgatattgacgctctttatgggtttgacgcttcacagtctcgatctgagcgaaaggcccgaaaggcccttgccaacctcggtttgaagaaggttgctggtatcacccgagtgaccatccgacgacccaagaacgtacgtatttcctcttcgtcaatatcaattcaatcacgtacaataacactaagaagaaatcattgactccttttcatctatgggaactcaaaatcgcaacacgcaggtcctttacgttatcaacaaccctgaggttttcaagtctggatccgctgatgttcacatcgtctttggagaggccaaggtgggcagcatttcttgccttagttttgatctgtccgagctccgaatcataatcgtcgttctttttacttgatattcttcgtatcagattgaggaccagtcccaccaggcccagatggccgctgctcagcagctcgcccagtcttccggtttgaccggtgaggaggaggagggtgaggagtaagtagattcaataccctttctagttcactttcctccttgcaagttctcactgacttattcactttctcggtatcgttctttctcatcacagcattcccgagcttgagggtatccagcccaaggagccttcctctgcccctgcttcttccactgttccctacgaagtcgatgacaaggatgtcgagattttgatgtcccaggccaactgcactcgagagaaggccgaggaggccctcaagaagagcaacggtgacttgatcaacgccagtacgtgcccttctgtctagtgcttgcgaagacgtctccgagctcgtttattgtaagaaagagaagagagaaagctgaatgtttctctttgtcttatgacatttgctatggcttcatatagtcttggaggcttccgaataagtgttgatgctggagtgtaggcaaaaagattagtgtatatcgggtgttgaggcttcatcttccattttttttttgttacaaccttaagtaaaaacaaaacaattcatacatgggtttacggctgttgccatacaacaatcggacatcgagtctgagaacgtgaaaggatgaaacattgagctctgttgggtataaacatacaaaaaggctcacatatctgaacgagcaacagaaacttacacaagtgtgattgaactgagcgcctctacatttacaactgccactaaccctttttgtttgggctgacgagaaaccggacacccatcacctcctctcttctacttctgaggctactgaggtcgtctcgttccagtcgatctttaacaagcctcatcaagagtcgcgaaggtacacgaccgtcgatctttgacattcgtctgatccaggacgtgttcgaaagacaataaacaacaacaagaagccagatcatcaaacatatctgactaaacccatcaattctctttagaccatttccatatcatctagatctagtctgtacatcctagagatcctctagaaatatttggaggatgattttagagatcaatttcgatgaagggatacctgctcttaatcaggcgaccacagcctcggcttactccttgaatgcgtgagcaccttctacccaagcttcaggcgcgagggtcttgcagctttgaagtggacgttcaagctcacgcttctcgtttcgatgtctctttacttgggtacgatacagacctcctcttcctctgaaaccttgtccggaaaacatcgctccgcacttcgacttacctccggaagatctgctacccgtgctcgagaacgcgttattctacagctgtcaatcgggtgactctgtgcttctacaatggctgctatctctacaaggaggcatagtcagtccagcggttccctctcattcgtgtctccttcagtaaactcagacagcctcattcaaatgcttgttttgctttattataatcatatgtttctgtaggaacgcttgcttccgttgaggatcgtagacgaggacggttgtgatttggtgtctgttgctatcatgggatcatcaggtcgggaggatagagaagagtgcgtcagaatgttagttccgaaggtgggtataggagggagagattctggtaagtcttgatccttcgtatcttggtctctgatcgagtacactaagatagatgcttggatgtattctcttctcttaaacatgtgaccagctggctggagctgtttgcactatgcagcactacactctacacctgcgcttctctcatttcttctgacagctggagcggatcctcatctacagactagaaaggggttgactgccttgtatgttgatcgtcctctcttactcgtttgatgatgaactccggctcaagatcgtatgcatcgacaaatgtcttgcgcttcccatcattctaatagagatatcatatctgacctagactctcgagccgaacagacgatcatcttgacttcagtcatgacgtctaccccgccatcatatgattcatacagcgctccttcagattcaacctccaataaacggcctgtggcgagacgtcggtcgacagcgtcgatatctgcatccgtcgctcgatcccaactcgcgcgccgtcaagagcaacgggagcttatgagagaaaagaaagaacggtgggtgtcgacagtggcggagaaggtgggcgtcccggcaggtcggttgacggagaagatgtgggagggcgaagaggcagatgaggtggatagaaagttacagagaaagaaacgagaaggaagaaagctgatgaacgggttgaacgagtcagagtctgaatcagatgcaatcgatctggaagaggccgacagaacaaattctgtcaatggtgacgacgaggacgaggacgattatgacgacgacccagcctacagctcgatgctcgtattctccctcccgactttgccatcgctcttggattctttgatctcttcgtgtccaccaaatccgtttcctagggaatggaaggctgcaccggcgaacagtgtttatctattcgctcgatttgcgctctacagatgcgatgaagagtggttgatcgagttgctggatagtgtggtcgatcgtatagagcaagtgatctacgtatgtcgtattttctccttctcgagtctattcttgtattcagcgcaggaatattgattagactgagtgtgtttgcgtgcgtctcgttcttttttttcaataggccaatgcggatgacttgtcgcatctggcgttctggctttacaactgtaccttgcttctccacctgcttcgatcagatgctgatctgaaagttgcttgtcatgagttggatttgttcatctcccttcaggtaggcattctttttcaagggtccatttaattgtagggaactaacatctggtttttgtatgcgcgggtctcaaaggaactgatcgatgcgattcacgtgtttgtgatccggtttatcgaacgaaaagttgacattttactcgacgcagcactattggattgggaaccgatgtccgaagaattcagcgacctatcattcgagggcgaatggaactttttaagaaatttgacgggaagggggacgaatgcgaagagggcggcagagaagatagtccctcgggcactcgatgtattctcatcaaccatcaacaccagtgccaacgccaacgcaaagaatgagggttgtacttcgaccacgagaggcagtttagatctgtcaggcttcaagattgcttcgttgaagaaacgagcgtctatcgcagagattcgttcggctctcactcagtcgaccaagctatcgacctctcagaccgattcgtctgtcatggagcagactgcagaggcgaggtcggcgtcagtatcgagcgtaatgacgccaaaaacatcaaaggtaccaaaaacaacgccgacgacaccaaagacgatcacgtcgttcttgacgtccgtccttgtggtactgcagttgtatgaagtcaaccctgcgatcatctgtcaatcgttcgctcaagtctgtaagttctatccgagcttcctacttttatgaaacgagtgaggtttcttgtacatgtttgctgatgacaatttttgattttctttagactactggatcggatgcgaaactttcaaccgaatactcattcggaaaaagtatctctgtcggagcaaagcagttcagattcggatgaacgtttgcgcgatggaggactgggtccgagaggctggcttgcctatccggatggcttcgaagcatctggaatcggtcaaccaactactccaatggctacagacttgttcgcgtctggacgattttgacgatctagtagtcatggtgtcctctcttcggtcattgaacccggtccagatgagacgggcagtgagggactaccggtttgaggtcaacgaggaaaggatgagtgaagagtgtgcgcagtacctggcccaacttcagaaggattgggaaaagcgaaggacaagagtaggagttgaggcccgactccgggagttgtcgatgaacgagaatgaaagaccgatcaacactgaccttttagacgcggcggtgatgtgggtggacaagctgttcgaggagggcgacagcggcagcgggggtgaacacgacctgcctggctcaccggaatgtcaaggggaactgatggattcaaggttcatgcttccgttcgcccttccgtccgagaacacactgctcacgacggtccctccgccgggtgctcctttcgagttgtttcacctggaagaggccggactaaacagagtaaacgacaccgacgatgagaacgacgggagaagctcattggtagctggatcggttcggtcgagcatgtcttcctccagaccatcttcaagggcgagtggctcgtgttcgggcgcgcgttctctacgtttcgtcagacggacgcaccgtcccgttcaggatttacctctcggcttcctaacttggttggattcggtcgagaccgctaaagtcagaaaagaccgacggaccggggacgggaacggcgggaaagtgatgactgatctggctggtccggacgtccggacgccggtgccgttgagcaacggttcaggcgatcgtactgatcctttcgagagttgcgtagtggcgggagtcgaggattcgcgtatcgctccagaagggaggtacgacggggtgcgctctgttccgaccggatggtcacctaggatgcgacggatgactcccagccggttggacacgctgaggatggttcacgacgatcagcctgacgtcagtttatctggcagtctgtcaccgagtgcatcttcggtcggtacattgacgcctggatacaacacccgacagctcgacgacgagctggagaaggaggcagagaaagcagacgagtcgaattcttggtttcggagaaaaatgagctggtcaggatcgcctgtatcgagaaaacgtctggatcagcgatcagctgaatgatcggccggaaactattgttcttttctccaactttccttaactggaatttgattttttgttattaagtttaatctcgacactcgcgtgagcaatttgcgttgtaatcctttcttaatacatacgtttcaatggtttataccctttctttcacacttgcgttcttgcctttcctttggacctcagggaattgttctgttctattatagatgaggtcttgtgcgtgtgtgcgtgtgcgtatgcgtgtgtgtatgtatatatacattcatcaacaacagtgaaaagagaaaatagaagcactcgcaggagtcgtggcttgtttccaaaagaggcttgccgcagctcaagaagcgaaagagagcagtctggactttcaagagaataggcattgcttgagatcgatttagagggcgagcgagcgaacgaacagacggacggacgaacgaacgaacgaacgaaagaaagagacaagaaaagaggaaagaagggcgagtgaaaaagaaggcagaaaaacagggcagatcctttcaagccatccctatccatccaaagcgtcaacgtccgtcctcaacctatcaacctatcgacatccactcatccctaaccgtcgacgccgttgtccctcttttcttgtcttcctcttctttctttcctctttgtgtaaacgtgctcaaggacaagcctagctttcttctcgcttttcctttctttttcttctcgtgccttttctttcggatcgaaacccaatccttgccattctctgagtcccttcgtcgacatcctctcagacacacacatcgacagtttcagacggaaaacgatgtttctgccctattcctttcctttgccggcccttctcttgtctgccataatgtcatctgctctaccagaaccagaaccaaaaccaatcgacaagcgtgcctttcagatttataccaccctcgctgggcaaacaaccactgcgactgcctcggcctcggcggcttctgccacctctactgccgcctactcggccgccatattgacccctccttctccaccaggcgaccagccaacatccatgacctggtctctctgggaatccacagatgctttggttgatccggccagaggaaacgccaaagttagtgttgcccagaaaggaaactttatggggttcagtgtcgagttgtccgtcgtacgtatgatccttgtttattctccgagacacaaacaccaatctaatcagtatcatccctcggggtttgtcttcaaacaggcgaatcaagtctgtaagtcattgttgtcgtcgtcgtccatatcattatcaatccttgctctctaaccaacgtctgtttgttatccttcatgatattccatcttcagtgggaccatcctcgatcgagctccgagctccgtttctcaactacctacagaacttgcgttctcgtactcagtcgggagccaggattcgaatcggtggaaactcccaggagggttcgattatgtatcccgtcgacgagcttcctggaggaggcgccggagggtatgtttcaccatctgtttcgactgtcccctctccatgctaaacgttatttcttcttgattatctttgaaacctgccagatctttcctagagaaagcgtcctcgaccgccacaaccacaaacaccccagatggttcgtccttccaatccctgttctcaaccccaaaaagaccgtctctagactaactccatactctaacagtgctttacaccgaggatcttgtctatgccatgatgaacgtcagctctttggtcaacaccgaatggtattttggtttggctttcgccaatgatactgtgtctggttggaccaacgctatggaggttgcccggttcgtcgaggattcactcggcagtaatcttatcggctttcagcttgccaacgagcctgatctgtaagccaaactttttcaatccgttcatcatgttttgctcgaaaggttccctgatcacagatttcttatatagatacgccggcggtcgtcgaaactctagctacgatcagagcacatatctctccgagattgattccttcttcacggatgagtcttcggtcgatgctgacatacctaacctaaacaactttgcccttcccaacatttgctgcaagtacgtgcatgtcaactcccgtcgcgcctgtctctcacttactgagcccttttctactattccttctcgatggttctagctgggacaacaatggaatccttgatcttgggttgctcactcagtttgggtcgcgaatgaacacgctgtcttaccaacagtacgtccagagatctgctctcgtctcgtaaccgtaaaaatcttctgaccgaacgcttcaactgctccttcctgcctttatttctccgctttaattgctccaccctttctgcctatagctacccggaaaacaacgtatgtcgtcccgtccagacttcatttggccttttacacgtcttaccattttttttctttctttttttcccttcggtattctctgccggcgtatagtgtgacaatcagccaacaacacaatctcaagtcttattccccacatttttgaaccacactaacgcggccaccttggtgcagtcttacgttgaacccgccacgcgaggtatcgaggccggtgagcataaacttgaattgatatataaggacgcatgtatgagtacacagtttcattctgatatgtcttttgtctatccgtctgtgtctgtatccaaggcctcgaggtgtctatgatggagacgaacacggcctcgtgctctgggttctctggtctgagtgactcgttcggggctgctctctggtgagcacccggatttctatcttgttctttgtcaagaactatggatatgaggttgaccgaagcgctttccttccatcctttaaagggctcttgattggtcgttgaccctggctgcaaacaacttcacgagtgcgctctaccatgttggaggccgagatgcctactacaatgtaagaccacccgtttttttctttctttcaaatcgacgtcgatatgaaagttaacattctctccctcctatcgtatagcccttcactgccgttcagacgaaccaatcgaccttccgaggctggtcgaccggtcctatctattactctttccttgcaatggccgaaacgtttggaagcaagaatctcagtcaggtcactgatcttacagtacgtcttcaatatgtttttaattggtatgtctcgcttgctgtacttacctgcattctctgtgttcttcaagggcaataactcgatctatttcccggcatatgctatctacgaggacaacgctcccaccaaggttactttattcaactttattaccgactcgtccggcgcctcggattacaatgccgtcgtctccatcggcgggaagtccgaggggacgacaacaaacaccctgtccgaagtctacgtgagatacctttatgcaaactcgaccgccgaacaatgggacatcacctgggccggccaagctgccggaactggtggtgcttggtctgcggatggtacgttgagcggcaccgtatcaactgtcaacatcacatgcgaaaacaaccaatgttcgatcccgatgaaggctccctcgtatgcgcttgttttcctcacccaagacgccttgacggcctcttctggatcggtcgttacggactcttcctctacgaagtctgcgacgacatttggtacgacgtacgcagcgaacggagccggaactgcgaccgtggatccagctgtgctgtccaccagtaatggcagatcgacaggtaacggtacacttggaagcacaagcaagggaggcgctgccaacgttagtggagcgcccgagaggatctcatcaatcactagctcgtggcttatgatgattttcagtgccgtcgctgtggtttatctttgatagctacctaggactttcccttgctttttttcctttctttctttcttccctctttctctactgtgtatccagtcatctttcatacgtccttctttctactctatctgtcagactctgctactctgttcattcatcatttctgtttgaatagcccgtacacctcagacattttgacgattactatacttctttctttacgaactgcataccttggtcggccattctttgcataccgtccttgattcactcactcggacttttgtcagctcttgcttctttttcctcctttctcgtaaacacaactcttttctcctgtcctctctatcttttgtgatgtcttgaagtcactctataaccatgctcttcatgccttctgatcgagacgatatcaacgcgtgcatataagcgcgaatctcttctcttcatccgactgaagcgtggtgcgtcatcggtgtacgtaagaaaaaagaagttggtccggaatctgtctcgagtctaaccggctttcgcctcaaggatcgctttggaccatcatagccctgtctgatcggttcaaacggcctttggcatagctctctccttctctttccctcaacatggagtttttgcaaagaccgtcgaatatcgagaggttatccagcacgtatccgacacgggcggcgaatgacccagaagaaagggttccactactgggtccttcgtcggacatgcttgcctcgacgatggtgtaccctttgatccatgagattagaaaggatgtcatcgttagtcttcatcccttcttgttttcgtcatcctctgacttgttggggctgacgtatagatgtattaattgtttatgtgttccggtcttgtgtgggcgtgtgctttgggattttctggggattctatcgaaatagcaacacatcggtcagctcgtttgaatgttgctcaagaaagatggatcacaagttggaggtgtggtcctcggcacttggagatcagatttacagcggaacatgctcattttttgtttgacacctttccatatcggtcctgctctttctcatacagatactccgctaaattgggaacaactacaaaatccggagacgtcatatacgatcgtaaggccgttgactgaaaagctgttggcaaagaagaaccatgcgaccggtatggcttgtttccttctgatttgtcgtagagcacgtcttcgttctaatcttgtcaatggtcttgtgctctttatgttctgtttcatgtacttgctcaacgatcagtgttctgtttgatgatcaacagagttcaattcataagactggcatccacctcgctatcactctctgttctttcccaatcgagagcaaccctatgtgaactactagcgatcaggcttcttcgtgcatggtcagagaggacgatcgaactagctactgtattgctcactccttgggatctctatcaaggttgctcggacgttgttcgtcaaaagttgatggaggaggagggtgaggacggtcaagtcgagagagtggggaacgctctagaaatggccatcattagtagagcaaagaggttgatcaaatgcccatccgcgcagaaggttatccgtgagtgtttgaaagaaagagagaaaaacaacagcttcaggacggaatggtgtttagtatatgaatagcgggatcattgactctgatttgacgttccaatttgtcttgacaaagatggtatctggacgggccgcgtggtttaccaggcgtcgaaccagcacgctataatagcagagtgagcatgtttcaacatctctgaatctaaagacgcaaacagccggttgaaattcttcccttttctctttgttggtagtgtacgtttgatttgtgcccttgtccagcaatgtctccgctattcagcgttctaactagatttttcgatcgagaactgtcagaactataagaagaaacctattagcatatataacccgcacttggctcctctgcttgatcattaccgactcaaagtcccaaggatccgcgcgtttcttgaattctggaagtacgctcacccttccttcgttttcatagtgtttgtttcatacagagtgcttaccgatcgcttgcgctcatgaaattttctgcataccaacagctttcttatacttttcgtgctgtttgtgattgttctcgagacttcggacacaacgcgtgtcaatgttccagaatggctgtttatcatctatgcagctggtaagcagatcagaggctaccctcaatactctcgccgctgaaaattcctttctttctttcgaaacgccatatctaggattttcactcgacaaattagctggagccgcagagtatgtttagttttgctgatcttcagctcgccagagttagtgctctagtcacaacggcgaacctgattgccaactttctctttctcgaacccttagacatggaatgcaaggtaaaccttttcgggcttgttcaacgaccttgttgtgtctcgggcttacccagtctcttctcctaccatgtgcatagtctactcggccaacctctggaacgggtacgtctagaattatgatttcttgtcctacactgctagaatgatgtctctttaaatgatgaactgaacatctcgcgtctcgtggactgtacagatttgaccttgcatttgtaggaatcttcctatcttatctgagtcttaggatctatggactttccccgtggtttggatcagataatcagtgggcggcaacattgggaatcgacatgttggccattggagcttgtgagcattcagtgcagttgtttttcgatcttggcgagtgttggtatactcatttgcagcgttctcttttctgttcttcaaggtttgatgttcccgaggtatgtctattgagtctgttattcgcgattagaccttctacccaactaaatcaccctacgtttacggttctaccagactggtgtttgtcaccttgagtgacaatctgatgattttggctatgcggtccatgatcatcgagtttagcttcttgatgttcatcaccgtgttctgctttcttggattctgttacgcgttgtataccctagcagagagtatgtgtttgtcatgttatcacgaatctaagttcattttcgacctcgctcacgcatgctgttcatttcatatttgttgcgaaaatagagaggtatgtattattaaaaacagctatacagaaattaggcggtcgaaagcttactaagttttttgtttccttcactttttgtagagttcctgcgactacaatcgttagtacatctgcgcgctgttccagttcggtatgtcgatcgaaaagctgaacatcaagatctgtggattctctagtcgtggtggatgctcgatatctggttcgggttggatgctaccggattcaacgaagccaccaacttccatcctgtctttggtcctcttgtgattagtgagtgatctgtatttgcatgcttacgacataaaagagaatggcatactgaccgatgctcaccattttggcgcttgtcagtgttcgtggccagcttcttggagaattgagaaaaaggagttgaagtgaaccacgctgaccttatcactctttcttcactcttcacatgtggtttcacagcttgtatgcttgcctttccaatacctgtgagtcaaatagattgatttcgcttttggatcagagtgacttgtcgctgaacatgcctatcgtctatcagtgatcctcacggtcctggtcgccatcctgtccaaaacgttcgccgatatatctcaagatgctactgccgaggctatgttccgtcgcgcggttaccaccatcgagggagctaaagcagacgctgtattcagttatcaagcgcctttcaacttgttggctgttgccggaatgattccgtgagtggaaccatgttgctaagttgtgtatgactcgatcgaagtgtctgacatagacatcaacgtgtactctctattagtctcaagcctttcctctcacccagatggtttcataagcttaatgtagctttcatccgaatatctgcctttcccattctgatatgtatctcgtacgttcatgcaactgtaatttaactagtaatatataatcccgaatagattaactgaccactgagaattcaggctttacgaacgaggggtgatccaaaaatctttggtatacgagacttcaatgaactggctcgaaaagatggcggtgatcgttcctaaacggttgcataatcttcgtatgtgattgattccacttgcaaattactcgtgccgagcttgcatttggttcttcgttgaaggttggaaggctatgactgacaaaccttctcctctatcggccactcatagctttgattgaaggtctggtaggaacatcatcagagatcgaacatgtatttgagattgaagaagagtgcggaggatgggatgaatcgtcggatgatatctctgatgacggttgggacgttgatgattcctatccggaggatttaccatctatcctcaaaacggaaccccaatcgatagcgaattcttcaaacaacaccgatgcaggtcgctcgacatccaattcaccctcagctgtcatggcatctgaccttccttctgctgctaccgatggccaatcaaccagacatgtcgttttcccaaattcttccccacatcctaatcatcacccgaagaaacgacaagaatcgatcgacggacttaatcgagtgcatccttcacctcttgcccggttgttcgtagctcctcctatcagaggaagcttttcgtcaatgtcgagcctgtcgtccagtatgccaggtgggaaaccagtggggatccatcgtcgagcaatgtcaatgtcaaacccaacgacgcttccgcgaacgatcccagagaacaagcaagcttcgtttccctcaggctatgcgttgtcgaagagcctggatggtcctcggacgatgaacgatcgaacaggaggatcattcgcagtgggagacgcgagcgatgtactgaatgagcaggaactcgagccaggtgtcaagttggagcttgaggatcgggtcaaaaaggtggaggaaaagttggagcttgaggatagggtcaaaaaggtggaggaaaagttggagcttgaggatagggtcaaaaaggtggaggaaaagttggagacaatcaccggattgttggagacgatactcaagcggttgccaggcgaaggcggtgattcgacccctgatcgacagaaatcagtgggtatggtaggaggtacgccgcgagtttttctttgatctagtctcctgttctttttctcttagggtcgagtccaaggcagtgaagatactgagtgttatctgatacgtttgcttcagatttccacatggatcgttagcttggacttctccatgttcttcaaaagctgttgtatattgaaatatgcctatgatatatatatatccatttgtttcttttccctcgatcatttcgcccgtctattgcggtcgagaacactctagagaaacaaagataggagagctaaaggggccaaaacaacatctgatacatttacgggtacatggcttcctttttttcatgccgaaggctcgatctctcctaacaacatcgtagcgtcctttgaagcggtgagaactattgtaaaggaagaagaacgtcagaaagatcagaagaggagggttgagaagacagacgataagatcaatctgagtcttgtcggataagagcaataaaaagacgtactgataggctcgctcggatggaacgccgtcgctgataagagcggtaagtagaaaggaaggagggaacgaaccgttagtaagtatttgacggtgtacatctctggcccagctttcgtatcttgaaaaagaaaagactgaatggaaaaagaaaaaactcacctgtaactgttccccgatgacccggaagctattgcgtatcatcaagatattatgagggatgtgtcgtttcagaacgcgatccgcttttcttgaatacagactcgctcgcgagaaggacaaaaaaaggaagataaagacttactttgtacaaaatatctgacgattcgacgtcccagatggtcacacatcgatctccaccaccgacggcaacccgtcttccaccgtcgtccaaactccaagcagcctttgagagcgtattgtcgaagcctgctgaggttccgtggaggacgcgatggattctggaaggagacggactgaatggtttgacgtcatgaacaatcagcgtcgagtcaaaagacgatgacaggagttgttgtgcgttcggagagagagatagagaggcaatctatgtagatgaataccgagtagatatgacaggaaacagatgtacaagtgtgtgtgtgtgtgtg

SEQ ID NO: 2122 - DNA, 1939 bp, Xanthophyllomyces dendrorhous
gtgtgtgtgtgtgtgtgtgtgtgtgtgtgtgtgtgtgtgtgtgagcatatatacacatatacactgatataaatgactggaattggagggatatcagagggactcacagtgtctgtatgaccctgaagagagtagagaatagcctttttcctgatatcgtatacctgagagatacgatgagatacaagaaagaattagtcctccagaaatacgattctagatcgttaggatggcattcagacagtgaaggtaggacgaagactaacgtgaatctcgttatcgatcccaccgacaaacacttgagctccatccgcactccagcaaacagccgtagtcgggatccccggcccatcctctcccaactcaatcactggtttctttccctcagcctctccgtcccatacacgaaccacaccatcatctccaccgctgacacagagctccttcccacccgtccgggcgatgtcgattgagttgacgacaccatcatgggcgtagtactttttttcacgtacaccggtcgtcagatcagtgatagctacggtcgagtcggttgagcaggtatagagaacggggtgaaggtatgagaactggacatccaaaatgggtgatttgtgacaagttgtaagaagagcagtgtttgtgtgcggggggtacgtcttccaaagagctgtaaatgaagaggaaaagagatagaacgatagagggtaagttagcttcaagcttgcaagtcaaggaaggaagagaaggagaaaaagatatgcgatattggtgcagacaattctgctcgtttgatagatgtcacttgaatagatgtcaactcacagacgcttttatcggcagaagctgctgcgatcatgtttccatccggagagaatctgcatgataaaatttcctcctatgagcacaaggagatagccagcaacacgttggatacaaagatgagataaaatgaagacattcaaagaaggtagtcagccctccgtcagatggcgtgttgatgaagatttcacgggccagacacgtctggttgaacccgatcttatccaccaccaagtcccaaggcagaataaaccaagagaaacacggtcacataccgaatgagctccagacagagagactataggagcctcaagcccactcgtcctcttgactgttcggatgagagcacccttgtcggtctttccggacccagtgcttccgatggcgaccgtgaaattagacggatcctcatcctcctcgtcttctacgcgtgatcgtttggaaagggcggtggacgaccctgaaggcggatgagtttttctaatcatcttgtctataaagaagctaccgggagagaagaagaggaagagaatgaaagaaagaggtgagagcacagggagaagagcacgatggatggtgtggttaagaaaagtcgagcccatacgatatgggcatatcttgggcttcacatgggcatcacttgggcatcacatggggtgcatccccaagtgatcacgccgatcacatctgccggttacaacccatggttacaactttctccccgtcggaaatctcaacctttttcattggtctctctacttccgcttttctcatcaaaccatcattcatcctctcatcctcctctctcaatctctccatgtttgcccagtctagatcggtttccgccaaggtcgcgtcctccctcggacgaaggtccatcgcgaccgtctctgagctttctcccaaggtcaagctcgcctccgtccagaacggctcgtccaccgcttcgctcacccttgtcctcaaggccggatcgaggtacgagtctgctgtcggagcggccaacgttctcaagaacttccagttcaaggtgtgtcttgggtggtctcgttctctttctgacggcctggtctactgggaggagtgatccgggtggcggagtctagtaggaggggga

SEQ ID NO: 2123 - DNA, 1484 bp, Xanthophyllomyces dendrorhous
ggagtctagtaggagggggatggacaagacggagagagtgagatagagaggagagaaaaaaacgggtcgatcgattgagcttttactgatcatcttctttgctctctgttcttttcttcttgctttcttgctttcgtcctctgctttcgtccttttctttcgtcgcctccttccgttgtttcctcggtcgtttgtcgtcccggctttcttgtacgcccacggtgtgacaccacgatgaccgagaacagagcaacaagtcgtcgtccgctctgagcatcgtccgaggtaccgagcagctcggtggtgtcctctccaccacgctcactcgggagcacctcttcttgactgccgagttcctcaagggtgacgagtgagtgtcttgtgtctttgttgtcgctgtttggtgtctgcgttgtcgtgtcctttcttctcggtcggatcgcttgtgtgtgggcttgggatggggcgtgaggagacgcaaggagcacggcgaacgctgaccatgagtgctctcgaccgacctacagggactttttcctcaagatgctctccaccacgctcttcccgaagcttcagcttcacgagctcaacgagtcggccgtgccgatctctgcccaggaggccgtccaggtggcttcttcgccgtcgacgctcgctgtcgagtatgcccaccgacggttgttccgatctgggttgggcaactcgctctacgtgtcgaacgccgagccggtggtgcttgccgacgtcaaggcgctcttcaacggtgccgttcaggacgagattgcgctgatcggaactgggatcgagcacgagacgctcaagaagctggccgagccgtactttggtgaggagctctcgatcgcgctccaggagcaggcggctgcaaacaaggccggtgcccttcctgccgtcaagaccgagacgttcaacggtggggaggagcgagtggcgatcgatctgcacactctgcccgaggcgaagccgtcccttgtggttgcttatggctcggccggtgcgccctctgccgagggcttggtgatcccccacctgcttggctctggctctgcgctcaagtggtcgtctgggtctgctccgttgttggaggctgcgtcggccgtcgagggctcgaccgcccaggcgtttgtccagtcgtacactgatgcctccgtgctcgccatcgtggtcgaggccgagggaagcaagcggctgaccgaggttggcaagaaggttgccgagatcgtcaagcaggtgtctgagggcaaggtcgacaagaagacgctcgacggggccatcgcccgggccaagtttgagctggcctcgaaggcggagacgacggtgggagcggtcgagttggtggctgccgaggtgttcaccggtaaggttgccacgctcgagcagcagttcaaggctcttgatgctgtcacccctgcatctgtcgccaaggttcgtttcggtctctctctgcttgtgactgtttgtgacag

SEQ ID NO: 2124 - DNA, 81013 bp, Xanthophyllomyces dendrorhous
gtgggtgcctgttggttcgttgtgtatcagaagcttatctgctgggcctgtctttcttgctttcatccgatctctatgtgacacaggcgttcaaggggttcaccaagaacaagcctgctgtggtctctgtggctcgactaagccagatggcctttgctgtaagatccttgtttacatctcatcttgattatctgtatccgttaggatgttgcgtttcctaacgacctttttctttcaccttcggatcaacaaaaatccaggacgagctgggtttttaaagtgtaacggagaaggaagagaagttgatgtttactgttggagagagtcccatctcgggctgagaagggagtgatgcgcgtcatctgagattcatgtttctttcgatttctttaaacctatgtttcggtatatctacaacctgttgctatcatctaaaacgaactaggatccaaacaaaaagggtttcagtgagcgtcaaagaacatctccgagcgaacatcctttttttcccttcccctgtggttacggataaacgacatccgtaatcgtcacgtgacttgttcattccgcctagtcggaaacaagctagagatcaaacgactgacaatcttcagcctttttctttcttctcttcatccattcgcccattgaccatccgtcgtacttctttcgttccccagccgttctcgttctgcctgtgccggttgattagccttgatataaacagtagagtcctcgtctgcagtattcctatctttttctctcctttctctcttctcttcctcctcttctctctcgcttcaaaacatcccccatccccggacgatggacctccagctgtcaccagcaaactcgtcccctctttctccgttcaccgaaccgatcgagccatccaacggagttccttctccgagctctcttccttctctccagacgcttcttcatatgcagtctaacgggaaagttcaagcagagggctcggtaggtcggcctccatcggatagctcggatctgtcatcttttgatgggtcggatgatgagcctgtctctcaagggaccaaaggattagtccccaacgaggatgaggatgaagaggacgacgaagaagaagatggggaagaggacgaggaggatgaagaggatgaagctgaagaagacgaggacgaagaagaagagccagaagcagatctgccgactcccgttagacggccacttcatcaacaaccatacaagcagcaacaacaatcatcaccatccacttctagacaccgtctctcccattctccaatagtcaatcgaacagctgtatcaaacgcctcgatcgctcctcctggttcatcggcatatccctccactcgatctcctacgctcggttcgccccccagacgcgctggatctcgaacacctacctccaatcgccatcttcgacagccagtcaccccttccaacctcatctctaacacctctccctcactagtttcagcctcagcctcagcatcggtatcaaaaccggcgccgccgatatctctacttgcatctcacgtgtctgcaacccaacaagaccaagcggcacgcgtcttcccgccagcacctcagtcgttatcatccacgttgtctgatagcgatgaggagccagatgaggaagacgaagatgaggacggagaaggtcagctcgatatggacgtcactccggaacaggaacagagacctagaggggctgtcgacgtcgatatggatgccgaagcggacgcagagaacgaggacgaagatgaagacgaagacgaagacggagacagcgttctggctgaaaggtcgatcagatcccagagtacaactgttcctccaaagacttctgttccaataggaggactagaagtcaaaacaccccaggaccctataaacctcggcctggaagacattcaagtggaggaaggagaattctttgagaacgacgcgctttcagaaacagcagggatcaaccacgtcaagcacgaccatcttttcgttccttcatcaactggtattgagccaatcatcacggtagaagacggacaagtggtttcagaatcgaacggaaatcaaacccgagtctcggacgatatagaagaccaggaccaacttgtgcagaaatctttattgaaagacaaacagccatctgatttcgagtcggtagtgatcaacggccaagcaaatggcaactcgaaggaagagacccaacaacagtctccagtcgaggagaaagagttgttagagaaacatgtaggaggggttaagattaccgaggcggtggaggctgcagaagagcaatcaaaggatgaagatcacccgaaagccctcaagactagtaccaagcccgatgttattatcaccacggttgacgagagtgagtcttcaattggtctcatcatctttttagttcttttgctgggctaagttctgatggcccttctttctttctcccctcatgggctttttgtttctagatccctctggtgtactaccttcacactctttactggctcaacagcgagcggacgcattagaagctctgcttaagatcgagatcgcgtttgccaggctacgggataaattccacgtcgagaggatggaacaatgtctaaaagaagaagagcaacttctagatggtacgtcaaactcctcatgtacttactttctcgaggtctttgtttaaacgcgttctgtcgtgtccgtcgaactaactgtgtcggccgttctcacgcatcttctatgaatggacgtatcttgtgttcgatcacttgcagagtctcatccggttcttgcacatttccaatcgagattatcggacttgcgcgctcgggagctcgtttatatgggaaaacggtcaaagacgtttgaggtctctctcgagaaagtccaacaggccgacatcgaagcaatctgggagtggtggaggaatggtcgagaagaacttcagagagatatgatggctgacgtgatgcggaaacgaaggagagttgatagagagaagagggctgtcgagggaggtagacgtaagtgacttttcaacatgatttttgagttaacggctcataaggccaccttgtgtccttcgcgattctgatctctcctttggtcgacttcttttcaaaaccaacccagccaaacgaccacttcctgttcctccgcaaaacgcgtcgaaacgaaccagacaagatagccaaccgcctgaccttgaggatctcctacctggttcgttcttccatcaccgaccggaagaacgacgtcgaatacgggaagaacgagaagcgatcggccctcgtccgggcttacttggtctggacgagcgatctcgggatgtggatcttcaattattaggtgtaagtttttgagagatttgtcctttagctttcttactctcttttggatgctgtttgttaaaactctcttatcgccttcttcatctcttcttcccacccggcgcgtatccagattggatcgtcgatacggtttcgaccatttgagcaagcgcaacacccgttgatggttcctccaaatcctatggctcatcatcaccaccatcaccatccactccaccctccgccaccgcctccgcctcaatctactgcacagcttgcttctcagcagtatcacaacgttcattacccacccggtccctctcatcacgccatggcattatctggaggaggatcgcaagggattccatatccattccgacaggggatgccttcttatccagctgagcaacaacaacaccagcagcagcaaccatcgtcacatcaacactcaaatctacagtcacaacatcagaaccaacatatgctcgtgcatcatcaaccgacgctgtcttcctcccagcaacaacagcaagcttctcagcagcagcaacacaactcgcacccatatttgtttaatgggctctcaaatggaggatctttcagccagccgcatctttcatcccatccgggagcctcgtttgagacatagtttggactgggcatcattctatttacatttgaccctccctactcattgaagtatatatttcttcccttataatatcatgtgtcttacgtgctttcctatcagatttgccctttggcagccggtttgataaccgcccgttttcttgacagttatattcattcactggtttatctcgttgttctatttcgtatcctctactctttcttatatcctcctcaatcagagtttctcttcggaagggaacatatatttcttcctttgttcctctcttttttctcttcccgtgcacgtttcagaacagtgtcatgaggttaagtgtatgacatatggacatgtccgtccaactttttgtcgtctttattttagtcttctgtcttaacttttgttcttgtccataacgaaaacctgattcagatcattgttccctactctttcaaatattcgtccatccgttcatctctgtccagctcatcgtgatctgtacattgtcttcccccgcctgtccatctgacagatctgaaagagccacggggaagcaggttcttataaaagtgaattgaatatatgtgtggatgataaagaaaaaaaatgtaaagctctgtcctccttctttttcccagttgaattccgctcgagtggtttaggttcgaatagactatcgatctcgtgctcgctccatggctaaataatcggtatttagatgacaatgaagaaagatagtcagatatgtacatcgaaataaggcataaatctgatcgacaatcccttaacagagataaagaaagaagaataaaaggatgaacgaacggttgtactgtaggagcttctcaatcaagtcctatcggaatcaaattttgattgcgagtaaagagaaatgcgaacaacagatatcaaaggttatcattaagagtgcgttaggtcaagtttggtaatccagctcgactagatagcatggcgatgagaatataaggtagtacaaaagaggaagagggacgcacgacgtgagtgagaaccattctcctgcagcagtacctcttgagctgaagcttgtcgagcgcctctctatttggccgtacatcatccgtcaagacaatttcggagagagggagatagaatatgagaaggataaggaagagagagcggtacaatcgaaggattagtcagagaagtgtgtagaggaaggataatagaatagagatcaatacgtacccttcagtcatatctgtagtaagcagagcaaggtaggactcccacatgttaccgacaacctttccacatgagaagctagaaacaagacgaaagaatgagacggatgagctctattttcaacccagttctgccatttgttctttggaagggaaggagagaacgtaccaacggacagggatgatctgaatatgagagaaagaaatagaggatcagacaacattattttgatcaaagaacgaacccctagcgctgaatcttcccacgactgacaataaagagacggaagaacacgaaccattttgatattctgaacgaggccaaggaaaggaggatgactgtcgagagaatgttgaacggaccgggggctgagaggatggaagcaggtaaattatgatcagtggttacggatcacattttgccggccaacctcgtaaccatccagttggcttgctctccctaaccagaggtctcccttttttttctcttctccctttctcgttcatcatcttcattcttgcaacacaatacacttattgtctcaggtttatacccgactcaaccatcatgtcggccgctttcaggacaagctctcgattgcttagcatggcaacgcgctcgttcgcatgccctcccaaatcttcctctttccattcattctcctggcctgcgtctacgatcccatcgagttctagattgttctcatcatcatccgtacgaccggcttatatcggaggttcacctatcacatatgcctcaaacgcatcgttttccactgagggagacaacttggttgtcactggaccgctaggttcagaaaaggtattcatccacccattcgtacgcctattccaccaagcacccgatgggtcagaatcggaaggtcgactggaagtcgcggtagacaaccagaatttagaacatcagagggaaatgtggggaaccactcgaacgttaatctcgaatgctttgcagggtgtcaccgaagggtaccgtatgcctatcaagatggtcggtgtcggttaccgagcggcgttggaggaggctccggttccgcctgggatgaagggtgaggagtggcagaaccggctgaggttgaatctcaagttaggattctctcacccagtgttgatggttgttccgatcggtatcactgtcgaagttcctcagccaaccaagttgtttatcatgggtaccaacaaggcagacgtcgctcagtttgctgccaaaatcagagaatggaggaagcccgagccttatcgtggaaaggtgtgtcccgtctttcttctcttttgttcacacgtatgcatacgcgcatgtgtatacgttggaatgtgtcacatttataaatgaatagtccacaaactgacgaactcttggtcgacgttttgacagggtatttttgtgtatgtcttctaactctcgacttggaaagctttggtcttcacatgttggataaactcaactgattcgcttttcttcactaacttgacttcataggggtggcgagaccatcaagcgaaaggagggtaaaaagaagtaaacaaatattatggctccaatatattaaaccaatcggtctaccgaagcagcatgaacggaagacacatcagatagatatagacgcaatctatctttcatacctggctgggcacatgtcgaagtactgactgggcgaataagcttgtggacgagacatgatggctgaaagaacgaacggataaatgaatgatcaaaggatgtatgcgtcgcctcgtctccaaaaagacagcgggatatagaggagtaaccagtgagacagaaacaggggcttacgtaaccatgtgcttaaacccttgcctggttccttatctgttcctggtacctttttttccctttcgcttgtcactctttgctcctttttcttcagcttcttcttctcctcttcctccttctacttgtctgccgttctatctgcccttctctcttggtgtcaagctcgtgtttccattctctctcctcctcccttgttcatctccccatcctccccgtatctctagacatggtcaagaataatttgagcatcaatcttacagaagacgtcgtgtttcttcggggatctgcgactgtacgttcctgacaactccccttgttccttctccgtccctgatggactcattatagagagccacctctcttactgctgtcaactttccatctccaatgttgactcaaaattcttcactcatgtatgcttgtgtcctacccgtcacatagggcgaggattcaagaggaagacgggtagcaccaagggatgacctccctccggctatgcttagaggagtcgtcaccttaactctggcaaagtctagtcgaatcaaaagaatagacgtcactcttgaaggaaaggctcgaacagaatggccagaaggtacgggtcgtcttattcaagtttgtttccaagtcctcgttctatctttccaggcctcatatcagaccaactgcaccgagaaggcgctggctgattggcaatatagtatttcgggcaatggcgctttccgcatggacctcttttttccaaatgtttatccgatcaatctattcttcttctgttattcctttctctgtttgctcgcacgaccggattcgttttcttttgagaactccgacaatcaatgtatgctgcgtttgactgaatgaaactctcttatctctctatacaggtattggagctcgtcggacagagatccatgaggaacacaccatcttcgaaatcagcaccactttattctctcatgatcttcctgtccctcagcccgatcgctcgtcatccgtggcgcccacggttcggtcatcctcagttgctgcagaaccctacggagatccaacggtagactggtcagagatgagttctgcattgagtcgagccatccgtccatctagcagcagatcgtccagccggtatgagcctacttcagccgctcatgtcgaagaagaacgaggtcgtgcacggttaaatctgaaccacgtgagaggcccctcaccggcgtacactagaaccccctcagtatatgtcccgatgagatcgagcagtccaatcaatgagagtagtcggagtcccagtcggagccgaggtcgagccgcgggattcaaagcattgacgggcgcattaggcgtaagtaatcattcagaagacgacgagccaggctcaagaagtgggtctagaagtggatcgaggatggcgtttgaaaaggacgaagagagacactggaaagagttcaggaaaggttcgacattttctttcggattcccattctttgtcctctttctttcttctgggcgcttcctgatagccagacctttctctttgtgggaattctttgttacataggtgaatacaattatccgatctcattcaccattcctccttcaaccccgccaacgatccacgccgattttggttcggtcatctaccgattaagagcaacggtttatcgttccggagcgttgacaaccaacatgtacgatgaaaaggaggttagaatggttgcttgtccaggagaggatgataccgatgagtcagagaacgtgatcgtagaaaggcagtgggaagatcagcttaggtttgttcttataccttctctgcgcgtgcttaatgaatgcaatatgttccctagtcagattgaactgacccgttcgtcacgattgtatcaatccggattcatcggaacagatacctggttgcattgagtgggaagagtttccctattggagggtctatgtatgtttcttcattcactataatgttgacatgtttccactaaccattacaatcttttcgtgttttcttctctggtgtgtatcgttacaacagtccgttaagcctgcgtctgatgccgttcgaaaagatgaagatatatcggatatcagttatgcttgaaggtgaatttaagtgttctgttgatgtacttgtttgtatgtctcaatatgggcaaaactgctcacagtttctgatcatatatcttccggctttcgcttttcacggccacaatagaaaaaatcgattactttgcgcatgacaagaaggttgcccgccatgaagccgttcgacgacaccaacttcttgctctcaaacatttgaacgcccacaaagcgcccgtgcccctgttaccaatcgacgacaaagcctcggatgcgctccaaacatctccattagctagcatggttgttgccgctggagaaacagggacagacgaggatgacgcactttcgtcattgttgaacccaacagggccttggttgatggaccagatgttacaggtcccagatacccactccaaacttcactttacgacaaaacacgctcagacaaacatgacggtcgcgcattgcttgaaggttgtttttagagtcgagagaggggatgacaaggcaatagattcgaaagggaagagaaaacaggttagaccgagacattcatcatctcaatggaatggtaccagcttcatgaaactaacacaactctaatgtctcttttcttatcacacctctgcagtttgacatcatcatgtgcggttttgtgcctctctatctatatcgtgtgtatggaaatgcgctaacttgcttctctcgaatacgttttttcttccttcagagaaacgcctattactattctagatgtaaggacctcgaaatctgtcttggacgctttcttgcttgctaaataatgatttttctctttattgaacagtctcgctgtaacattcaatatacctctcttccaaagtatgacacccgagtggtctctccaccaagctacgacgacccgaactacgactcgaatcctgaatcgaacccacacggcatcgttacccgaactagggatgtgccgagtagatctcaatccagagcacccagtcgatcccagtcgagagcgcccagccgatcgagctcgagagacttcaggtcggaacccagctcgaggtcggattcaagcagtcggatgtcggtcccagggagtcgaacgggctcgcctctgccggtgagtcatctggagtcaaatagatttcatctgctgagaaagatgaaccattggaaatctaactattcctcattgcaaattctttatttgttcgtgattgggtgggtggcataaagtctctgagccgtgggcgattttaaaccggtgatttatctttctctgccctctgctattaaaatttcaacaacatatacaaaacacgcaaacatccattctttctttgttgcttttttgatcttgcacttcaattgccttactctttatgcttgtctatgaagtctttctgttccctcgtgtttggacctatttttttttatctcattcaactaaatatttgcataacatcacccaaggacggtgtatatccctttcatagctctttttactatttcgaactcggtccttcttgtcttgttttttttttcctttttccatctggaggaaaagaattacaaagagatgcgtcgatgcccatgaagtcggtcaaaatatcatactgaacaagaagggggggggagttgcaaggacatcattgatcgtgataagaagacttgaatagagttttgaaagggggctaaacgaaaggtatgagaggggagaacaaggacagcaacaaaagggatattgacggggtggagacttgaaagacaggaaatatagacgagatgaaagaaagaaacataaactgtgaagaagggggagaaaccgcgcagagaggatatcgcacagatcctcacaaagaatggcgagagtgcaaagaagcagtcgatggagaaccgaagaaggagaggaaaggaaagaaggcagaagagatgaatcatcgaatcttgatcccaccagtccttccggatttactgagatgaccacccccaccggccatctctgattcatcatcgaatccaccgccgggttttccttttccgaccggtctgggttcccagattttccagaactattatcgccagatcagagtagagggtggaggtggttacaagcagggaagaagcgggaaagattagtttagattgaggctcagatagttttcgcacatgacatatttgacgcgaagacatttgttgttctttttaaaagcgctaagagacgtaccttcaagttttcatcactagcagctgtaccgactgtacttccatccggacttagtgcactagccaagactctcgtgtcatgagcaggcacctcccagatcttttgtaaagagggataggaccataagcagatattgttatctgggaaaccgtgggttgacaggatctctttggagtgaggcgaaaagattagggatgtcacttgggaggcagtcggtaaggaggagattcgagatccggtagtagatgacctgtaagaagagggacgtggaaacaggacaaacgtcgtgttcaaacccaaggacaaagagatgtcttgaaaaaagagagagaaatttaccagaagtgaatggtttgatcgcctgttcctcctccggttgctagcagactgggttgccagggacaccaagccagagcctacaacgtcgattgatcaagaggaaatcaaccaagtgcatatgagcatcatatgtattcacacgaagagaagaatgatggtcatttcttacctttacagcggcggtgtggtttcgttttgtccatctggccatagcacgagtcgcgggctcgcctgatccgctatcattcgacatcatagcgccggccgttcgagcacttcatgatgaaaaatagatttacagcgagagactgatgatcaacgcgagggacctcaaggggggatatatattgatgcagagaaacgaaaaggatagaactcactcccagcaattgacaacattgtcgttacctcctgaagcgaggacttgaccgtcgaatctccaggataatccacagacctttttatatacacacgattgagaagaagacgttcttgaaatttagtgtccgcttttcaaagggagaaggagtgaaacagcaagaacagagcgagaataagaagacggtacctctgctgtgtgacccaagagctctccgaccttatgtcgggccactcggacatcatggtgatgaattgatccatctcgacagccagaactgagtaaatggccgtgccatgagagaacaggtactcgagactgcgcgcataacaagccgttccaaccgaagaaagaagaagtggaaaagcaatcaaccaagagcccaagagaactatacgcgtatttctttttctttgttttctcgcctttgcttcgcgttgtcaggagggaacctaggatcaaaacttacagcatgtccggccatcgttcggagtttcaccccggtctcgacatcccaaacttcgacgtctcctttatcgtttcctacagatagataagatccatcgccggcccaggtgagagagcaaatctgaggggattcctctgtgggtctagagtttggaagacaattgggtagatcatgataacagatgcaatcaggggtgagtatgatgtgtgtgtgtgtgtgtgggcaaatagagaagtggtcaagaaacacatcaacaaggatgtgtcggcaaggagggtcgttcaagcaaaagcacaaactcactcgcccaattgagagaccccaccgctttctgcgttccagacataaaccccttcgcctagaccgataccgaccatgttgtctgaactccaagccatcaaattcaaataataatcatcgaccatacccggcgcgtccagcactctttccggccttgtcggtatcgctctctttctctctttagcgtcgacctttgcgcctgctgaagcggctgccgaggcagaggggaactttgtatattttcgaagttgcgcatgggttagatcatgagatgtcgaggccaatggggctggttgagcaaacgcaaggattctggaggtgggcgcttgggagagagacgtcaacgaggcggaggaggaagatgctgatgaatgatcaaccagatcagtttggagagcggaggagattgtgagggtgttattggatgaagagtgggctccattcggggtggtgtcagccgatgaaggaccagctggaagagcaggagcggatgtgccggaagaggaggtgagagaccgttgagggatgaatcgatcaccctatccaaagaacagagacgaaaattggttggcatccacattcatttagggaacatgtaaaacacaaacgcagtagagaggagagaagcactctcacaggcttagcaaccggtcctgccttctttcgaataccatccatactgttccccgaattatcactagccgagtgaccagtccactcaacatccttgacgttcattccacccatcgcttgactgatcgacaatgttccgtccttgtctgaatttcgggatgaactgcgggaggaaggagcagatgcatcgttcgatgaacctttcggacgagcgagaaacacgttggacctgtttgcgtgtaaaaaaaagtacgtgggttgtaaagagaagaagggaagactgtattagcttcaactgaacaagttccgatcaagtccccctctctccctcagaacagaaagcaggaaacccccaagagcaattaaacaacatgcagggatgagagaggaagaagagagagaaagaaagcaatacgtacgtatcaccactggtaaatcctttgcccccaccaattgtctgtccaccagcatcggtactagcgattgaaacattggcgaaccgatcgaccagattcactccaaacgagaccttttctggttgatctcttgatccagagggcgtttggattctttccttcttctgcctctccatatttcttcaactttgttttttcttctgtttctctaaacaacttcggtcggatcgctactgtagaagaaggagaacgagagagaagaagagaacagtgaaggagacctagaaagtggaattaaacgtgtagaagttgctcaacttcaaggaatcggagggaaaaaagaaagagttgtaatgataaaataaaaaacaatcgcgtcgacgcgttttcatcatagtaatcccaggccagacttgtattcacacgctcttctcaatttcattcatgcttccacaatgtttgttgcgttcgttcgttctttccatttgctttcgtttgtgttgcttttgaaatacagtctgtggtcggagctttccagaaggcggccacacaggaaatgagcaaacacgcttaagtataagtctatggcgcgaaacgagaacggaaaaatggaagaaaacactaagagggcgtgtaggagtgaaggtaaaaacacaaaacaggtagagttcaaagcagacaaagatggctgaggaaagacccaaagaggatatgaattggggtttaacaaagaaaaggtgtattcaagaacgaaaggccagaatctagaaaaagaaatccgctagatttagagctcctcgtcggtgaagacctcctctcctcgcttcctcctggccattcgctccttcttggcctttcggaggtcggcagcagacttcttggcaaccttctggaccttggcgatcttgttacccatggagtcgaactgatcctcgtcatcctcaggcttcttcttgtcgattcgctctccggtaccctgtccctcgacccagttgtgtccagaggcctcgaggtgaccgttgttcatggcccaaacctcagagcagatggactcagagaactctcggttgtgagtaatgacgagcactcctccctcgaagtccttaagggcctcgataagagcggcgagggactctcggtccaagtagttcgtcggctcatccaacatgatgacgtggggtcgtcgccaggtggcggctccaagaacgaccttgaccttttgtcctccggagagacctcgcatggtgttgtgcgaggtgaactcggcctcgagaccgaagtcctcgaagtgcttctcgatctcctttcggacaagaggtcgcataagacccaatcgctgggcctctcgggtgtcgagctcgagaaccttcttctcgaatcctcgggtgataagctcgtctcgggccatccagatgttctcggacgaagagagtcccttgaaggaaatctcgtactcgtaagactgcttgagcttctttcgggagacaagctcgtcgatgagtcgcttgactccctcgacaacgacgactccaccctccttcatcttcttctcctcctcctcggtaaggattcggttagccttgtggagctcctcgagatcctctccagtctggtatcgccagaggaggtagtcaagaggggtcttgtcgaggtgctgatcaatgtggtggaaagcgtgctgggcgacgtatccaatgacgacgttggggtgcttccagacctctccacccttgttgggctcaagatctccgatgaggagcttgacgagggtcgactttccggatccgttaggtccgagaatggcgactcgggacgaaagagagacctggagggagatgtcgaacaactgctggacgggctgggtagggtactggaaagcaacctttcgcatcttgacaagggacttctccttggtcttgactccatcaagaagaggagggttgggcagcttgaacttgtactcgtcagcggtggcgagggagaagtaagccttggcctcaggaaccattcggacgaagtcctcgaggtttccggggtatcgcttgatcttgaatcggttaaggaagatgatatcggtaacggttcggttcaagaagtcagagtcgtgagaaaccatgatggaggtgcagtgggtaagaccggtaaggtagtcgataagccacgagatgttgacaacatccaagtggttagtcggctcatcgagcaaaaggatatcagccttgaacaagatagctcgagccaaagcaagcttcatcttccatcctccggagagggatccgatggagtgaccctgtcggtcgacagagaatccgacctcagcgaggacgtctcggatctcatcctcgtttcggaccttggtgattcgctcatcggacttgacccagtcgaagattccaatatcggcctcggaaccatcaatgtcgtgggcgacgtaccaggttcggacaacgtcgggggaggggaaaccctcgacctgaccgttgacgatggcgttcatcaaggtggactttccggaaccgtttcggccgagaagaccgtatcggtgtcctcgcttcaatcgaagggtggcggtgttaagaaggatcttggctccgtaagcaagggagaaggtacagttgcagagatcctcaccctcctcctcgtcgtcgaagactcgggtatcgatgtcgatctcggaagcggccttctggaggtactcaagggtgaccttggtggcatctccggatccggaggcgaagccaaggaagggaacaagagcggtctcccaggaggtctggtcgaagtttcggttgttgatcaagttggcggccaaggtggcagcgtacttaacagagacggactcggccttgggggcggcggatccgaccttagcgtacatggcaaggatggcggccgaggtctgggcagcgtcagctcggggaagggggggaaggtcggaaccatcagaatcagccgggacgtttccgacggatcggagggtggcgatagctcggttgacgacggatcgggcctcagggtcggcgatgacctcggaaaccttgatcaaaccaggaagaagcttggggatgaaaggtcggacggtgtgctcgttgtcgaccaacttggccatgttgtcagtgatgacggcgacctttcgcttggtcgaggtcaatcgctcgttgcatcctcgggaaagaaggggaaccatgagggaaagagtgggggagtcgacctcagagacgaaggtggtggcagagagaagctggatggtcttggggacctcctcgacggggttgataagggcgttgataagagcagggatgaacctgtgagcaaggaggagagatggttagatgtgctcaaaggcgctcgaaaacgattgaagacagactcacttctcaatatccttgttggaagccaaggcagtggcgttggtcatggaagctcgggcagccttcttgacatcggccttggtgtcccaaatggcggcagcgaggacggggacgatatcgggcatgagcttggccatctgctcaggggcgatcttgacaagagcgtcaaggagctggagggaaccagtcttaacctgccactttccagcggtctcgatctccttgaggatggtagggaggatctcaggggtagcccaggggctcatgaccggcaagagcgccttagtggtggcaagggacgcagtcctgtgaaagaagaaaaacagtgtcaatatcgagtctaacgatacatactagcaacgaaatcaaggaaaaagaacgacatactggacagacttggccttgtcggcgaaaagctcaaggaggacggggaaaaggccctcggcagagcagtcggtaaggatgggctcgacggcgtggacggcaccctgctcgatgagggtatcgatgacggcgagggcagcctccttgacggcgacgttcttcttgtcggtaagggcctatgagaaaaaatgaagatggatcggttagccgaacgaacgtgtagaaggtttgttttttccttcaactttatccatgtttatcgccacctattcacaagcgaagacaagtggagcgaaaaaaatgtatggagaaaaatcaacccaccttcttaagggcagcagcgagctcgatctcagcaatgaaatcgggtccaccgttcttggcctgggaggcaagagcctgggcaggagccttgtcctctccgaagagagtagagacatcaaacttggccatttttttctgtggcgattcccgacaaatcacgtgcgagttaaaaaaaaattatgaataaaagtttttcaaccgatagagacaaacagtcggttagcattgtgtgtctaatgcctctcaatagtttacacagacaaacaaaagaacatacgtggatagaggggtcggagctgatgaggagattgggttattggaaaaagaaaaaagaaaggagaaggaaaaaagcgaagtgaagaaagttagccacagcggacctcccccaacgcaaatacccacaacacacaacacacaacacacaggaacctgagcagatcgaaaagctacaggacgtatgttctgtctataggacagccaaccagggcaaacaaaaagacactcacaaagaaggggaaagaggaggaaagggagagggctctaaacactgtctggggagggtgagacagactctaggtggaagaaagagggaaaaaaagaagaaaagaaaaaattaaaatacggtcggacgtaacgttgaaaattcttcggtcttaagatttttgattaaattttgattaccgaatattttattttattttatttttattcttttttattcgtctttggtctcgttattgtcatctttccttcgcctctgcaagtcgctctgggatcatccatcttccggatacatgttcgacaggtccgttagggaatggtgtcaagagttctgctccaaggtcgatagaccgtagtgttgttctttgtatggcgagacttcaatgtcttttgacttttgcaaatggcattcacattgaatttctccggatttgcctcttttttctcttctcttcttatatccctgagaattcgagacattcaccattcattctactccatcccacgaaggcacacacacacactctctctctctcactctctctctattcttctagatttccttcttttggtcaaccttgacggcaactaccgccggctccttccatccgagccagagcacacagaaaagcacgaatgcaccgacggtagagagcgcgccagagtagaacggccaggcgccctggatgaatcttgggtattcgtcgtgtctgaacggaaccacagacaccgtctgagacgaatgaacaaacgaccaactgattgaaaagcaagagatgagagtacagagatcagaacattaagcccacggtcaatcccagagagcaactaaagcaaattaagacgttctcacccagcacgcttgtaatcgaccaagaacttaaacacgccgtgtctatcgggtgccttgaactcggccgagtactcctgcccttccgatctggctccagctccagcggcaacgggcaacaggtcaacccggacgtgagggtccaacatggtgaaatctaactggagatccttcacttgggctggtagccaggatgacttttttccgtttggatcgtgcgactgaagagtaatcgagtacgactaggagaggagaggagaggagaggagaacaaagtgcgaatggtacgagaaggagacgggtagatgcgcacgtaaatgaagaagctgtcagtttcaggacggctacatacgatcccatagccagacaagaaaaccttccgactcaccagatcatctttgattcggtaaagctctcgctcctcggtctccccaactcggtgatgggttgcattgaccacgcggaggacacccttctcctggaaggcccactgggtaacgtccttgacgaaagcccggtttccagtactcgcacagctgacaggggagggaaggaaagattagagatcgaaaatgagaaatcagaaaagaagaagaaagagaagatccgatactcagtcaagcaaagctcgaatcatccaatagacaggtggaggggactcactcggctggcacatgagccttcttgacatcctgggtcggaagctggaccggagtgtcccagaacttgtccgaaaacagatcaatactgccagcaaagactactctggagttatctaacgtctgaaatccagataccaactgagctttcgacccggccaggaactctgggggataaactgagtcgtccggtccctccggcaccctcggctccgcactatacgacgactttgagccatgtaagatcggtaccagtagcgggcttggctcctttccgtatgaatgagcgattcctcggtagacgaccgggcacttgtattcgtacccggaagatacgaccgcagcgttgtggacaattgattcggcgtagctcagagcgagcgccgtgtggggtgcctcagcctggtcgaacgtcgacgaaaagtgggcgtggtcaatcagataggaatccgaaggctggaactcgatagagaactctcgggcaaagtctcggttgaactcagagattgagggtgacgtcccgatcaggatgtttccgttcagggagaggtgcttgattaatgcctgcgggctcagatccggagagtaatctatttggacccaggtgagacagatatgtgaggtcaggatgagctcattctcgcctggagcaaggaattggatgatctgttttgtgggagtaagtatctagaacttactcttggaggtgggagtaaacaggatgacatgatcgaatgatcgctcatcaaatgcggtaagagatggtgatgtgtctagaggggacttgaacgtaagctcgtatcctcgttctaccaagcccgacaataaaattgacagcgagaggagcgtatcagtatatataaacacacgagtaggttgtccttcgtacgctttgtattcttcatatttctaaaggaacagagaagaggaggattgaacaaacctctaagacttgcccaaaacttggaatagtcattttgggagacttgtttttccaacgcgacgagaatccggttgccggttgaagatgctgcctgaacagacgtcacggcgagaccgagagcgatgcagaccgatagaagagatttaggaaacatctttcttctttttgtttctacctagagggagggagatgatgagtatgaggcgtgtagtaagccgagatttcgttcaagatggtgttggtcaaaaagaaataaccctaggcagaactttgccgggtgtctgtgggcgcgcacgattttgtttccctccctcttctttttctcatctcgctggtttcacttagaccgatctagagctgacaatatgatccgatcagacataggtccttcataacactcccatcgctctttgtctcttcctaatagaggagtagatgcgaagtagaatcgcgctctctcgctctcctaggtcactgtaaccacgttcaactatttgtgtaaccattggctttcgaccgaacatccgcctggccttttttttctgtttttcttcttctccattatctccatccttcgcttctcgcatccttctttctttgctcttctttctttcctttttcttccacaagaaatcatcatgacctctgagattgatcaccttaaggctctcgttagccaggttagtcatgatggagtttttttcttccttcataggcctagatggctcggataatcattctgataggctcaatatttttcttctttctctttccctctctccctataactcaaacctttcgctactcagttgaacgagaagattgtctctcttgagaactctgccgttgatgccaccaagaaggctgtcgcctcagtcactgctaccaagaccccagccgagcagctcaggatgattctcatcggtcctcccggagccggtcagtctcgttctttgccctacttttcccgataagacggaatacgacgcgcagaaccacctctcatcgctcatctcttcttctacctttctgttctgacaacacaaacaaacaaacaaataaataaacaaacaaacaaacaggaaagggaactcaggctcctacgatcaaggacaagttcaacgtctgccatctcgctaccggagacatgcttcgagacgaggtcaccaagaagaccgacctcggagtagaggccaagaagatcatggaccaggtttgttcttactcatgaccttgcctcctcttcgttgaacaagcagaacgacacaaaacgctgacgcctttccatttttatcttggactgttcgtcagggaggacttgtgtctgatgagatcatggtcaacatgatcaagaagcagctcgaggagaacaaggagtgccagcttgggttagtgacccagactctccaaagctctctatcacctaaatgagaccgatgataagcagagaagctaacatagaaaatggttcacagtttcatcctcgatggattcccccgaactgttccccaggcggagaagcttgacagcatgcttgctagcaagaaccagaagatcgaccacgccatcgagctcaagatccctgacgctcttttgatctcccgaattaccggtcgattgatccaccctgccagtggacgatcctaccacaaagagttcaagtaagacctttctccttgaggttttaccttgggtctttacaattacgactattaacatcaaacccttcatgcctctattccttcctgactgaaatagccccccgaagaagcctatgactgacgatttgactggagagcctctcattcagaggtcggacgacaacgtcgagactctccgacgacgattgaccacctaccaccaggtaagcctccctctctcctgtctagtatgatgctctccgtccgtctgggttcattcttattaacatctcatttcgtttgttgtgttttaaacctaaaagcaaaccggaccggtggtcgactactaccgaaagtccagcatctggaagatgatcgacgcttcccagtcccctaagcttgtctggtctagcttgtctgccatccttggcgacaagaagtaaaagatcatcgagaagaacaggaaagaaaaggaaaaggagaagagtaagagtgagatatgtcgtaggctgttgttctgtcggtcagatatggtattcgctaggtggtagatgccagggagcaggaaagagacgagttatgatgattatatattttccttctatatccacaaaatcgtaaacgttttctagatgtctgatttcatctgatgttggacgaagatctgtcagaggcaaccgcccgtttatgcatccgtttaggagaggcagagaagcagacgacataataagataatatctcaaaaggaataagaaatagaaagtgaggcagagagaaagcaaagggaatgagacaaggcgaaagaagagggttcaagggatgggtatatggtatcagaagagaaaagctgaaagagttcttttgtatgcataagatttggggtttcagacccggctgaagacgagaacaagaaataggggaatgaatatgccaagagtcgagtcgcagaaagagaacgagtcgtgaaaagaacggtaaaagagaggacaaagagaaagagaaggaaaggaacatcattctcaagcgcatcgactgcttatgcacattggtcgtttccagcacagatagcgccccccaagttgctcaccaactctccaagtttctcaatgttgctactcgtcacaaccccagcagaagccgaagccgaagccgaggcagaggcggaaacggaagcggaggcggaagcagaggaaatagcagaagactcctcagcctcactcgcaacggaggaaacggcagaggatgaagcgctagcagaagccgaagcactcgcgctcgcactaagacttccaaacgagctactagaggagacaacgggagaggcggatgacgagacctgggcggtaggagacgaagaagaggtcggagcgacccaggtagacgtcgtaggaacggccgaagaggtcggaggggtataaattgaagtagaggtcgtcgttggcgtccaggtcgtcgtaggaggggtgtaggtagaggtagaggtcgtggtgggactaggagaccaggtggtggacgtagtagtgggagctggtaagaagaagacaatgaaaccgacatcaggtcaataacccgctgaaaagaaacatcagaggactctttagaaagaaggacatactccaggtagtagtgggagtcgtggtagtcgcaggcgtggaatccgatccgtacgcccaagttccgtagactgatccaaaccaataatttaaatgagcattcgggtttctacttctaccatcgtaaatagcttgaaattgatgcagactcactaactccgacactctcggcagcaaagtaggtgaacaaactgggagagagatcgagaccaccgtaagggcactgccgtcataacggaaacgtaacataacgtcagcgtccatgcgagagaagagatgatcgctgatgatggtgccaacaaagtactggagaaaggaataaacttgttcatgcgtacggtagggcattcatcctggatagtggccactgcagtctttccaccgtaggtgattgtgatcgactttccacagaccgaagggggatacgaggaatatcctccggccgcattcagctgatcagagttcagggcgacggtctgcaattgataagagcgggatggtagaaaatcatgaaggcaagtaagcttgagaaatcatacaagctcgaatacacgagacggtagaacttacccaaacatcgtttccgttgtagtttccacaactgaagagaccatccagtgtagatgaacaaacacgcatgtttgttagctcgtaagaagattataccaaagaaaagtctgaactcacgctccaagaccgacactttcgagcaggaaatttcaaaagaccaatcaaatcatcagtaagaaaggattgaacactggagctgggagaaacaaacgaagaaaaggagattgaatcaagaagtttcaaccaacctagtactgtataatcacgaataaaacaaacacagttagtctcttagctttattgccgtcgtacctaataccttttcatccaacactgtgatgggtggtgatagtacaaaaagatgactgaatatatagacgaactcataataggtgaatctggcgttcgaagcctgcctcttctccacatcgaatgttgccgccttcccttctttaatcaatctggcatcaatctcagccttcttagccttaatggaggcagagtgatgtccatgttgggactgatgaccagaagcggcgacgacagagagagcaggaagagcgagggcgagagtgttgaagaacattgttgagagatgtgctgtgtatttaggatgagccgatcaaggggaattgagggatgatttcgttcttatgttatattgatcaaactatgataccgtaaggaggacttagagctataagatctgaaggagtgtatacgttctctttatcacaaaggagagtgggttccagaaacggagggagtgaggagaggtcttgaggtgattgattgaggtaagtagagttatgcgaggaaaaaaagcaaaaagaaaaagaaaacaacagacgcctttggttacgagagacggttacgcgtcgaaaaagaaaccgaagtcgtggtattggttacgcgttcgcaaccacagtggtacacaagaaatcatgatgtcatcagtacagaaagtaacatcaagctaaaaaggtatatacacataaacagaaggttcatctcggagagtacagcatcgcaaaagaagagatgagatggaaggtgaaacgtattgagtccgagtctttcggtgaagaaagtgtacacaagtctacaacttgcctgacacgatacaatctatcagacatgagcgacctctccccgaattcggaggatgtcagaccgagtgatctgagcttggtcgcacactatgatcatagtggaacgtgaattcattagcaggtaggttgtatttcgcattggtgaggattacagaaaacatactgcttctaaagatcgagtcttctcgatcaaacagctctagcggaggcgcgaactcgacgacttgaccagcatccatgactgtcaagatcagcccacagcatgtatgtcagcttggtttaagccacttggaaggacacaaatattcaagcttaccaagaattcgatcgcttttcgattggtatcagatatttgtctgagcgtcagtatcttgctgaacaataatgcaacacgcacgcttcaagaacgacatactagaaagcgatagtggcaagtctgagcgataaggagaacaaagaagtagaaaagatgacaggacaggttagatttacaaactggctttcgaaccaatagctgagagtcataaaccaacctatgagcgatagagatgatagtcttgtcactgaactcgttctgatcgacataaacagaggaaacaccagtcagaatatgccaatatcgaccgaagaacattattgaagctcgggtagaaggttgatacgcactctgattgtgtcttgaatatttgcatcttttgacatgatagaaccgaaacaatagacggttgatttaaatgactacttggaggaagacgaatactgcagattgcagaagtgcgattgacttaccagtttcgacatccactgacgacgtcgcctcgtctaatatgacaattctgagagaacggttcaacaagccctgatatcagcttgttgtcatgaggaagaacgtttgcgacaagatgagacacgaacttggaatctcgaacgaccactcgagcgagcgcaatcagctgtcgctcgcctgcactgaagtttgctccttcgtcctggaagcgccaagatgaatgacagaagcaacaaaacgaagaaaatcagtacggaacacagaatgaattacggcgagagtagaagagtggacagcgtagactcacctgtaccattgcgtctagcttgaatttctcaagacgcgcatgcacttctggcgatgcatccggtccggccaccagatgagttcgcttgctgtcaacgtcgtcaagcacgttaagcacgcccggtcagtatgtccaaagatatcacagcgacatgatgattaagaagcacattaacacgttgaatgaaacatataatttgactcacagggcggagagcagttgctcaggtgtacacatcccatcggggtccaagtttgacgcaacagttccgttccagagcaacgggtcctgtaaacgcacaacacatatcgtaaacagagagaaaattatcagtatgtacgcatgttgaaaattcatgatggtgtatgcgatatagatgcccacctgtggtacgatgcccaacttctttcggatcggttctagaccaatcgatcgcagattcactccatctatctcgatacgaccttctgatagctctacgattcggaacagggcctgaagcagacttgactatgagctcaggcagccagtatcaacagaacataacacgagaatttgaaagcaaactgtcagcagccctccttatttaggttgtccagtgattgatggctacgattatacctttccggctcctgttcgaccaacaacactgtgaagaggaatggcaacgatagcgacaaagtgataagaaacaatacaacatcattgagttagtcggttatctttatctctcacttgccttagtcagcaccgaatcgttgtaatcatcatcatcaccatcactcacccgatcttctcgcctccatagatggtgaacgataatcccttgagtacagcaggaaggttgtcccgatatttcaacactacatcccggaatttaatctctcctgtagaaggccaagtctcgctcggatcgctagccgtcagtcgagccgcctcaggcggtaggtcggcgtagtggccgactcgctcagcagtgttcatatcttgctcgactacgatgcacaaataacgatgaggtcagagcacctatatgtaaatcaaattaacggacttgctacttacgcattgcaaaagcacttgaaaagtcggtcatagaatgagagtttcagtataggtgcttgacagagattcctctagtttaactgagaaacctactaacttcactatctcagtaaacaattgggtcacagccaatgtatatgtgagaactactccaagcttggcaggagactgtggattctcagacaaatggaaacatgagtttgactaagtccatagaacgaacggcaatggtcaagcatatcttaccgtagaatttctaaatgcgattccgaagaatgaaatagctagtacaagcaagttgccaagtatatcgagcctagcgctcaaccagcttttagaaaggggtaacgatcgcgaggggcattctatagtgagcagtagaagtgacgaggactaatcaagataaaaactacctaccagatcaggttgatctgaatgaaatagcacttgttctccgtgttgatagctttttcggttcgtgacgtaaaccggtcttctgaatgatacgctcgtatagaagatatcctgaaagggtaatcaaacatcgtgtcagctcacttaaactcctgtatgagcagacgggaagagaagatatcaaagtatgaacccatcaagagactctgaaaaaccaatggataaaaaatatcagccacctgagacgagagtgtactcaaaaacagtagcaagatgagcgcaaatatgtattcacctccgaattgtgcatagatagtagatcgcatgatggaatctaaacgtttaacctctcgagatgaagcacgataaaagttggcagcggtatagtagaggaacaacatgggtataaagatgagtccgaggtacgggaaagctgtccatcaagtgttgaaccgacatttagcgattaaagcagatggattaaattattcacaacatgccgtttgacgagacgtacagtagaatacaagcgcgatcgtcccaagcatggtcagacccatcgtcaggacgttgaccctgtcacatacgatgaagaatagcgttgatcaatatttgagagtaacacagtgtcaatatcactgatatagtacgaaccaatccctaggaagttgattgtcaagagtgctgacatcctttgagagcctactgatgatccgtccagtctaaggaaaagaaaaagtaagatgtcaatgtcacgacacagcgcatctataggccggacgaagaacgtactggggtactatcaaaccaagtaactggagctgccaaaaccccattgtaggccttgttgaataggttgtagctagtggcaattccagcgaaatatctgcgagaagattgtttggagaaacagttttatcagcgagcatctatcttcggcggttttgacgaacagaaagatacttacacaagcaaggtgcccgcaacttatccgttaaaataaactatcatgagaatctgaattcattaagtggttgaattaacaacttagctagaacatacatgtgaaaagtgcatttgccaaccccagctgcaagaacatgatagtgaatgaatgagagcaaacaggggtttcaactttagaggccagtggtgaagaaataaagaggaagacaaatattcgcgcgtacagaggcgtagactgccatgtctgttgagaagaaaatgctcttcagtcagcactaatccgaactgcttataccacacctttaactgacattgcccttgcttccaaccgtttatggaggattctgaccaaatcccaaggaatacagtagtcgcaacactcgcggcctgttcagatgcaatttgaatttaacgaatgtcagaatgtcgtaaaatcagcaaccaggtgatgaacttagatatctttacctgagcaagcatcatacatgacatgactttggggtaaatgaatgttcacgttaaccagaagaagtcgagtagatttcagaaaggaaatacaaatgacttacaaacgatcggaaaccagacagaccccatgctctgtatgtatcgagtgtaaacagaccacgacactgcgccgatctctcgctcctcctttaccgtaagcagagctcccggatttagagcctttgcctgttcagcgaccgagccctcgtttgtctgtccagtattgagaacaccagccggttgattctgcttagccgtctgcccaattttgatcttgaccgtcttgagttcgacatcctcctgattttcgatcacatcgcctccatcaatcatgctgttgtgactcgtctgggacatgtgatcggccatcaacttcgctaatgctccatccgcagcgagtagttcttgataagtgcccttttctgcaatcttgccatcttccatctattgcaggaacataatgacacagcaaggaagtcacatacaaaaaagcagatatcaacagaagtaacaacattgttaggcgtggctccgtcacatacatccgcaaatgcgcgatacttattgcacttactgcgatgatcaggtccgccttcggcagcacctctaggtgatgcgtgatcaagactcgtgttttgtctcgaagcggtccgttgacaagaccgtcgacgagtatcttactcacgtgggcatccactgccatgcacacacacatatatatatatacacacacacaagagagtagcgtaagtgaacagtcgtcattactgacataattaacagtctggtatcaagtatagccaaagcgtcgcactcaccagcagaaagctttaagaacggaatacgatgacgaacatagagttatacattgaagataagaactaaatcatcagcaaactcacttcaccattcgtcataagacgagggttgagcggcaagaggaggaacatgcacatactggatcatcaaagaagtttatgtcatttccggagtatactgcccgcgctagacacactcgagcctggagggaagcagtgatagcaatgacagtgaacgatgaagcggtaaccgcagcggcgagaccgagagaaacacaaatcattgaacagtgagcatcagttagtcttattatctcgatcccacagcctctctgttcattcacataaacaacgagtcaaacaacacaaaccttctgaccaccggaaagattgatgcccttctctatttgtcacagaaacagtgtacatgatatacatgatatccatcagtcggctgtcactccctatcttgcactataacatacactcgaagtattgaactgacctccaatctcagtgtaaactccatgagtgagcatcgcgatatcactctcgactgtgtacagcaccgcacaacaccaggcaacgtcgtaccatatcagaggaccagagcagatggaaagagagtgaaaaaaaaagttaacaaagcaaaagttcaatcagctcagattattgccgtttgcgagtgtgcagtagtatgcactcacgcgcgcacgtcttgatcgcagcagcaaaccggttgtcatccatttctgcgccaaataatatgttctctttgagtgtcgcgttcctagacaaattttggggcaagtgcatcaatagaagtagcagtatcgtcagtacgctcggaagtattcttagtataacgatcacgagaggcgcaatgtagatttctgccacgcgctgcaagcaaatgaagcattcgccaacacatgtgaccagtctatcactcacaagatccatggcgtttggggaactgtgtatcgttcaggcatacatggagtgccataccaattgaccaaaaacgtactcagtaagtcaccgtcttcacctctcatctattatggcagaagaagtgtcagcagacgtacaatatgcacaagatccacccagatactagcacaaaagacgtagatgtatttgcagggagacaagccaacagaaagaacgttaattagatgatttagtcatagcccaatagtgttttcgtacatatatacatcatcactaaccgctcgaccagatactcgcttcatttctcctagtagagcctgcatgagacttgatttgcccgatccgactcggccacagacgacgacaaagctgcctctggggatatcaaggtcgatgtcttttaatgaaaatggtaagggagaaggaccctgcagctcgatcggaaactccccttccacgttgcctcctttcttgttcttgtcattcttattcttcttgccaacccgctgaggctttgattttaatgcttcattttccgccttgctgggcttctctacagtttcccagcagtagcttccgtgagcggagatggactatgtgatgaggaaatattagaacaaatagagtatgagaacgtcccgctatgcgtatgagctttgaagcgatccagaaaacgactagcgtggcttgccgtgacgaacgagacatacatattctgcgcctggaatgactgggacaggattctgaatttcctctgccaacaggcattttgaaattcttcctactcccacataagcatctgttacggcttgtaaagccatgggaaggatccaaagagggagctgaatgttattaaaagcctggagagcggaaaagatggtggccgtgtcgagttgatggcctgatagcgaataggtgatctgacaacgagggggtttatgatagatcagcttcaagttggaaacgtttagcgagaaacactcacaaaagagagaactgccgcaaacacaggcacaatattcatcatggccatcaagacagctagtgatagattgaatcaagaagtaagattgaagatgagatacacaacaaggaagaaaatcgtaataggcgagatttcctatacctctcataaatgcatttatcttgagcttatctagttctttccttcggatacctttgatcctgctctcgaagtaggactcgtacgacatgaatttgatcactctaatcccttggaggacctcctgtaacaagcgtactctagagtctacgaactccattgacgcttcacggactttcatcagttgacggaaaagccaggcttgaaaaggaagtccgatgagaaggacgccgagtccgaccaatgctgaatatccaatggtgtaaatcaaaatacccaacctgattttttgaaaatagacggcccaggaatcagtgcctgcaaatctggataccaacgagagacgcagagaggtcacaaacccaacaacaatctgcaaaggttgaaggtagaggtcatgaagtaggactgctacatagtccatgaaagaagcatcggtagaaatatatgtgatgaggtttccgttcgggtgctggttccgagcctggcctgaaagtcggagagactttctcgagataaccccgatcaaagaacctcgcatcatgaaactggcatgataattgtcccaacaatggtcgatcagccatgcagaaagctagtttcagtctgagcaggaatgcttttaccctgttaagagtcctctttgaaagcaatgatagtcacacatgcttcccacctgacgcattgcccaaagcgcaaacacgatcccaactccatacccaattggctttggcggaggaacatccgagtcggcacctcgatgagagtatgcataagaagcagagatgtattgcagaattaaacgagacactaggggagaggttgctgacaaggtggtcgatattactccaaacacacccgccaaccagaacctggtggattaaccggatatcaagaagcggcacagaagagaagattatgttataaacagatggattattagtctcagactcaagatagagcgcaataaaatgagaccaatataagcttgctgacttacctccacttcatggtgtgatacagggcccaaatcaaattacgatcgtacaccttcccattctcggttatctttttaggatgtttagcttctttctctggttctttcttcgtttttttgactcctgtagaggcagaagtctctcgtccgttatgcttgctcatgctacttaaaacatcagtaagctcaatttcggcgtccttatcttttgattcagcggaggcatcgatgtccttcggagtgttgtcaacggaggattcagaaacaggccggtatcggtgtgagcgctgactgggagggactcgatcataaaacctcttttcgagattgtcggctaaaacagttgcctgataatcttctgagagttccctgagttgcgcataattgtaaagaacggtatgaacatagatggttagatattccggcttgcttgagatttcatctttaccatagcttaaatgatctcctaccaaaaatcttcgacttccaactgcgcagtttgtaaagtgtgtattgttggtgtttagtgaaaaaataaagaagggaatcttcgaaatacgactactgaccggtcttgagtaaccgacctagaagaatgaagcgatagctcggttagtctttcattgctttactgttcggcgaacaggaactcaccatcaagatgggtgagatccaagagaagaaagctcgggagaagatgttggctcgatattccggactttctttaccgtcagcatatgcagcgggcctaggcttgatcttgaaccctaggatctttgcttggatgggcgtatcttgagcgctttccaggtctgtaagagtgattgattgtattggtacagcggcggtagtcacgttcgttttaagtgctttcaccatcccagatcagacttgtatgtttcagcaaacagcgacaaaatgagaagaaaagtgaggagctggatgaccggtcatcaagaccattgttttatacgatgaagaagggagtgcctttctgcaacatagatcagcacaaaattagattattcaacggtcaagtccggagagcatacaagaagagagaaagatattcagagtttcttggcattcttcgaatgacatatctagactgttaattttgttctcggtcgactcattgaaaggtgatggaacccacatgcttccaactatcaaccggcccgaattgattgctcaccgtctgcgcagtcactaccatttgtaagcgggctggttgcttctgggtggattcgagactcttcctaatctcgtcaacagacatgtaccatgtgttcccacccatgagtgatatcgtgagccgatatgctctgattatgactcttaagtaaatatagttaaagccaggctaagcaggacctggccggagccgaattctagtgtctgtcggccataggtcaaggcaggccgcttgaccttatctctctcctctattcttcttatatgtcaatatgcgtgcccataacacaccgactgccccatcgttgtgtagcttcctcctatcatcgtcgcaacctgagacttgatcatattctcatctactcatgagatacatcgggagcaagtctttctttccttcagacacactccccttccggctctgttctcttgtccttacatgtactgttctttgctctacattcttgtctgctttaatgtatgaatttgatagatgacttgattgaatcctaagagtataagatacagcagtccaagttgttagttatctcacttacttgcgcacattgtcagctcacgtgttcgacaacttagacatgatcttgattagctgtcaggaatatggcctgagtatcaaaattttgttaccttcgactggcagaccattcgccttctcgactactcttgctcttgcaacagatcgaatgagaagtacatattcatacagcgcacatgcttcccacgcattctatgaccgcccttttatgcagcatcgttggaatctggagttcatatactggacaagatttcgttgtcatccacaacatagtctctcagatttggatcctttgtcactccttcctatgatccttgttctgattttttatcctttcaattgatccctatatctcattagtggtctatcagttctacttcctcgcatctctgttatcatcgatcactgccaaagaacccaaactagtcacgattgaacccggtatttggtgctaattgccgggcttgtagccctcggtcttgccagcaaggctcacaaccctaacagtatagaaagatagcttacgtacgcactacgtaagtcagcctgaaccgaggctgacatgaatagagatgcttgtggttcgatctgctctccagtgcttaaacattcctctgaacaattctcattctatctatcagaaccccatacagaacactactttgcccaccagtcgtcatgtctgctgctcgagaccctgccacttcctcgttcaagatgaaccataccatgcttcgtatcaaggatccgaagcgtgagcccatctctttttattgcggcttgattttcttaccaatctcttttcttttctgagtcctcctcttcatgtatctgtattgaaaagatccctcgcgctgacgtctctaccttttggtctcactatcgcacgaactcttagcctctttggacttctatcaaagaatccttggaatgaagctcatctctgagcacaacggaggcgactttgtgagtgctttcttatccttaatcgcttcactcattgtctcttccgtttaacctccttccttctttcgaaacaaacctctagacactttatttccttgcattcgatcattctaacggaaaaatgactaaggaagaattagaggcttccagattcgatcgagagggaattgtcgagctcacttggaaccacggtaccgagaaggacgagaacttcaagggataccagtatgttcattgtagtcgccttgtctttacagtgacggcgacttctgtcactaacttcctattctttaccacctctcgatacagtaacggaaacgatgagcctcaaggtttcggacacatctgcattacttgctcggtttgtccttttcttggtctttaaatttgactcagcatggtctagataaacactgactgaatgcaccgctgactgacgtttcaacctgtaacttaataggacatcaaatcgacttgtgagcgattcgagtctctcggagtcgatttcaaaaagaagcctcacgagggcaggatgaagaccatcggtatgcttgctcttcgctctttgccgatctcatctgtttcaccgtcactaagcatggattggtctcggcattacgtcatcccttcttttactcatctagcattcatctacgacccagatcgatactggatcgaggttgtcgagaacaagtaccaaatcgagtagagttcgagtgtaaaatctagcgccgtttgtatcgcaagcaaggagattaatggaaaaaggatcgatttgtttttatctaaagcaaacaatgccgatgcactgaacgaggataaaaaatgaacgcaacgaacgccaagttgaccatcactaataaacgagaggtcatcacattcaaaagaacttatcttctcacttctacctgctttcagacgaatcaattcaacagacttctacaaacctgtccaacccatttaattcatcatccgtggagacgtcgtcccatctagatcatgttcgtaccatctgacggtttgattattctcaactcttccttctcgaggcgaagaaagagagagagatgaatcgagtcgaccagttaatgaaagtgaggatattgttgaggataggcctgggctgggcgtgaagtctagaaggaatggacgtgctggtgttctagaggtttagaatttatattacccgcccgaaaggtgtcaaagagaagtagaaagaagacaggtcggcgcaagcaacgagctggcaagagaggggccgcaaaaaagaaaggaaagaggacgaacactccccaaactcttcctcctctgacttccagactgcctatctcgccaaccttcccacctccctgatctccagggacaaagaccgtccagcctggactcttcctttgtcctccactaccacacattctgacatcccatatcccgactctgcccaaggtactctgtccacctaacaccacccttccatcttccgcacctgcacatgaataataactctcttcggctaatggatcattgaaaatcgctaccggtctagccgacgctacgcggacgtcgtgaagcaacactgccgaacaaggatttgaccaagcagaaatgagtaggtctggatcgtgaggcgaaagggaagatacagagtaaggcgtcggaaagcttgtccgagttgttagaggaataggtggaaggagtgttcgtaacggagcacacgtcgatgatgatatggagtagatagagactggagaagatgatgaggtggctccgatggctacagtggacgaacgagcgcacatatgggtgcaccatggttttgatgataatttgatagtcatatctggaacggacaacaaatgtccactatctccaaatgaaagcgaagtctcagactcgactatcggagccagaggtgatagtgcatagaatgagacaagacctgagtataaagatgtcaccagagaggagtgcgtagagagaagactctgaacaggtgaagctggatgagggacagtgtgtaacagtttgagtttaggtatcgcgctctccggtacagtcggcctagcctttgcgagtttccgggaggtttttgaggtatgcgaagattcattggacggacggccgctccgtagattgaactctgagcatgacggtttggaagggatacgaacgatttggaccagaccgttcccgaatgtcaatactaccctcgactctggttcgtcctctccttcgtcctcctcttccgattcggtgtgggggagagcgggaccggtgtagaaagcaagacctgtcaaatcgtttcccagcaatcctcccttaagttcgtcctccacggtcaacgttatacgcgttcctatgtgttccccgaatccaacctcccaaccctccccgagttcggactctgcgaatgcctttgtctcaaggttgtccgattcaaaatcccaaataacgatctttccctttcgaccacctacaccagcggcgacaatccttctggtccctacggccagtaatggcttaatctgagcttgggaagcatatttgggagcttgactgctggaaataggtggtagagcgagagcaagtgaggcaaactgtcgacgccggtggtggagggatgtcaggtgaagatgacgagcgagcttagagctaggccaagaagcccgtgaaggaaacaggttggaagatctgagagaggacgaatgatgcttagaaacatatgtatcatatcctaaagtcgatacctaggtagatggtgattctccaaaacgatagagcgaacagacagtcagtcagtttgagactcaatttctgtcgtacatgagggatacacaccctcgatcggttgaatctatcgactgctccccagctagtcagatcgcgtatggtaaaatactggaagaaaagaacaagaatgtcttcaggaactgccgcaaacgggttgatcagaggtttcgatggctgctgcttcatcgaaggagactgatgaatgagtaggtggatgtagacgaaacttttgactttgtctacagatcgaatggctcaagaccagacagactaattcgccttatatgttcctcagcatcaattaactctgaaaacatgcagctccataggattcaaaatattctctatgaatcttcccattctccattcacccgaccagtctgaccgatgggctgctgtatgatatggcgaagaaggtgacccggccgaacgcgttctatcacaccggcgcgctgcttgacgcgtctgaaactcctcgaccaaaagcggccaacctttttgacgcactcttccatccaactcactcggtccatattccttctttctttcatccttcatctctttcttattctctaggagcgacattgacacagccagatcccggttcgtctttcttgtatagccatcgtattcgtccaatactcatcagctcagactcgcccagcaggaacacacttatcgcatactatccaacacgcatccacgtctttatccgtcttgaagcgtccttatcgttcttagtctttcgatccggtcagctgaaccaagaagcacctcaagaacagatctctaggtcagagagaaagagaaagacttacaaccaagcctgaggatgccgtacgaccctatacgagactctgcttcgtccgcgtccggctcagttcaaacaccctatacgccttctaccaacatttcccagacttcttcccaagcccgacagccctcatctgtttcgtctaccggggaaataactcccagatcgaacgcatcgtctcctatgacatcttattttcaaccccgcgtcggatcatccggctcatcagactctcttgccatacccgacggatcaaatggtttggccacccctcggtacaacagttcataccttagaggaagtacttctgcagataatactttcagaacacctgtatcgagttcaagtgggattgctcaagttccggcaactactaagcggctcagcctttccatgcttctggatgatacagtctccccgaacctttctccagacgtcggtacgagattgaccgcgacaactgctccttccagttcatcctcgctgttgcctcctccacatccgccgccggctctcaatccggctccccctgtacttctctccagagcatccaggccgacgtcttcctcttccagctcatcttcgtcgtcgtccagccttccttcgaaccattcacatagaacatatcctccgaccctacagccttctctttctcctttgaaccacgcgattccttctccgtcgccttctcacgcttccatccaatatgcacatccatacactttgacagacactctcactcccacgctcatcccaccgagaatacagactccatccccaatattctcagagcgtcctcacggatcatctatccataatctcatgggtcctcctttgccattatcagcgcctccgtcccgtccaaccgagcccgcagtgctagtccctgatacaacgtcgggagaagcaggcgaggcggaccacgctattcgaggaagcgagcagaatatggctgatgtggatgctgtggatggtactgatgctcatccagaaataacaaaaaggaagagctctttcccgagtcgtccgctaggcacatcttctcctagagaggagcccgaaattatgtctgcttcgcaaacacctcattctctcccttcctcctcccagccgtctttgtctcttcaaccagctgccctctcctcccttcctcaagttccaagctcaagtatatcagccataacgtcattatcatcatctcctgtttcccttccattggctcatccctcgttaccaccccgaccatctctgggcaatcggtcttctagtgcaaacaccaacagcagtttccacagcgcgtcgtcaaattcttgcggtccaactgcatccccttcgtcagcccttcctgtcggtcgtcagctctcatcagcaactgatgttctctctaacaaaaccaaaggagtggaaactgagatggaaacgagaagaatacgatacgaacctcggcgggtcaaaccgggcatgtcggtgttcgttccgctagagaaagaagaatacaaacgagctcaagcgagcatagcagaggatggggtgaaaaatccgttgagaggttgggtgagatctgtatctggtgatggaggggacacaaagcctgtcccaagagcggaaggagaaactggattggcaaagaggctgagagaggatgaggaggacgaaaaggaaagactgaagcaggaaaagagaataaagtctgaagaagataagagtggagacgttgccgtagttgcttctcattgttagtcttgtctagctctcaagattctctcattttctttacgattctggtgagcgggaaaattgactacgcgtacttacatgactctcgacagacaatcaccgaccagaacttggccgcgacagcagacggttttcgccaatctttggcctcaaatcgttcaataactggatcaagagttgtcttgtttccaattttgctcgtcgagctatcccaggtggtggcggtggtcctggacagaggaatgcaaaaccaaaaggcagtgtgttggaaatgggatgtggaaaaggaggtgatcttctcaaatggaattcggccagagtagctagatatgttgggatcggtatgtgaccctgtctttcttcgttgaatctggtcttttattaaagtcttaaatatgcattcgacatcggtcttggatctgtggaatagatattgccgaagtctccgttcagcaggcgtacaagcgtgcgcaggatattcgaaaccgatcgtttgagttcgatttccatgctctagattgctttgctgtgagtttagccttttcccttctcttcgttcctgaattatcttcgctacctacggctaaccatttctttgttttcgactcctcctcccccatcttcctagcatgacgtctccactgtactcttcgctcgccgacctatacctaatccgactgtcgacgtgttcgaccttgtaagcatgcagttttgcatgcattatgcctttgagaccgagcgccaggtcagacagatgctttcaaatgttagccagaatctgaaacggggcggtctcttcgtgggtacagtgccgaacgcggaaatgcttgtgtaggttttcccccttgtggtattagtttctctgtgtgctaatagcgccagatcggcagaggtcgagctaagaaatttttcatatgatcttttttaaatcaaaatcaacatagtgaacaactccaatccattccaccagattcagagaggctctcatttggaaactctgtattctcgatagaattcgagtcgagaaatcatccttcagtatatggccatcggtattcgttcttcctacaggacgcggtggaggatgtaccggaatatctggtccactttgacaactttcagacgtacgtccggtttcgcattcaactgtctcactttggctactgcctatttccgtaactgatgaagcttttaatctccgggtttgatcaacagactggcgctggactatgatctagacctagtctacaagaaagtgttccatgagtaagcctcctacttgactctctttcgtgatcagttagtcttacttgcatcctctccctgttatgatttgttcagaattttcgaggaggaacggcagatcccagagtttggagatctcctcactcgaatgaaagttatcaattcaagaggcgaatcggaaatgacggaggatcagtgggaagcagctagtcagttccttcttagctctgataagcgatctgtaagacagtcgatctgaagtaattaaattcttttgcatgatgaacagatctgtatcttgcctttgcttttgagaagaaatgagtttccttaagaacatgttttctctaattcctgcttctttgtgttctctctataacacgtatcaacaccattgttctttcaacattctggtttttcgatttttgctctaccttctacattctatccttcacaatttttggtttgaagatatttacgatacagcccctttatacaccctctatgtctcttgagaaagactttgcgctgcttctgttttgttgttgtttgtacacctatctttgtagaggagggagaaaggagagggaaggaagaaggaaaggggcggagggaggaaggactcccatactatgtatgcatatgatactttcttaaaggttaaaatgtcaaagacgttgagccggatccaaaaattctttcgctgttggccgaggtcggttgaaaaccctgcttggtcaccttcattctttcatccatctcattcatcacattcttcatacgtcgcacaaggaagtcgtacatcatggatttgtaagtgaaagcaggcagaagcaatccatctctctggccaagatatgagatgcttacccatccacatacgtatctacacgcacacagcctcgacctgcccatccaatcactaattgtgaacgatctaggtcgggctttcccgtctagtatgagtcaaagctcgatcgcttcgagatcaaccgccaatctttctggactgactcctaatggatcatccaactctcttgatgataaggtaaatctcatgttttctgatatgacgtgttttcattcaccatcagctgtgcttctaagataaatcagttgaaacggtcaagggaagtgaaaatgatctgatacaaggatacgtgtgtctctttttgtgaaaactctggaacaacagcttcccgcctcgtttgctccagcagaccggaacaagcttcgatcagtactcgagctaggtagatacaatatcgattcgaataggcaatcaggcgtgggcgcgtgatacgtgctgatactatatctttcctcctaatctgaatgagatagccttgaaggagttgcacgtctcgcatgctcatgtttcttctacagacactcagatactgaagagcgaattagcggaggctgcccggtcaattgacaacagaactggcacgatcaatatgcatcagcttcaagatctcctccttagaggagctaatatgctttccacgtccgacaaggtttgtcgatattttccgttcctgtggttttcatagttagctcaaacttaacatattggttctgttttctgccttctcaattgcctcttgatgattggaatgcacagctcaattacgatatactacatcacctcgtctttgttccgatcaaagcattcactatcaagtccattcagtcgggtattgaggcatggacgacactactcaagaatcgacctggaacgaccgttgctttgttgagcgaagtcaccaccgcttgggcatggactattcgagaaaggaaaggtttcttcaatacgtcactcaagtgagttcgccctgaccgccgatcatcttcctgttcggcgtgatctcgaaataagagggatttgggcccgtaagaaaataagtttgacatcggacctatctcttatagcgcatcggatccgttcgttcaccctgtcgagtattcgccctctgatcacgccacgatggatgctgcactctcgactgccaaacacacgttcactcctcatctgctactcattcagttcttctctgaatttcatcaatcaatctcagctccggaaccggctttcacacacgctctggttaggactgtgcttaaatcctgctcggctgtggaccagatgaggtatgtcctacggtgatccatcactgctggtgtgtcggacgcttggcaatcagaatactcaaccagtctctgactcttttaccgaaactatcagcacccattctatagctcgacctgtcagattccatctgatgctatttggactacaactccttcgggtcagcaagctagaagcagtactcgaaattaagctgagagatgaggtctacaagcttgcgtttgcttggttcaaagtccgcccgcagtgcgtatcatcgtagtgctgttactgttcttcattctcaaagcatatgttgtcaagattaatcatagtcaaataccaatttcccggttttcagatggtcttacgcaacagccgacgagatcaaggttttacaagatgttgtgtcaggtttagcatcagattctattcaagctgctcaattcatatcgagcgctcgaaaagaagacaagtctgacattcttcctggtatattgcatttctgtgttatatatatatatctattgtctaaacaagataccgaccgttatttctatatctacattcacaggtggacaaaccgtgtctgactataggacgctgcacgcggaaaagttgaagctgctaaacctgctgatcgacaatgagatcggccggctgtcagtatggtcaaatcctatgagcgacgccgcgcggactcaccgatctactttggagaagtctatcgtgattggccttctccatctgttcatattcagactgactgtcacaaagccaaacttctaactattctatatatcattttacttgtctgttattctccgcattggggcggaactagagaacctggcctcatctggttaaaacagcatggggaatatctcccgctgtggcagttcatatggccgagcggttcaaaaacccgatcgtcatcaccgaggtttctgcgcttatccgatctcgacccaaagaagctatcgacgttcctgaagcgttgcatttcttgttgggcaatcgattggagaggactactcgaaagggacttcaggtgcacacattctgatgagttttcgtctcttgcacatacacaagaagtagactgactcatggcctccaaccctgcggatttgtacgggtatagtggctaccgttgtggtcacctgtccccccagtgactgctgtcacttactttctgccccagtataacagcaacccgctcttgcttcagtacgcaatgcgagtacttgaacagcaccctgttcagttgacgttcttctttgtcccacaggtagtccaagcgttgagaacagacgcgttgggtatgttctcattcctcttctgccacctccaatcaattcttatatcttcttatcttttataccttaggttatgtggagcgattcattttcgagacatcaaaggtctctcaattattctgtcatcaaatcatctggaatatgaaggcaaattgtttcaaagacgactcggctactgaggtgagcattctatgaccaatcttaattatacgctctctagaaaactgtcaatgttgatcaagaagctatcttgatagccggatccgatgaaacccatgttggataggatggtggataaggtcgttcagtctctttctggcgaggctcaagcgttctacgatcgtgaattcagattcttcaacaatgtaaccgatatctctgggaagctcaagccgttcatcaaatgtaccaagccagaaaagaaggtactcgattcttgcttgtatgaattcgaatatctctaggtcaagtaaggctgaatatgtctcctttgataatctcaacgacacaggtcaagatcgacgaggagatggcaaagatcgtagtggacaaaggagtctatcttcccagtaacccggatggagttgttgtcgatattgacaaaaagtctggccgtcctctacaaagtcatgcaaaggtaagtttgtgttcatgctcacggacaattgacatacttaaacgtactaacaatcttacctcattgctcgcagacccctttcatggcaacgttcaaagtccgcagagagaaggtcatgcttgatacagacgccgaagattcgcttgctccatccagcataacaaaccagaagacgttcgaagaagtttggcaggccgccattttcaaagttggagacgactgtcgacaggacgttctcgcgctccagatcatcgccatgttcaaaaatatcttcgctggcattggtcttcctgtttatctgttcccttatagagtcactgctacagctccaggagtatgtcccgctttttcatcgactcgattaacttttcagtaaaaactaagagttgacaatatctcgttctgtttgtactcacgcagtgtggagttatcgatgtcgtccccgactctacttctcgagacgagatgggccggaacattgtgaacgacctaccgagcttcttcgtgtcaaagtatggaaaagctgagacgccagagtttcagaaggctcaaagaaacttcatagagagtatggcagcctactcggttgcttgctacattctccaaatcaaggaccgacacaatggaaatatcatgatagatggagaaggtcatattgttcacattggtatgttctcttttcttttgttccgttaagctgtgtttgtaatgggatatgttgttcactccttccacgtatgtccctccttaaacgtactccgtacagattttggatttttgtttgatatagatgagttcaaatccaggtttatcatatattccgacttcttcaagctgacatgcgcgttctggacgacttttgtggtgttttgactgttccctctgttctttattcttgttgccatcatcacgtcctggagtgagtttctttaatattctcattggctagctacaccaaattctatcgatgtgatagcgttgtctctgactcttatttatttcccgtctatactagggtgttaaattcgagccaaactctttcaagctgactcgagagatgatcgctgtgatgggtggggattcttctaaaggttatcgacttttccaagagcttaccgttaaagcgttcctcgccatccgacctcacgccggtcaacttgtcgatactgttcgactgatgcttgagactgctcttcccagtttcaaaggcgagggcacgataagaagactcaaggataggttctgccttgatttgaacgagaaacatgcggcagagtatatggtgcgcgttatcagaaatgctcatgccaataggagaagtatcgtgtatgatgaatgttagtccctttttcttcttctcttttcgcgcctatccttcttctcttctgttttctttcagagaaaattagcactggggttgatttgatatctgacgacaagagattatatcattttcacttctaaacatttacttctggtctcacagttcaaagggtaaaatctttcactcgtttcatcaatcttcctggacaaaatactgacgccgtgtatattatcttgtttcgcgtctttcattcgctcatatcctccatttgttgatacccgcttgtttgggtatcaaagatacaaaacgggtaaggccgcgatcgatcaaatcactctgtcttcttctcccggtttaaaaatccggctggcttactgatcatcaaacgatgatgactttcgattttatttgatctatatcgcaacaggatcccttacgctagataaattcgtccggtattgcttggggagagaaacggattccgttattctttgttttctattcgccatatactatgacacaatacgttttagagcccatattagttatctcgagagtattgataagagttcgttgaacgccacgatcacgtaatctcatgatgatacaatctaataataataaatcgtgcctcgttgtacaacgtttacacgtggttgttgctgttgaatctttcggtccgttgagtcatgttgtgcacaaaggagaaccgaggaaatcgtatgatattattgacaaagagaccaagaaaccagaggtggggagtggttgtgagatttggaaagtgtgagatgctatcgaacattatcagaaatgtagagaagagattaagatggacagaagactacatgtgtcaaagactcaggtactattaaaaaaagtgtagatgcaacggaacggacggctttcagaacgacgccaactcaagacctttacaacggagatttctttctctacaaaacattatgctaatgaagggacgatggaggacggaagaagaaaacgcagacaaacaaggaaaggaactctcaaggggaaggtgacaacaggagttcacgatgtatctccagcttttgcagtctctcccatcggttgagttccattcctcttgagcaagacaatctcttttaaccacccgttctctcttcgaagctcaccggcttcaagctcgaggtcccggacgctggtctcgagagtagaaaccgacacgctaagatccctgacttttgctttcttcttggctggtaaaaaaaaagtccacgtaagcaagatgaaagtggttgacaggacacagctgaaaagacgaatatctacctctaaaccgggcggctacataattgataacaaagacaggagaaatagttgaaagcatagtcagtgactgggtcgtgacacggaggaaatatcaaaaactcacaagcctcggtgtttctccttcgtttgtcctcctcatcctccgcggtgatggtgtaattctcttcgtcaatcgatcctgcagagatactcttcgactttggtcttgtcgacgatgttttcgcaatagtccttagctttggttttggtgatattatcggcgaggtcggttttgagcgatcgccagactctgaccgaccggatggctgagtccctggtgtcgatttcgaatccgaaacaggtgtgatggaaggggacgcaagaccgggagtccgttcggaaggagagaatgaccgtcgttttagactagaggaagatgaagataggggtaaagagatccgtctgtccacagagtcgcttctgaaaaaaggctccggaggtgggaatgcatagctggatggcgaagccgagggaatagatattggtggtattgacaaaggcacagacgaagagtcaggcgtcttgaactgttgagtgaaaaactgataaagtgggtgactttgatccggtccctgaaccggctcagagttggtgttagaacggttgaaatgttctgaatcgtaagaatgcgtcttttgcatgtctgctatcgagtatgaatcttcttgggttctctgctgggcgaggctcgaatgatctggaaacaaaggggaattggatggagaaaagggtatttgtgaaaagtctagtccaggaggaatgagcagatagggttgattggattgatggccgttcgatgtaggcaaagggaggtgagtggtcgacgataagggtctctgctgtagatttggttgcgctgaaagagcagagatcaaggatagccaggattggtcacctagaaagagatcaagacagatgagaaagcgtggtagtaacaagaggaaaaagcgaaaggagaagaaacgggtgagttataaggttcttgtacgaaatggtctcatcctcaaatacctttctcggtctatcgagacacgagggtttggttggatgcatcagactgtacggaccttgtggttggagttcatcagtttgtctcggagattctctaaaggtctctggatggctcgataaacttgcccggttggactctcttctggcgagctccatcgcgctgagtgcactctgtctttgtcgggattgatccttagtctgatgcggatgggtcattcgaaaaagcgggagatgggatcaagtaacgagacgagggtgagagatagaaaggaatgcagagggaaaggcaattttacggttgatgcaggtcagaggtgacaaaaacagatctaaagagagagacagactgaacaaggaaacgaaagaaagaggaaaaagaacgcaatagactagacagattgcaagaaccagatgatctagtgaaacagcaaagaaaaaaaaagatggagtgaatgagtgagcaaggggaaggaagagactgtcctggatgatgctcaatcacgccatttcaacaaggagcacgtcgtcagcaagcaagatcttagaggtttgttttctgggtctattctgtcagcgtcagctttcaatgtcttcatcctgtgatggatggatggtatatcagtacaaggatggaacgaagaaaaaggagagggaaaagagaaaaagagattaaatccgtttgttcttatgtaccctcccccgaaagttgtgattatcttcggatcgcctcatcggccagggaattcggagaagtcgatgagattttatcggaattccctcttggggggccctaattattcaaatatttccttagataagcacttaggcaaaagatatcttctcgcggatgctaacacttctcaaaacgtgtttccttctctcatcggcatcaaggaacaaagaagaaagaagaagacaagagagcgtgggtagccaatgaggagaagaaggaagcgcgcagacacatacacacatagacccctgatgtaggaagagcaaaaacggacaggaagagattgaaggccggatataacaaaaaaagataacaaaagacaagtagtaaagaatgaagccaaagtaaaaacacagcaagcaatatacccaaggaaagaaaacacaacgatagaaacaatgaacctaattcccatctaaagcagctggtccctggatccaggcgtcctaaactcgagcggtagctccgaagccggtgcatcagacggagataccctcagcggtggcacgggcgagatcgggggtgcaggcgagattttcgagaaacctcctaacgggaaaccgagccctgctgcgtcggtgatactcaccgtagagagcgaccggaggaacggtctgaacaaagagtcgcccgaggttgaatggtgtctcgatcggggcggccggacgatctcggacgacagctgcgacgaaggcgacggatgggacgactgatccggtgattgggaaggcgtaaaaatgagtgagttcggtcgacgggacactgaatcaaagaacccttgggacggccggcgagagagcgaagatcgagaacggtggtggtacgtatgaggttgaaattgagagtttgcagctgtcgaggctgccggctgaacctcctgagccaacggatggaaggacgtgctcggcgacatcgccaatagaggagaatttgcgtgaatctccgccagatgggacgggcaagaagatgacatcggtactgtcgtaggcgacggtggactgctcgcaggaaattgctcggccccggcgttggagtctattggaattcgtccttcagggaacacaacctcttcggtatccttatcctccgtataaccatcagccgttccgtcagttcccccatcttgcagtctttctccgccctcgctctcgccctcatttgatagcataccattggcgagagcccctcggatgtaggcagaacctttgacaggctgcccttccccctcgtctccagagatcaacccaaccccaggctcgtccacccctacaccctcctcccacgggggatccaactcgtccaccgcccggacttccgccctaaactccataacctctcgctcgatcgacgtccgaaagtctgcaatctcctccagagcttcaacctcggcccacttatcgaacacggctggacagctcggctcgtctgattcgtcgtgatatgcagataggtatgggtgggatagcgcctcggtcacatgcattcgtctcgctgggtcaaacactaacagttttgacaacatgtccacagcgtccggctctgcatgagggaacagcttcatcaacggcacagcaggcacaatcggtagacttcggatgtatttgcatgcctatagaacggtaaggaagacaacgacagcgattcacaatgagcgacttgaacgaacgtgaacagctctcggaataccgtcgttcagactaaccttttcacttcctacacgattcagcgtttcatcatcaggtgtgcccagcacactcaatatgaggtttagctataatccacgaaacacaaaaccgtcagttgatttggtctcaatggcattatcgtacgatccaaatagactcgctcatacctgatccacataactaaaacgtgattttaatacagatgatagtgaaaaatagagatacgtgggtcagcttacggtttccggtgacttcaaagatgatactgataaactcactctttgcctttaaatataggctttcctgacaacagttcggccagaatacagcctatactccagacgtctattgcggttgtatatcttctataggacaacataatttctggtgcccggtaccatctcgtcgccacatactcggtcaacggggacccgccgtgggcaggagagtcttttgtacccggatggaatcctcttgctaatccaaagtcgcaaattttcaactaatatagtccagcacaagatgcttcgttctcatcagctgttgtctaagatcatttagagctttggacatagtcattgcaataagtcacatacctcgcagtcggcattgaccaggacattacccggcttaatatctctatgtagcacattcgccgagtgaacgtactgtgtttgaaccgattaggagacataattcgttattttaataacattcgaaacagacgaagattatacagatagcgtaccttcatgcctctgaacagctgatacataaagtactggacatgagcgctcgataactgttgacctgaacgaataatctggtgcaggtctgcttccatcggctacagcaattgcaattcattaaaacatgagtaatagatacacgacgcgtaaatggtcaaggaaaagttacttacctccataaacatgtacacttcattgaaccctggatgaacgatgtctaggtcaattagaccagtaatctgcgcagttaagggttacaatacaggagaatggtgaatcagatcagatattaatgtaagccatacagtatgaactcgagaaaatggcgagtcttacattttcatgtgctgcgaaatgtcgtaataatgtgatttccctcaaaacccttcgagccaaaatgactttatcaaacacactaaacagctcccataggcataaggacatcagaagagaaaaaaaaagaaaaaaaaagacatgtaagtattttattgatgtgcaaggtatccagtcgagcaaacaagaaaacacggaccgagtgatcattttaatagctattgtctctcctgatatatcatcttgagccgagatgaccagcccataggctccttgtcccaactctgcacagaacatccgttcagccaaccaaaaggtgtatcaaaaagttagaatcatgcgcacgaaagtacacgcacgagtaaaaaagaaaacacaaatgcaagacgacaaacctctgacaagcttccatcgtttttctacatgaaacggtcttcctagacacataaagctatgatatcctctctcttccaacttgccagcactcagcggatgatcgctatccgcctctcctccagcaggaattccttcccccaaggggtctgccaccaagatttctgttccgttgagatgttgagctgcaggaagtaaatgtgctttcgaggccgctgctgctgctgccatgcctttcagaccagccgccaccggcgcgggcggtacaatcaccgccggagctccagaagagaaagacgaggaggatgaggaagaaggggctccattggtaagcgctgagtttgggttcgagggccctacagacacggtggtcattggctgggattgaggaggcgtgatatgtgttggagtagatgattgttggcaggacgagaaagaagacgaacgatgagtcattactggtggccgtgaaggcggcagagatggagctggagaaggcggtggagatgcagaggcagtcggaagaaccgaggagagagaagacgaaggagtcgggggagagaacaattgaggcggagccgtgcaatagtgtggatgaggggtaccgggcatgattacaagctctttgtttcgagattcctttgcgatctcaagagaagaaaactccctggggtacgactagtgatgttgacgaagaaaccaaaaaaaaggaaaaaaagtatagacttgttgtcagctacacgcacacgagtagatgtttggaaaggtgatgataaagacgacaagataggtgacatttagcttgagctgtttcaactcaatcccaacatagaactgtcactggacctctctagtttcatatattgatcagataaagattccacccaagcaaccagacaactctagaggttatagaatgtcccttcaaaggattcggttcataagttgtaccccaatgcatgacggcttaggtccctcaagttcaccaaactcggaacgtagttctgtagctcaactctgcccggataaccgaacaccggaaactgttgattggactaacctatatgtgaacaactatcgactctttcaacttgcttcaggataaacaaactgatggattgacagtcaggtgtaaagattttgccagggaggttgatagtggtattgaacagagatctgcttgaatgaaccgatagaacccgactgaaaagagataaaggagaggatttgtatcggctgtcacatgccacacccaaagcgggacagttagtactttgcgagtctccgtccagaggacagcaaaaacagaccaactaaccttaacggactcgccaattttgataacaggaagcaaacacgtgagggaacacgctgttgtttggacaagacttatggatgaataaaagtaaagggttggctatgacaacgagaggaggaggtaaggtagtctgctcaggcgggatggatcaagttggggaaaccaggagtaagtgtaaccgtgtaacgcacgtgatcttcacgctttgggattatataggaccaccatcgttcctcttgcatccgtaaaggcgggttaaagaagaaagatatggcccttaagataagttggccgtttagaatttataaacgagtcttatagatcgacattgtttcaagatgagtctcagtatggtatgtagatcattatatactgtatgcaaactgccagattgcttcgcgcaacgggtctttcaagagcaagaaaggtgactaaagcactaccctcttgagctccctaaacgctcggctgaccttgacatcgactccaagatcttctgcatcctttccgagtccctcaacgtcgagcatcatttgaagcttgatgttttcttcgtcttttgcttcgtctgctgcattagtggcagagttttcagaaccaaacagagagaaagtcgattttctaccttttcggtatttacgaagtgattcttctgctttctgagcggcctgtaaaacggaagcataactaggatatccgtgggaacagattaaatataccattaacagctgattgaacaggatactcagaagcgaatctacttacccagccgcaatctcctcaaatacagctcccgtccattcttgtccaaactctgtcttcaaagtcgcctcagcttgtccatttgagaagtacgttcggaccggcttcatgatggaaggcacaaagaaactcggctctttgggttttctcttatcagatacacccagatattgcgaagcgactccccggaccaatcttaaaggctcagtacatcgacgagtcaggatttgaatgatctgaccagagagcggggacacataagcggataaggtagagagcgaattctctaagacgactgttcatgtcgataggaaaaccaagtcacgacacattgagtttcacagtttatgagaaatgaaacagatgatgaacaaaccttgcagatcgatttcctcatcttcatcctcagatcttaactctgttccttcaaaccgaggctgaatttggtccctccagagagtcgaaacttttgtctcgagccgtctaatgtcggcaattataagtgaagcctttctcagtttggaatcctcttgtgcaactagcgctgggtccaaagtactcgatgtgttatcagaagtggttccagacgactatccaaatatccatcacaccatcccggagtaagatgatagaaaccatcagcaatgcttggttggtaggcagatacatcatagcactaaccttttcagtagagttagacgtcgtcgtctccagaacaaccttgttcaaccaagttcgatatcgacttagaatctgagaaacgctcagacccatcaaagaagattaccatgaagatcttcacaaaacaacctgggttatgagcaagaaccatcttacctgcaaggttaatctccaaaaacgatgtgataactcgggaatgaagatctcatcggcccaacaacggtcgatagctcggaatacagctaacgactgaggcaagaagaacccgtcttggtctttggatgatgaaaagataaagttcaggttaggattgcacaagaaacccaataaaaccccatcagtcagacttattctcagttgtatcaagttggcggtcaagaaaattaacgcctgattacacacaccttttccgtcaggctccccgcttggtttcatgccttcttcgagttttcccacgatctctttccatctcagctggaaatagaccggaagctgccatctcttctcgaatgccttgtatgttggatgatccctcatcgcaagtacagattgaattgacggcgccaaagactccaaccaggtgaagaacgcatgtgtttgggtgtaatgctgttgaaagaaggaaaggccggaatggcatgatcgaataaacaagacaaaaatactgattttagctgatctatataaaaataatctgacatgcagacactgaaagaactgaaactaaccaggtgcagctcttctggacggccagcagcgaacagttttgttcccagctcatccattagcctttccccaatctccttccacacgacgtttccaaaaaattcaaactcttctccatcttgaccattcacattcattaatgccaagcggtcgtctcctattctgccgtcaaggagagcctgattgtccctgatctttgctccccctcgtcctcccctaagtttttcggcgccttctaaaacaagggtacattctttttcgattgcattaagtagctgatcaaacatctttcccagcggcgatgaatcgttcatatacactttgttcgaacccactgtggccctcaaagttccatctgttggagagatcactgctgacggcgacaatgaggcatggggcgtcgccaggtcgaatggatttatctcagcgtgactagaggactcgagctgggacgggtctttgaacggtgttggaggaattacaaaggatgttggcgttgagggggtctggggaccaagttcgaggctcgatcgaatggacggagaaagcccgaaagactttcgagaaggtccatcaagattggttggaagagaagcgaaaggtgtagcaggaatgggtggatcaagaagcatttccaagttggaactaacaataatccgtctcacaagcggccgaacaagttcccgacgaagaaggtcttcagcatctcgccaacccgaaatcaggtcatatgtcttaagacacgcctgaagtgtgtgatgcaggctcgacgatgatgtagagtagtgggatgatcgagacgacattgagaacagggtatcagagaacaaatggtcgagatctttatgaagagtgttccgaatccgctctatacgctatatcagaggtttatatctgtttgatcagcatcttctcaattgattgaaggaagctttaagaagtagcgaccaacccattgaacttcatccaagattgcacacccttctctcctggctttatccgcaaggtagagcactcgagtatattcatccgccactctagcaatcaatttttctccgcctgaggtagcagcttggcttggttttatcgtcgagagcgcggtggaagtggtgtctagcttggataatatcggccggtcactggagctagcagtctttgaactgctgggctcggaactatccgcttgatctatcatcaacagtgtttccgctcgagtgagggagtctgtcaaagagagcagaatttggagaagattcttctcttcccgaagggcagatctttcgtcaagcttctgttggacaatttgttcgttcgagacaagcgaggaccggatgatctgagagacgagcaacaagcaacaggtgatgggtaagcttagtggaagatatgttctcatgattaaggacaaactcacctcaacatcttttttgagcacctctataggccctcgtacgaggtccaatctcttgccttctcctcggagaccagtaccgagactgatgaattccttgtaatcctcgttgataagctggacgagctcttccttgagatctgcaagataggcccgaagatccgttctgagttcatccaagggaacatgcaaccgagaaaggaggaagttatctacatcccagtttggattcgaggacgatagtaatggatgtgcatgggataagggaagcaaaaagggctatgagaggaagggatgtattgacgtgtatttaaatcagaacaatgattgagatagttggacatgaaacacactcactaaatcatgtcgatcagactctgtcgactgcagagagagacggccatcttcgaaagcaggaggtatcagtgggacatccggtgttgctgacaccatcgtgagtatgcttttctgatgttcaaccgctgatagagatgatgtagacggcattaacacaactcaagttaggcattgactccttgaatcccaaccctagctataaccaatctcggggcgacgtggcggatcacgtctccttctatcaatatatcccctctatttctcgtcgaccatctctttgccttcgctgaccgaggctatgaagccaacatctgattctgtgtcgtcctcaaaggacaaatctagtgcgtcaagaccgtacggacttgaagctcttgctcttgctgccttatctagtggatcgaatgataacaatcgtatcaacagcagcggcagcaacggtgttagaatcaacaacaacgacaacgccatgaatagtagtagcgacaacaccaatagacggaacgatacctctgagtttgctctcactgaaccaaaacacctctctgagtcatcatccatactttctccctctttgtcaactcctaaagcaacttcaaatttcctggctagaatgatgctgaactcgggtagcgcaccgtctcctaatcagccgcctcagattcctcaagcaattcttcagcagcttctgcaagaaccgtctatcctttccttgctttccaggctagaacaacaacaaccaaacacgagtggttctccgtcaggctcgctttcacataactctttcccatcaaattcctcattcaccgctgtccccggtattcctactcctctttccaatggatttacaccagagccggtcacgactcgatcgggcaggccatcgaggcctcctcagccatcactacaattgtctcataatctcagtcatgccgatgatcaactggctgcattgcatcaagcttgggcagggctcgacacgtcttttcttgatggaattgctggctcactcaacatatcaaactctctaccatcttctggacctatttcggcgcaccttcctacggacccattcacatcatccgcttcccttttggagccctctccatctgcttctaatgtgactggcacagtaacggcttcaagcacaaacctagatcttggttggtggtggccgtttcaggatgaagagaatgaagatgaggatccgtcttatgacccctcgatggcttacccaaacctcacccctccgacgttcaaccttataacccctggtccttctacgaccaactctcttgctgaggagagttctcagccggcagcttcgacatcaggctcgatggagcgcctgctaaacaatgcatccaaaacatcatccaagcggaaagggaaaggaaaagcgatcctggaggaggctctggaagctagcattacaaacacgagtgtgaacatagatacaacgaaatttaacactacggagtccgcgccagccaatctttttttcaataacgacgacgttgcagctggctcttcaatccaagatgaagaggatgacgatgaaggagaaccgggtaggctaccgacgccgggtggaagactactccggaagcgaaaggttaaagagagatctccgccaccaccatcgaagaaagtgaagctgacagcagaagagtcggccgcgcgtcggaaagctcggaacaaagagctaggttcatcttcgtcttgtctgattggtagatatagcgcttgtgaatttttgaacttgcggtattgacaaaaaccatgcgcttactctccagcatcgaattctagaaagcgccagagagactacgttgttggactggaagctcggattatagaactcgaggcagaagttaagaaatacaaacttgtgtatgtttctgtctcacttttctcttagttcatctctgccgtatgataagttgacacatcatgatgcttgaattactgatacatctatcttttctgcttttttcatcttcgtagatttcaacaagccgcccgaagtatcaagcctggccccggtaaaaacatttacgatgtcgtctcagggggcatcaaaaaccctcatccgtttgcgaacttaccctcgataccagcttcagttccctataaagccagtccactgaagaaaaattcatcaaagaagaaacacacagagggtgaagaggaggagcaggaactgcctgccgaagttgcctggccggaggacgaagaagaagatgacgagtggcagagtcaaggagaggataaagaagtgagaattcatcatgatagcgatgagcgtcaaggtgaagggcacgacgataaccatctggaggacatcgaaggcagaccagccaaagttctggaaacgagcatcgggccctctgaggagggagtgaaacaaacccgggctgaggaggtacgaggaaacgaagaagaggaagaagatgaggacgacgatgaggacgacgaagattcagactcagaggattctgcactggaggacgaagacgatgaagatctttaccagcccatcatagacgtcccgatccccatcgaactcgctccacctccaccaactacacagacagagacagcactaggaggatcagacgggccaatggacgcacctggtagtataccggctggagaaaaagtggggaaccaagagataatggatctactgaagaagctactggcaaagatgggaggtgcataacgagatttatacatgactgcccttgaaatcatctggtcattgttcttctttgtgaatctgtaaattcgtgagatgatcatgagtgatgctgtatgctgaagggaacagaaaagtacgttttagacagtttcatataggggatatcttgaatccgttctggctagtttcctctccatgaccctatcattcgcataacgacattttcaatctgaacggagggagcgatagcagcagatgaacgaggtatcagtacgtgagtgttagggttaactataagcgtaaccaccggccccagcttgaggggtcccatgagatggattcccaggtatggatcaacaccaacattctctcgtcttccctgtctgatctaaaacctccatccaaccatgcgaccatctccaacatcttttctccaccgtgaatggcggaatccttgggagagaagagaggcctggagatatcaggctccgttcaagggtggaagatttctaacgtttgttttcccctctcaattcctgatgttctgctcgttgactgaacggccctcagaattggttgcaagagtctgacgggctgagcattctattcctgtctttggtttactgggtttgatgatctcatggactctcacctgacactcctgctgttctcgttgtctttcgtttcacctgctacgtcaaaatcggggtcgtccatatttctctcggcggccaatcgaatctcacagatatacccccatgcttcttcctacacttggggtttttgccgtatatgttgcgttcgatgagctcgtcaaccacggaccactgaaggagctcgtttgggggcctgattctggcgaccacggtcaccattgattcaacccttcctcgtgatgtcggacgttgtcaagaacggatgggtctgaatcgcataggaagagccatcttgtgagtgagttcaacagattgtaatcaacgtggaggtgtatcttattttgatgaaatttccctcgtgtttttaagtctaacagctcaagattggaatctgcttgatcgaaagagttgtatgacttgtaccaaacaccttgcctttgtatcagatgaatatcttataacaacatatcattttcaagtctttcccgatagtgttttctatgcataatctagtcgagggcctagattcatgatacagaccaggttaactgcatactgatatcaaccttgatttggggtactcattcaacttttttgcccttcagggtctatgcagtcagcagcaagagaaccatcaatcaacaggtgcaagtatgcatagcacaacggaactgtcatctaaaagcaatagatggcaaattggatcaaaaatgtgagcagatgaacaaacagtctctcgttacgttaattccatctgcatctttgctctggatatctgtctgcttcgagttcagtgccattcacgaggtatacatgggtgcaaggtgataagtgaatttgtgttttgaacatctatttggcggttttgattgttaacaaaagcacatatgaattcaaggtttttgatatcaaaggagaaaggctgaaggaaaaaaaacatatcaaagaagatatatatggtattcacaaagataataatgttgtacgcaacaaatcgagcgaaggaatcaaatcgaagatgaagatgctctcctcttagaggattcattcatccttacagatatccacaactctatcttccatcttctcccatccgggtagaagagctccataagcattccaagcactcaggtcaggatcagcaactttcttcataccagcgatagcatccctctcgacggtgtcggtcttttggtcatagagttccattcgagcagtattgacgacttcctcgaatgatacaccaggcgagaaaagctttttgtgagcccactaagagaatatatgaattcagcttcaacattggtacccgacgaggagagaaatagccgccagaaggaggaacggagagatacggacggcagctcggtaggcggctccaatggcgcatccctgagatgatccactagccacataaacggggcaacctgagcacagcaaatgtaagagatgcaaagagtagttctaagcattcgagcattgaaaacagatgcaggcagagactcaccgaggatatcggacagcaacttggtgattacagggctgagagagttcacccagtgtataacatgattgaggattctaacaacacacaataaacatgaagagaacaaatcatgactgacttgaccgacccgccaccagctacgaacactctgttgagtctctctccttttaaaatgctagctactctcttcctgaaactcaaaaattgactctccagcactcttctcggcagctccttgagctcattctcgctcaactcaacctctccaccaggaagataaattccgtctcggaaaatatgaatgccggatacaccggaaggaataatttcaggtttgtcatagttgaacgtggtaataccaacattagaatctactgtcggagtggatacatagccagcgagaacctgttgattaaaagtgtcccaagacgatccgcagtgggtttcacgaactcgttctcggctagaggatattttagaaggaaatagacatgtcgagagatagtgtgacggaaagagatataagtatatcgctataagatgtatcggtgtggagaactcacgaaagggagccattcttgtagcaaagcctagatagtatttcgtcaaatatgatgagacagtgatcatcgggaagagattcttgactgatcaaatcgagcacttacatcgacatgtatcggcgctggccagattgcgagtctccagcaggggaggcaaagacgtgataatcaggagaggctatcaccgggtaatatcgtttcttctcaacatgtatttttgtgctgcacatggaatatatacgcgggcacgtcttgcagaggaacttacggagatattcgttggaagcaagaaggacagtatctgatgttcctaacgatatgacagcatcgcctcttccagaagcagcatgatataaagatcagataaaacgatgagctactgtaaagaaaatctttttcaacatctcaaaccccgtataattcgagagtcatatggacttacggactcaagatgaaggacagaagagtactaggattgtctccagtgaagggcgcaacgatgcactccttgttaaagttccatcgatcgacccaccactttccgacgcgaccaatcgctcgtcctgggtcaatctcgactccagttaacttagactcgagctccaaggggttgcgattgggcacagtcagagagaggacctcagaagaccatcgtctatttgggagacttgtaatgtagtgcagaggtcaagtcagaaaagataagcctcaacaaatcatcaagctgacggtgcttactcccataaattcatcccagaggcgtcggccttaggttgatttgaggttaaccaaggatctgtaaaacggatgtatcttactaaagcatatagaatatacagactgacctcatcgtagcccttgatctctccgtctgcacaaatcatagtggctagccagttgctaacaagcgcaattttttccgtcatttcccacacctcaggaacacctctagagacaagctttctaatctgtggcccagtaaaccttgcgtgagccttgcttccagtagtttgcgcaagaccatcagatccaccagagaaagcttcagtgatttctttgcagtcaagtttagtcgaggaatcctgccagttagtgacagtaggtgaagaaaacgcgtcggctaattgcgaggcaattggttggaaggcagacaagttggacaggagagaagaggcgcgggaggagaaaagaaccatagcatgttgttgaccggctccagaaatagatataacgttgttgaacggaaagttgctttttaagattcatgaaagatagatagattcaatgagtagaagatctcaaggtcaactagtagaacttcgaccaagaggctaggctagaacagtcaagtagaaagcgaacattattttgagtttctctaggaggagatcgatagcctgaaggtacatatcaacaggagcattgaccactcctcccgagtgcacgtggactccagattttgtgctgagtagagcaactcatccgaggaaagaaacatcatgtcacaattgaaataaatattggccttgttcatcaatagctcaagggcggtacaacaggtgggaactcacccaaaacctggaagttctaaactgaagtccaccttaatttcgtagacaacttccaaattttcattgacagcaactgctttgagtccttgagtactacagtcgagacccatgaagagtttcttctcgacgaactgtagagatgtaccatcagcgattggtgcagtcacagattaagatgaacgagaagacgggcaagttcatgacgtgcgcttacagtcaaggaagcatcttgagatgaggacgacatcgtgaaataagtttctgaataagagtcagattggtcgggagatgcacttataaagtatggtgttttggcagaaaggaaagagagagatccgatgctcttggtctttaaaatggatttgagagattctccggaccggaccggagatgttctgtttcaggaaagacccataaatctgtatttgtattacataagctagctggcgcgtgtcgcgtcgcgtcgcgtttctacatctagctcgcgaaggcctaactgtacaaggtcattattaccttcgatgacagttaagacagcttgctctacttctctttggcacacatctcaacgatagcatagcatatatccaaatatcgtaaccacatcctggtatagggccctgctaattaagaatatcttatcaacagagatataggctctccttggccttcaacttccacgtcattcattcgttatgcctgtacccaacccactccctcaaaggtcatccacagctcttacagctcccctagatcaaggtctcttccctccttatcctcaaagaaacggcatagaatctcaaccagacgagatattccgatcaggccagaaccaaattcaaaatcctgatccatctatcactcctgatcagtatcagctcaactccaaaaggctattaatcgggtttttcgatctttgggtcaaccctctcaacccaagaacaatcagccagcctgtcgaagcttgggaacttacttatgtcatcaatctaaccggactatacctcgaccgtgttgagtcctttcaatgggagctcagggaagggctaggagggatgaggtggattctggagaggacttttacggtaagagcaaagctgctcagtagaaagggcgtaggtcttgacgaagaagtagacgacagaatgacaaggatggagaaggccatcgagaatttggagagaagagtagttgggatggtcggaaaaggaaacagagatgatcatggacgcatgaggatgagacgtttgggagacagggacagagggaaggcttgggagagtctcttcggggacatctcgaaagctataacaggtaagcatttgtttgtaaaacagcattgggatttgttggaatcttggaagctcacatcggtctgatctcctatccctatcgtctcttacctcctagttctcgatcctaacaagacagatcatctctctcaaatcacgatcttctttaactctaaccgtacaggctcatcatcccaacatgacccgtccttcaatagtcctgtgggaagccctcctgcatctttggattcctcatcagacatctttcacataccgctcaacaccctctttcaacaacgtgccctactactggctctactctcgttttctgtctcgatcctcttccatcattctattgggtccccaatctcttcaattggccccgaaccgtactatccttttgttccgaaatttaagaagaccgttatccgagccttgttacattcatggccggttttatcttccgaatcaagaggcgagcgatctgtgctggaagtagagtatattcggttgagcgagatcttaggagaggttgtcaatccaagaatatggatcaaaatcatcgcttctctgaagggtcgagcgaatgaggcttgcgatccgaccctgcacgaatacacagatggcatggaggttgatgaggatagtgatttcagacagattgagtcaaggaagcgaggtttgtggaggggattagacaggcagctcaggagtgcattgagcagcaccaggaagatcggaggattaataaacaaagaagactcagccgtcttgatagacggcatgggcgatatcagttccttggtcgaatttattaagatctggaacgtgtatgagagggaaagcgatttgaaggtaagcttgggctcgagtctctcgaagttcgttctgagacaaggcttctacctggaactcgtttggtttgacttgatttcctttgctccgtgcatatctaacaggaagctatcgtctctgctctcagcatcttgccttgctctgcccctgcactcaagccgattgcctatatattcgcgtccaactcgtctccaacaaattctccaattgcctctatgcggacatctctcgcttcccaacctcggaagcggaaacgggacgcggatggacgtagctggacctcgctcactcgagaccttatgaaaacgtgcttcggaaatagtttggtcgaggaagccgagcagtttgaatcacaggctgggttcggacaggagacaagaagacggttgagtgtggcgctgaacaagaatatcaagcagctcaaactaatgtaggttttccgcatcttgcacccaatcttttgaataaatcttggtttaccggctgtctgtactaagtgcgtaatacttctggaattatgctttaacagctcgtctaattctgaagaaataagcgcctttcataagatactcccctcagttttatatgcatatgctatcaccgttcagatccatccgcctacttttcctgctcgtccacctaattccaggccggctctacaaaaattcgcaaccaatcttcgatccatacccatcgccgtcctttcagagcttgtgaggaagtatgatccgtccatgccggtcaaagtcaagatggcattgctagatggtgtgagcctagtgttgaagcatgtatacatagcatctgaacatgcgaaagagctcaaaacggttgagcagagaatggtggaaatgattggggttgccttggaagatctagacaggaatgttaggttggcagcaaggtatgagtttgaattctccttttgtgaggacatacgattacgagaactgaaaatcgggtaatatcttcaaatcactgctggatcagccgaggactaattgctatcgtcgactttcataaagatgatcaggcattgttcccagcggtcgaaccaatcttaacacgtctgttctcagtccttgggaaaccagcggtccccgctaaagaaaccgctcttaccgctttaggtgcgctaggcaagataagatcagacgatgtcttgttggccaaggttgcctctcagttggctattcaattgggagatgttgattcatggatcaagtcgctagcccattcgactgtcagtgtatgattctgttcctctcatatatgagtaaacaaccaagattaaaattcaactacttctgctctgtacgcattcttgtatatctcataaacagattctcagtctggctcactttcatcaacgaactccccacaagctcttctatccctatttcaaatctatcagccttcgtctcgtagattcactcatcatagcaccctctgcgctctctgattttgtcaacctgatcgacgaaactcaagaaaattttctggaaactactgttgcctacaccgttcctcatgtcgttctccagttccggaaagatattctgtacgctatggggaggatcatgaagaaagaggtcgctgagattcttttggataacattctggaaattttgtatcatgtactgatgcaatcggcaccgttgacggaaaagggatttatattcttgatcggagcagttggaacacatgcaggcggagaagaaggaggcaagagagattacccggtcaaggcgggagacctacttaagatggctgaaccagtaaagctgttgtataagctggttgtggacctgggcgatgaagatatctcagtgattcgaaaggtgatttttgtattcaattcttctatttatgagataatcatactaacaagccctcatttctaactttcaacctatttttatctacctccgttaaaaaggctgaagcaggcttgtcgaaggctgagaagaaattcaaagagttagaatccaaatcggctctagaccttggggattttctgaaaccatacatgttggggataatctctaatgtgaacgagcttcttcaggatggccaaggtcgaaagaccgctcaagacaagattaaggtgattcgaagcttgggtgcactaatgaagaagatcggacctactatggccacgttctcccagcaggtgagttttgttcacttttgcaaatcctcttctcgaagactgagatcacttagtgcttttaatacagattatggttactcttcaaggcaatctcaacaaaccaccgctccgatttgctaccctccaaacctggcatacattcctcactgtcctgaagttcaaggatattgcgcctcatatcggtcctacctctgctgctttcgtctcttcttggtcatcctttacagaagaggagcgcttcctggcagcaaccatcatcgattatgctatcgttgagaattcagagtttactgatctagttctagacgatgtcgttgatctagagggtatcgataagctccaaggcgcctctcgacgcctcaaagcagcaagaaacaagtggtcatcaaccgatctccttaataatcttatcagacgtgcaagggatgaaaatgttacaatcagcatccgcgctctcgaggagctcaaaggggtcttacttaaaaagagtcaatttgcccaattggcctcgggtgatgtattcgaccctgtcgttggagaactcgtcaagacgttggtcacttctgcaagtcgagatggagatcacgtcgaagatctccgggatattagtttagattgtcttggtatcattggtgctctcgatccagacaggtttactatccggactgaggaaacttcttggcaaatcactgacaatctggccacgcttgaagaggctcaggtatttgctgtccatttattggtcgacgtcttagtaggcgctttcaaggcgacaaatgacacccgatatcaagagaatcttgcatacgccattcaggagctcagcaaattctgtggatttaccaaggaccttcttgacaagtcctcttcctcttcttctcgggcgcctgttgctcttcgaatccgagaccgttggaagaaaattcctcctcagaaacaagttactttggccgacatgttggacacgaaatacgtcctcaagctcattcccgagaaacagtttgaacatcctatatatacgacctgtccaacgtatcgggaatggattcaacgttggacgagcgacctgatcccgaagaccgctgcggggaacgctcgccagatatttgatatctttcgtgtggttatcaaaagccaggatgttcatatcgctcggcatctgctgccacatattgtcctcaacatcctcatcaatggtgatgcatcagcccgaaaagagataagtgcagaaattcgagccgttcttcttgatcaggttgaccctcagggagattttccgtcagatcgtcgactccttagcgctcaggtgagattataagctatattgtgtctatattaatttatctcactcggacttataattggttttgttgaacgattagaccatttttgacctgatggaccatatcagtaaatggctccgacaccagcgaatggatctcgcaactagacgcaaagaggctcaaaaggctgggacgactagtcaagccttcgaactggcctcccagcagctcagcggtgtcgaacgagtcatttccagtatcgacactcagcttaccgcccaggccgctcttcagtgcaaagcatatgcgcgatctctcctcaactttgagcaacgaatcctcgccctcaagaaaacaggtgtacctgaatcaaccccagaaactcagcaatactacgagcatcttcatcagatatatgctgatcttgacgaaccagatgggatggaaggtgtatccactaaggtcttgtctccgtcattggagcatcagatccgagagcacgagagtaccggtcgttggaccgctgcacagagttgttgggaagtacaaatccaagaatcacctaatgaacttcctctgcatattggtctgcttcgatgcttaaggaacttaggacactacggtatgttggctccttgtgctatcaattcattctacaagactgaagttctgtcttcctggtttacagacaccttacgaactcacattgagggattgacaactcgtcggcctcaatgggaatctatgcttagcagcttccaagttgaaggatcttggatggtgggtgactggggagcagtagagaacattctcagcaaaaacaaagagacaagtcctgagttagctattgctcgtgttcttgtggagctcagatccggtggtgcatctcttcccacagttctgcgaacagcccgactcgaactaggccgcccgttgacggctgccgggagagattcttacaatcgagcctatgattccgtcattcaactacatgttctccatgagctcgaactaatcgctacaaccacacttccacagttcaaccattgcacaggcgggccgaacgatcaagccctcgcaacccagagaatcgttaccatgaagtcagctttggctaatcgactgagtcgaatcctaccttctttccgcgctcaggagccgatcttaagtatgagaagaacggcctttgatctttggtaagtgtttcaattttgagatatattatcaaaaaattctaatgatgcattttatactggatgcacagtgcgacgaaagccagtgaggctctcgatagcaaaggagagattggaaaggcttggttgttaacgtccaagattgcccgaaaagccggtcatactcagacagcgtacagcgcggttctccaagcgagacaaaacgatgctccttatacattcgtgcaagatgcaaagcttctactctccagtggacaagccttgagagcgctccaagagctcaagcacacattagaccccctgatcaaagatgttaataaagccccgaaggacttccgactagtaaaggtccgtcaagcttcgtacaattacatttggaacaatgatttacctttagcggccctttatccacctaggcggcgttactaaatgccagatggtaccgagatgccgatagatttgaagtgaacgatatagttgcagcattcaagaaggtcattgctctcgacgcggagtgagtcagctcgttgggaacttcttgttatgtttttgcagttcctgacaagacttgttctaatatgcatgtactcccagatgggaagcgccttattaccatctaggtcatttctatgataaggattctagcgatgggtatgttcagatgcgtgctgctatgattgtactctgctaactttttctttttttggtgatcattcgaccatgaacagcgaggtttcaatgcaaattcttcaactcacagtggagaactatgctcgagcgttaagattcggaactaaattcatatatcgtacaatgccacgaatgcttactatctggctcgacaacggtgcaaaggagcacattcttcaacttgaaagacaaaaggataagtcggggtaagtgcacatgactctgttacttctccgtcacatgtcttctaacagcttttacttcattgaaatctacagagcatcagataacgccgatctcaaatcactggcgaagatgactgctattatcgataaatgcacgagcagactaccagtttatcaggttggtgcctgtctctgaatctgcccctcgtaatcgattactcaacataattttgtcgtacacgttacgtagtggctcaccgcctttcctcaactagtctcccgtatcggacaccctaacggatctgtctaccgtcagatctaccgaatcattgtttacgttgttcgcacttaccctctccaatccatttggtcgatggtctcggtttcgcagtcgaagaaggaagaccgggttaaaagatgtgtaggaatcttcgacaaggtgagtccatgatgaccttgcgattggtctcttaagaattgagtgattaacgcttaagattgtctttccagcttcgagcgattgatgaagttggaaatgtctcaaacttgatagacaaggcgctactaatgaccaaggagcttctcaaactcgctaagctagatgtgtccaaatcaacagccgacgtcagcatggatcgagtagcaagaagtctcaaaagtcttgcgccatcgcctctcatgattcctattcaagaagcattgacggtctcacttccatccgaggctgtcagtaagggcaaggatcataatccctttccagtagctccggttcggtttgcgagtgagcgcctattattgttcttctcttgctgtttgatccatgtttctaatcgatggttatcatttcagaattttttgacaacgttgaagtcatgtcttctctcgtgcgacctaagaagatatcattggttggcgatgatggtcaaacctacagcttcctttgtaaaccaaacgatgatctcagaaaagatgcaagactcatggactttaatgctatgatcaacaagctattgaagaaagactctgaatctcgtagacggcatctttgtaagctacttgttctttttctcgttactgacatcctgacttgacactgatatcgactctcgtgacgcaaagatatccggacgtacgctgtcactccgttaaatgatgaatgcggtctttgccaatgggtcaatcacacagtccctctgcgaaacatcctcacgcagagttatacaccgaaaggaatttcgctctttgtacgcctttcaccgctcttttgaatatcttattgaataaagaactcattaaacacttcacacagaatcgagaggtgtcagaaatctataagaagtacgctactcaaacggatgctgaggtggcagagcatttccaaaatacattattacccatgtgagttttcatacaagcaatgtgctgaataaatatttagctcatcatgttgatactcgttttcacataggtattctcctgttttccatgaatggtttctgaagactttcccagagccgagcgcttggttggctgctcgtttagcttacggaaggacatatgctgtcatgtccatggtcggttttgttctagggtacgtcttatctttgtagcttgctgtttatagaattctaccatctcacctgcggcttctccagtttgggagatcgccatggagaaaacactctttacgatcaaaactctggagatgcagtccatgtggatcttaattgcttgtttgaaaaggtgggtctgagacagaatgccgaagatatgcacataatatttgttagaactgatacactgacttttactttcgagatagggtcgtacattcgatgtcaaagagcgagttcccttccgtctaacgcataaccaagttgatggatttggagttactggtgttgaaggtcagttgaacttcatattcttgattgatcttgaacttcttgcttagatgctctttgctgtcatgaaatgaaacgacaggtgtctatcgtaatgcttgtgaagttacgatgagaatattacgagataacaaggattctctaatgagtgttcttgaaacattcattcacgatcctcttgttgaatgggagaacgataaacgaagaatggtaagtgtcattcgtttaaattgcatcacccacactacatcttatggtatactccaaattatctccatcttaggatcgcgaaaaggcaaagtccaaaggaagtcgacgtagtctggacaatagcgaaaccagtatcttggcacttgctcaacgctctcttgaacctatcgagagaaaattacggggtgttcaagctggttatgtcgctcctaatcaaccagctcctacgaaggagatcaccgtgagtaatcaagttgaggcgttgattcaagaggcgactaacccagttaatcttgcgaggatgtatgttgggtaagtggatcctatttcttgttgtatgtcttttcatgaagcgccagactaattcttgcgtatgacgggtacatcaattgtaggtggggagcgtacttataactgtagcgtacatgcgttgatagtatcgagatttgtgtttcgtaatgtagatgatctcttatgcgcaaatgaaaaaatgacgaagtactcaaatttgagagaaaagcaataacatatgattgaatcacgccaggaatgcactagtataaaaagttagacggtagccgtatccttctttggttttttcttcgtcttagcctccccgctaagtccttccttcttcgattttcgcttgagagtaggagtagcattcgattcagatttggactcatcctcttcagcctctttcatctccacatcctccgtcttcttagcgttcttcttcagctccttcttttccttcgcattcttagcctttccagaggcaagctccatcagttgggccatgagagagtgaagagcactcgacgatttgaatctatcagactccttcaccttgacgacgagagccggaatgaactcgtacgaccaaacaaccggtcggtcttctgggagaatcatcggcgaggtcgatttggcgagcttgacggcaaacttgagaacgtctcgcaaacgatcagctttgatgctcttcgaggatgggtcgcacgaagcctcaacgaaagagaatatggcttctcggcaagagaggacgaaagctcgaatttcagagtcgagaccttgtttggacaagacagagacctggttcgtaagttcgttgagaatgaggaatgcctgagttcgtctgaaactgttggctccgtcagatttagcataggctacaagaggatctctcaaggcccaagcgatcgaagggaatcgagagaacatgttagagaaaagaactggtcgaattttggttgactttttggtcatgaagtcttcaagcgaggccttgtagacgtctagaataggctgagcaagatcctggctgttggaggatgaaggcgtagatcgatcgtggagaagcgcacgggagacaaacatgctgcatgtgctgcacgttttggccacttgcagagattgggcttttcggcaagcgttgtggagctcttcaagtacctcgacggcctcggatcggtcaacgatttccatgtcttccttggcccgacaaatccggttgagaataccagtggccttagaggataaatgctgctcggtggggctggagttaaggacaagctcaagaagaggaaggaacaatcgcagaatgagggcattgctaggctgcttctttgcaaaggtttcgacgatctcaagaactctattcttgaagtgcacagcttcacgctgagcatctggagaagcgaagaacaggataagggcaacaatcagaacgattcatcggtctgcatgatttctggtatacaatgtttgaaattgcacacacgaacctttgtttcccttcttgccaacgacctgggacttgaaaatttctgccaactgatcatctaacgccagcatctgatcgtcgttcatgagcaagtcgtcatcgtcgtctgagtcatcgtcagctccgttaagagtggtatcagctccgttaacctggagagcctcggctatcctctttcggagctcgggatcaacttcaacatcgccctcatcttcttcatcatcctcttcctcatcttcctcatcttcctcatcatcctcatcttcttcggcctcgtcatcatcttctcctttcatctcatcatcttcatcatcctcagcagtgacaggtcgctcttcaagttgctatagcatcgcccatttggaaagattaagaaagcatcacatcagtattcttcacctgagcagcaggcaaagacagatacaacttacagccaataaaagatcaattgtactctccgaaacttccccagacaacatcccaaagacctgagtggctaaagttcggagctgggcgctagatcgctccatgaatccgatcaagacatctaccagtaagtcgataggagcaagatcttcaggctcgtccgttccgttgtttgtagcggcagcagtcttcttgctcgtcttggtctttttggtgctgaacatcttctcagcacatcccttgagctccgcaagaatatcgagcgtatcctcaggctcatcgaatgactgcagaatcaccgactgaatcaacaactccaaacctttagcagcctccttcttctcgtcttgaacggccttcagacctttaacgacaatcctagcatcctttctggcatcttcaatctctttctcagcgtccgtcacgctcaccaggtgcttcttgtctctctcaagttcctcggcgatagagagcgctcgagtaactcaaagggtaccggtggagtcagttgaagcagatcggtgagccttgcccgtagagtccttgacaagagtggtttcagacgttaattcgctgagcaccagcgaaagcttggatcggcagtaagcgtgcaagttgtcggaaagcgaaagttgaggggcggtatgaagctagtatggaggagaaaccagagatccggtgaagacgtgattagaataaattcgaaatacacaacagaatggaggacgtacatgaacaaaaggagacttggggttggccgacttgatcttatataatccgtggagaacgaagaactcaatgatcgaggtcacccaagagtcgtccttggggatcgagccgtttcggatcaatgcaacaagctgatcgaaagcccagatccttctagcttccaaaccccggagatcgaatctgtgcagataatggtaattgcgtaagctagatatgtatcgcatcaactcatatagaagacaagagcaaggcttactctgaagatgaagcaaatccgtcatggacgattcccttgaggaaatcaatgtactccttgacaccatcgatcgtgagggaagataagatggaggagactgtcttagtcttggtgatcttatcgaagttttggtttccattcttgccgagcagctgagaaacgagggtaaatccagcagtgggattgatggtgttgatggactgaacaagcttggcctaatgtaagaaagatttgggaattgaacagatgaggaggatagacacgtcagactggtggatgagacatcagagaacggataagacaaacaatagacagagcagccttgtgaaggtatcgttcttctcctcccaagttgttgatccaggttcgcatgaagttcggggtaaagactaaaggaatttctgaggcaggcaatcgagggaaggtcttttcaaagatctggaatccccaaaactttcgctcggaagaggacttggcatcgaacaaagaatctgttttgtcagattgccaatcgagagatcagtcagctcatgtccaatcaagcgtgcacgtaagaaaagtgacaaaccgtccacgacgactctccagaactctgagaatggagccttatccacctgaacgccaccggcgttctgtttctcttttgggaaatatcgatcaagaatcatatcccaaacgaaatgaggatgaggcttccagctacctgttccaccggacttattcccatcttcttcatcatcctcttcctcggcagaggcagagacggaggcttctttaagaattcgagcaagaataggaaggtttgaagcgtgaagaagagaaggcgacttgaagggaggaagaaggaaggttttgaagggaaggttctaagtgacagagaaggtatgatgcaagcaggacgcgctcaggtaatgtttcgatcagagcggtcaaaaactgaaaaaacctacagggtgagaagcctgaagtctcaaagtcactgccaccttttcaggagtccactcctttccgccgacctcctctccgcctcccagcacaaaaccagct

SEQ ID NO: 2125 - DNA, 6522 bp, Xanthophyllomyces dendrorhous
gtggtgagaccgaagagtcgagcgaaaagaaggtctcgggtctcttgtcctttagtagagaccgtgactcgagagtatcgaagaacaagagatattatttgggtaggggtaatggtcgtcaagtgggagagcaactgcacacgaggggcgccatacgcacagcgagtaaggactttcgtttagtatgatatgcttgatgtgctgatactaaaccacatgtgacaaatatagatgacaaaaagatgtgataaagtggtacatgaagaaacagtcactcacttcagtcaaagccaccgcaaaacccaatcgagagctttctctaggactggccaaacctctgaccagtcgctttatactatagctgacatcctccgagtttctagcttctaattgagcgtccaatgccctggactctttgtctactggctcgtcttcttcatcgtcgtcttcgtcgtcgtcatccgcgtcttgagcttcgtcactctgctcgtcttgggcgataggcggaggaacagacgtgagaggagtagcagccgcacgggcatacgccggagaggactcgaattcggtttggaaatgctgaagagtttgaattagctgagcagaggaggacagtcttttggatcggacagaggaggaaagatcccagaagagaggaagcgtcgtgccaacggtggaagcagaagccatggttgggatgaaacgaagaagggctaaaacaagatagtattgaatcgaacatcatcagccaaacagaatactaaaatttcgcgttgaaaaataatgaaaaccaaccaggaaagcttgtctgatagaaatcgataggtatttaacacgagaaagtagagaaagtagaggaaagaggaatagagagggaagagggagggtgagcttctcggtgttgctaccgagaaaacggagagagagaaatctgaagaatttggaaacggtggaaactggttgggcgtggcgtggtgacacgtgatcttaagcagtgtttgtgatcacgtggtttacaacaaccctaagacgtcctatcgtcatcgtcttaaaacattcaagagacgtccacttattccaatcacctacaatctcttatttggttcatcaattgcgacgcgccatgaccccaaagaacttgtccccaccaactaatcagccatcagtgtcgtctttctttaaaaggaagtcacctccctcttctcaagcttggtcagaatcttttccatcgaaaaaacctcgggtgttggctaatgatcaatcgctcaaacaagcggatgcgacttcggccaatccgatcgagatcgaggactcaccatcaccttctgccaatgattcgtcttcatccgtatcatacatacctccacctccatcgactactgtcgctttcagacctccttctagagccccgtccgttgtgcctttgtatccaaaggctggcacaacagcatcggccaaggaacggctccgaaaactagcatacgtcgaagagagcgaatcagtacgaaaatcagagacagtgataacgaatatagataagaaggaacgtgaggaggaagaggacacatccaaaaagattagacatgagctcttcaagtcaagactcctgggagtggattttggaaggcgtcgatcacttgacttggaaaacgcgcaagacgcggctatatcagctgctgatcctgggtctgaccaaaacggagaggcagttgaagagggtcagccgacctcttctgcttctaagatgcagagtctgaagcagaaacttagcgctagaggagtagccaagggagctggaaaagcaaaggagatgttagggcccagtgggaaatcatatactcctttggagaaacaggtgcgcatctaatcagtataatagtttgtatgatcagaaacctattcgctcttatccttagctcgatggttatataaatcaaagattctggaccttaaagagaaatatcctggaatccttctgataatagaaggtcagcagaacctaccaatatgatctcagccgcctgttctagcttgttccttaccctcgaatctagtcggttacaaattccgattctttggagaagacgcaaaggtttggcacttcattctcttcaagaaacctgcaagtatatatatatatatattgaaacctcaacttggtaccatcagattgcatcccgatatctgaacatcgtagctttccctgagcaagtgattcctgatacgtcttccttcattctctttatctgactaactggttctttctcgaatcacagccgtaattttatgaccgcatcaattcctattcaccgagtcgatatccacgtcaagaatctcatcacgcacggttacaaagtgggtgtgtgccggcagattgaaactgccgctctcaaaaagtctggtgataacagaaacacaccgttcatccgagaaatgaaggaactctataccgcgactacgtgagttcatatctctcttatctctatctatcggctcgagagaagaaaggtcactgaatcacttctaatcccgtctttcatcatagatttgtagatgaactgtcttctttcgactcaacttcagagtttgaaagagccgccgctgttccaccttcgaatgcactattcatcctggccaagtgtactgaatctgatagaggagagaaattatcagaaacaaacaaacaaatgatgggcatggtcagtgttgtacctagtactggagacgttatatgggacgaatgggaagtaggatcgcgaggggatcttgaggtcaataattccatccttcgcacattccctcttgactgtcatatttgaagtgccgaaagacttatggtggtctgatacaatacttcacaatcatatatagacgagacttacacacatcaatcctcaagagtttcttttgccaacgagtagattatcaaaagaaaccgaagggcttctcactgacgtagctgagcgcgggtatgtttcctttgactttcatacctttcatctccctgaacaatttgatctttacatctagtcttgattggctgattttgcgatcaacctgtgtgcaggaacatccgtttagagaggtatcaggacgacatgagtttcgacaaggcgcaaatctacttgtcttcattccattcaggcgaaggaaagaataaaggtaagttatcatgttaatgcatgtaaatagactagcaacgaagaatctgatacatccttcctctggtatgatagctgttttttcaactttgacggacttccccaaggccgttgtactcgcattagcctatgccgtcaggtatctcgaaggtacacatctccatgtctcatttacatctaggttctttgaatcggatgactgagcaagatactttctatctctatctctattcagatttcaacctctcatcctctttgttgcacactgaaacgtccttcactcgattcactgggctctctcacatgcttctcaacgcaaacacattgaagtgagtttcagttgttgttaagcactcatgaagtcttcgctctcttgttcttactcgtcctttacatgaactgggcacatcgaaaaagcaatttggaggtatacaggaattcagacgatggtggcgagaaggggagtttgttttggttgttaaatcactgtgtgactaggttcggaagtaggctcctcagacaatgggtggggaggcctttgataaaccagacgtaactatctgtttttggcttatatttgtctgctgaacttactttcctgctgcattttgactaaattcgagtctaaattccatgccggtatctgagactggtagcatcttacaggctagggttgatgctgtggaggagcttctgaccgatacagacggtagagtcgagaagctgatagatcttctcaaaggattatacgatttaccccgaggtctagctcgaatacaatatggaaaggtctgtattgttttttttcctttctcgcttcggagcaaaaaagaaccgaatacacatatcgattagtttcacattctgaatatgtgaggcactaatttgattgtatgaatttatccattctagtcatctcctaaggaactcgttacccttctcattcagttccgtcggcttggatcttcctattcctccgtttcatcgttcacatttgagagcgatatattaaggagtattgtctcttctctagctggtatcttggaaccggttgaagagcttttgaaagaaatctatgagaaggccgcgagggagggagagatagatagtctttggaaggatgagaacaagttcccagagatcgcagagtaggttcattgatagatttgacattgtgtgaggttattgatttatactcaatagttctgtatctacgcactttataggacgaaagcgctgattgacaaatgcgatcgagatcttttcacagttgtacgtcctcgtcatagctgaatgcaagtagaaagaaatgcgtcaggtttctgggttcttattgacttcgaatgtgattgtttgttcgcatgtagctctcagagattcgaatccttctcaaacgaccaaagctagagtttagtacggtctctaacataagtcagcatcttgaatcatctgccgatcttgtctagatatagagagttagcaacgagatctaacggaaggattgataaattccacaatcagataatctaatcgaggtcagcctgcatttttgtgcagattcgttagaatgaactgctctttatgggagattttttgtttttctgttccaactaggttcgacaaaccgatgctaagaaggtccccaagaattggattaaaatctcttctacgaagctggtgtaaggattcattcatccacctcctgtcaatcaacacattcttatacaccgtacctcttgccacctcttttagagttcggtttcatactcctgagattctgaagattctccgtgagaaagaacagtacaaagaaaccctcgtctccgtttcagcctcttcgtttcgagcgttccttcgagaagtaaacgagttctatgatatcttccggtctgtgacccatcatctagcaacacttgactgcttactatcactagcaaagacggcaaaccagcctggctacacgaagcctgtacttgtcgatgagcccaatctggatgtgaaaggcggatttcacccggttttggcagctctgtctgatgagacgtatgtgccggtaagatctattcgtttggttatcatctctctatccaaggacgtgatcactggtagttgaaactggagggcatcttgacaatagaatgatctagtgatgagcgcaaagaacggaagaagcaagatcatcacaggtaagtccctccttggaatcaaacagacagacaagacaatttcacacctaacctgatccaacatttaaggtcctaatatggtcagttctcatgatccgttcatgcataataaacaccatgcttatcagctgtttccttctatacgggctatctgtataaaagggtggaaaatcgagtctggttaggatggtttgcttgatcgtgctcatggcccagataggtagctatggtgcgtcaaacctctgcccttaccttggctttcctcttgaataccttttcttttccacatcttctaaaagaaaccatatttgttctctgctgtatacgaatatacaattcttagtaccggcttcagccgtgactatgggaatacacgatgcaattcatacgtgaggctttaatggtgatttctcctactcaaaatacatccactgatagtcgcccaaggtcaaaatattctcccgtgagacagccgaatgggagcatcggacgacattaccggtggtcagagtactttcatggcaagtttaatctgctatctattcgtcttgagacgctggctaaagtcaagggacgattgacaggtagaattatccgaaacgagcgagataatgtgagtttggttgtttcttaagtgatgtatatattcatctgatcccatcttgacctttgacattcaattcttatcaaaattagccactcagccacggataggagtctgatcgtattggatgaactgggtcgggggactagtacattcgatgggatggctctagccgaggtagtttggtcctttcttctctctacggccaatgtttatgaatcatttgatataaaactcaccaggttatcgtcgggtgggatggggggttaggccgtgttataccacctagtgaccaagactcggtatgctatctcgtcttctattcgtatctcttccgaaaatcattcatcatgagttgaagctaacacctgagatgaacactgttgaacatttgttagatcgaataatcttttcatcactcactatccgcgtaagtcgaccttttcacgcttttctccgacttggacatagcacctgactgatgatatcctctgtcaaataaactcgctcagttgtagcgacctcactcgccaaacaggtctgttcaagtactctacagaacgatctacct

SEQ ID NO: 2126 - DNA, 19461 bp, Xanthophyllomyces dendrorhous
gatctttcccaatatagcttgaagatgtttcgaattgggtgagcgggttcctaatgaacataaaatttcctcttgctcttttgagcgaaattgattgagaaaaacttatcttctgaatgggatgtgccccacagcatatgggcttccgttcgtacttcatcctcttgccattctactcgctcctcgggcagcgcccactaaaacttacatatgacgcttcggataacaacgataacaattttttttccgtcaggccaaatacctcgaccggatggaagtcatgagataacatttctataccgactctctccaggtctagcacgagcgtccttcggagtggaatgtgctcgactggcaggattgcccgatgaagttcttcgggtggctgataagcagagtaggctactcgaggaatctgttcgactgaagattgaccgatcaaggtatgtgatgtgatctgtcttctctttttcgggtgacagagaagttaaatcgagttccgctatcaaatcatcgcttactttgtatctttgcttacaccgtggatgcatgggtgatggattgatcacagagtgagacatatgaaaacattcatccgagttgcccttaattataaaaacgagaaggagcgcgaggaaaaacgagtcgaacacgctggtttgcaggcgggcagagcattgttgaatttcgaacagctgtgatatgtatggtttagactgtgtagcacaaagacactacaggttgcactcgggtagacatgaactttcaacctgctctacgggacacaggaatatctgaagccgaccaggaaacgtgtcgacgcgtcaggaggagaggagagcttatatgacgcgtttacggcgcgtcaacagagcgtttcgtgcgtctgtgcctgaatgaaaccgcatgtgtgcctgtcgatcgttactccgtcggcctgtttaactccttttctttttaattctttttccttttttctttgctgctactttttctcatttgttctggttgatttctcttcgtcctttgctcgatcgtccccaattcttatccctctctttccctcgtttccttcctagagtgcttctgaaattcttttcttggtcacctaattttgaatttaactgatttctgcatctcctgatatcttctcctccctatcatctctcatcaactcttcaatgatggtttctccggggtgctccctcattcttcttggcggcctcttcataacagtcgtccaggcaggtatatctaccttccagatcactcagccctcacaatgtagtccgatgaatatcacctgggtgtgcgttcatgttcacctcttcttcctttcttcgttctttcttcacgtctttttctttgtacactaaaagttcaatgcctttcgttcgtgcctgactttgatttttcaccatctatggctttgtcgcgctcttcatgcatacattcttatcattctataggccctcaggctctatcgtctcgacagaatttaatctgattctcatcccaactacggataatacccaagtactcagcaatatcagtttcactgctaccgataacaggttcgttcttactcttccgatgataatatcagtcaactcaagtttgaccatcagaacgtctctcgagtttatcaagaatctactctgtttcggtgtactaacttgtattttctccttccccttctacactctataacacactccatagctacacacttcctgctctcccacttacaaagaatgtagaatttatagcgatgctccaagatcggaccgacggggcgtcccaaggaagagtctctcagatcgttcggacatctgactcagacggagcaggaacagattgcttggcagacctccctcactatctggattttgttggtcttttcaaggctctcaatttcttcctaactcaacctagaaccgcgcatgctgactggaccattcatctaacaggtcttctcgatcgagtttgaaaatggcacctcaaaccccacgcaatgtgctacaacaaccgtatatgattggaacaatgcaaccgcccctagtgtgtactttttttgctcattcttttatccgtttctgcactcgtcctgacgctcgacctgctgtcccatcgttctgtaaaaccagttggaatctcggggcttattccgggaggagaatccttcaacgttcccattacggacatgaccaatcaacgggcggattggaccactgcaatccctgctggaaccaatgtcatgttcatcatgagtgatggtggacctcggtgagtgactatcgccctcttgctgtaaatttttcaaaactgatcagaccatgcatgttgctctcatgctctctgaatgattatagaggatctggaggatctactggtatctacaccgtcgcggccggatcaagcagctgctttacagccggggctgagatctactcgtcccttcctattggtgacgtgtaagtccttcactcttctgttcttggctttatagatatgaaaattgacgtcgcgtttgtaatgtttgcgttgttgttctcaaatctaggccgacgactcaaacgtgtgtatctcttcacgttgtgttgaactctcagaatcggatcccaccaaattaaccttgttgaatctctcttcaacacagtgtaaccacaacggtgacagcgcctgccgggagtccatctggttcttcatcatccaccacgggagatgtatctaggaagacgtcccatgtaggcgccattgctggtggtgtcgtcggtggtttggctggtctggctatcttggctggtctctttttctggttgtccaaaaggaaggagaagaagaacgagactgagaaagaaggttagttttttttgtatcccttctcgttcttctttcgtcctgaagattcaagagttactaatcattgaggttgatgtgggcttactcgaaagaaatgatgggtgtggcacgaccatggagtcctcctgtgcctgaggatcctgagaacgtccgtacatcggcctatctatccggagtcggagttggagctggagcagctggaggtgctctcggtggtctggggaatcgttccagccaaccaggaagcatctcttctcctcagtttggtcgacagaatgaatctttcgaaacaactcaggcgcaatatcagcttacgccgttaaactcaccattcggaaatggtacatacccaccttcatccttctcgcacatcccacctggttcggtaggcgccaacacgaccattgcatcgacagacagtctttcggaaagccgaaggtcaacagaaaagagagcattcacgtttggtggtccatcgagcaataggctcagtggaggatatcgaggcgtgccaacagcaggcagtgatggtgaagatgaagatgtgcaaggacgaggcaacgacaggggtgaagaacttttagatactcgaacggaaggctcatttgatcaggagccccatcagtcgcaacctcggttcgtgagacacgaagacgctggattgattgaaggcgctcacgaaagtgtaccgaacgataatgaagtggtagacctaccgcctctttgtacgtctcttcttcccctcttcgcgatgaaccgatcgaaatcttatcgctttcttgttttttcttcgatcatgatattatagatcaagatgctggaaggaatcaagttggcacacagtctgttgttcgagatcaggcaactatcaacagctctggatcaaaatctggccttcgatagctttagtaaccgggcaacttcataatctctctttgtgcgcttattccattcaatcttctcgtttcttgttgcgtacgtttcttcggcgatcaatttgatcgcgatttctcttcctatacccttcctaaactcctgcatatcgcgtttttccaagcctccagttatcatcttgtatctttaatttagctttcatctatctgctttcctgttgattgcttcggaccctttgctctggacagtgtttctctttgcatacacattttctatcttcgttataagtctcgataatcctaattccttccagtatccatcatcaccaacatcttgatgtgatatctgtttgagagttcgcacattcgatagatgttaagtaatcttcattctgtttgaatcaatagtaaaaacccatgtaattctccttccttctttctgttacagagggagaggatcgaactatgtgtccttgaaaggggagggagaaagaaaagcaagagaacgatgcacccctttctttgcttcgaggccctcgtttcaagtttgaaatctggggaagttttaattcttcatatttgatttcggtcaagattattctcatgagggcgcacgataatttttttcccaatttctcgacttctcttcctcaatctttttagattccttttctctcttacgggggaggggctatctcatgtgatatagacggttctgcacatctttccttctacgtctcttgtggaacgtttggaatcgaacattcatctccgaagttggacaagaggatctatttcgagatttttccacgtttcattctatagccttttccttttggggatagagacgatgggaataggatccgagaagaggagagaaaagtcgatgatatcatgcatgtaacatagcagatattaaagaacagagataggtagcagacagtgatcatcaaacaccactaataccacacgagcaagaacagaagaagatgaaatgtaaaataaaaggatgaacgatggtctagaagcagaaatggaaccaagtgaatcacagaaaggaagatctaagaaagtaagggccacaagaaaaaagagtttgttttatgaagaccgggaaagaccggatgatcgaagacggagttcttgtgagctctgtctagtcttttcattactgagtcgagtcatggacagttgaaacgacaacaggtgagctgaatctgtgtatatcaaatattgagaggatgtgggaatgaaacgtacatggtctctccaacttcccttccagtcccgtgtcctacatcgtctctttcccctttctcgctaacctccccaacttctatgacaatctgatcttcttcatcaaccgaaagctcctcatctccttcatcatcactcctcgtgtcttcagctccggatccaacaacgactttccaggcgacgttgcagatcatggcaaaccagatacacatcaacacccagagcacagagagcaggacaacgaagaccttgtgggccgccgacgtgaaaggctgacatgacacaaatgaagtagacaagaagaaacagtaagaaccaatgaactccttttcatgcgcgcacgtttttatcgagcaatgtgaatctagagagaagatggctgaccagatcccagggccccagttgatccctgttagaaattccgtccggcccaagcaccagcctggcgcaatccttccagatgctgatgatcacaaccagtaggccgacctgcctggtgatcaaccaagaaacgagaaagagaccaaaggtgatgtcggtgatcagtcggaaaccaagatacttaagcatcttggctgaggagagcaagatatcggcaagatctagtaggacgagaatgacggttctgagacaaataaaggaagtaagaagttgccattagataagatttgtatgagtttataatttaaatccgccaaagaaaggaagacgtacccgatggcagtcatatttgtaagataactaccaatgaccaggccaatagtgatataatgatggctgagcatctgataatggtcctttcgccgagcctctatgtttagaatgagaagctgatggaaccagaacgcaagcctggtttaattcccatcgattgaagtgatgaatagagctaatgatgagcacaaaaacaaaaacaaagaaccagcaagagtatgcagaccagcaatacgaactgagtcaagtagtacgccttctgttcccatgtcaaggtggtttgtggataggatgtccatatggcctcgaaatctatcggaataagatgacctggcctgtaagacgaagaatttaagaacacactctgttttgacgattatgagcatacacccgagtagaatggtcagcaagcacagtgtagtgtgaaagaagaatgaacagagttggatgtaagtactcactaggccaaacggccaatatacgacataatacaacagactccagccctgttcggcaaacctgacggcctccttctttctcgtcctcatctctctctccccagccttcttcaacctgagcctatcttctgtgctgaatttgcttaattcatctgggtttagttctagagggacatccctatgaacgatccagcgctcggcaaggggtgcaaggataaacctcataaggacttctcgggttacgataaagactgcgagtgagctaacgatcacagcaatatctttaggtcctttgacataaagtggttgaactattgattgaaaagatgaatagtatcctttaaagtttgttgttgctgtcgttgagggtacggccgatgctgctgctgctgctgttgccagagcggttgcatttctggctattgttggatatgatatgtgcagaaacgggtgtgaccacgaggccagcgacatggtgaaagagagaaagagagagaaagaacaaggaatgtaagagcgagaatggccagctaggacaccgaggcagaggtatattgagaacaccaggagatgatgaaagagaaggcaaaagcttgaaaacgattcgatgtcgggcttgcgcagtaatcttggttatttgtgattgtgcgggtcgcaggcttgtgggtaacgtgaggggttacagtcgttgttacttcacttgactatgtgtgtcggtagaaggactgagactcctcttgtatgttatcgcttggtttgcagttcactggctggagaagattctctgcaaaaccacacgataataaaaacaggttggatgaggaacgtggatacggcgttcgcacaagattttcagcttgggaaatccttgtcaaggaagagtgaggtcgtccctcttatatcagggttccttgcgcataaaatatgagacgagctaatacatatgaatataataataactcaaggtcataaggagaggaaagccaagtgaagcatgaaggaatgccaaacaagatgatgatgcagagtaggagaagaggcataagcaaagagaacaagcaggacacctagtggtggtcacataagtccagagtacgtactcataatcgtaacgacgatgattatgaatgttacggattacataagctggaagtaacttgatcattacctaagctagcgtacccccatctttgattgcctctacggttccatctcttgagcctcgacacccatcatacatatcggcaaaccaacaaaacttcatctagtttctattctagcacgttgtactggaaagatggctacaaagtatgggactgtgtgcttgtgtcgtatctggcagtgtcaatcaattacattttttgttgactagggtcctggtctctcttcctttctcctatagttctgtcaaattactaggggtcacccctcctatatcgacagagccacccaaactaccagagatcaacgcgaccaaaggattgatggaagaactccgaaaacaaaaaacatttgaatcaaaggaggaaggcagacttaggttggtatttccctgtttctcctcgagagtgagctataaaaataaagatgaagacaagagaacaaagaataagtttgaagcgtgtcggacgttatatcagcttgggagtcgccctgttctcaataaagatgtccatgctgattcatgtgtatgcctgtatcctggctttccttttctttactcagagaaaaacttctgggatctatcctttccctcgtcaagcaatttgtctatcgcgcctcgatagcaaaagggctgtctgaacaagcttcacgtgaagcaggcggcaagatcttcacttttggttcctaccggtccgttcgcccttgtctctttggatcttttcatgtatcagtgctaatagatggatgggcaattgaaatgtaattgggctggaacacctaaatgcttatatgtgggtgcgaacaaatcaacaaattggatgggcggtgcgtgtgtcgataaaaatctacatacctgaaacaggctcggtgtccatggaccaggatcagatatcgattgtctgtgtgttgtaccaaaacatgtcatgcgggaggactttttcaccatctttgaaggcatgctaagaactctgccagatatgggagagatcgcggtacgcctcttgtcgtatcgtcataggacgcccagcttcctcgacgaacgatgaatataatctctgataactttgttttggtgttgcctgatagtctgtcccaaatgcatatgtgcctttgattacggcagtcatcgccggtgttgacttcgattttacctttgccagagtcatggctcctacggtacgcatatcttctattatatccggtcatacaattcaaaaaacgctgactcaaaagtcaccctcttttgcttggatctcgtcaggtcccggatgatttagatctctcagatgattccatccttcgaggcatggatgaccaaaaccagcggtcgttgaacggttcgtcgcgttctaaatgcatacgagcacacaaagatatttactcaaagaatgaaatctcaatactgttccctctgcttctgcactgtatacaggttcgagagtgacagatctgatcctccatttggttcctaatgtcgacgtctttagagacgcgctccgggccatcaagctttgggccaagcgtctgttcttctgaactctttctacaatcctggtcataatattttctgacattcatccttgggatccgtctttcatctgcgcaggccgggcaatctactcaaatgtgaacggttttctgggaggagtggcttgggcgatgttgactgctcgaatttgtcaactttatccgtccgcccaggcagcgggtatcgttggtcggttctttgcaattttttcagcttggctctggcctcagccggtgattttgaaaaagattgaaaacggaccaccgagtatgcaacttaaagtgtggaatcctttggtgcgctctctttactctgatcttgagattggttcatataaattggagaagaatcaaacttgacgtgtttccattttctgttcatcctcagatttacccgggcgatagagcgcatttgatgcctatcatcacgcccgcttacccatctatgtgttcaacccataacgtgatgcactctacaaaatccatcatgacggccgagtttcgcaaggctgcagttatcgtggataaaatcatggtcaaatcatcgaatgacccggctggaggtgattggagtgaactgtttgagaagcatgatttcttccaaagctatcggttagtctgtttctctgttttgaaccgtttccttctttgccctgtcgggtgtttcgtctatcgagactgaacggcttctccttctgtgatcgccttagatactatcttcaaataatgtcttctgcttccggattcgaaacccataagaaatggtctggtacggttgaatccaaactcagacagctggtgatgaagcttgagaatgcgggagaagctatgctcgatatcgcgcatccattcgtcaaaggattcgagcaggttgcttactgtttgaatgaggatgaagtcaggatggcagcccagggagaagccactgaagagatgaaagctagatcgaaagagtcaattgaaggaaaggaggcagagggtgctagagcaatttggacaatgacgttctatattgggttggaggtcaaaccgaaacaacgtgagtcgttcaatttccccctttgtttctctaccggacgccaggaatactcacctctgcccaacctacttccttccttttcttcaagcgggggataagaccaaacgtaaactagatatcagttatccgacaaatgatttcatgaagcaggtcaagatgatcgatacgttcgaggaggctactatgggtatcgtgatacgacatatcaaaaagtgcgtctcttttgccttcctcgtatcaagagaacttttctcgcctgttacttttttttgtcgcgttgtgtacatatggttctttcatctgacggtgattacaatcaatgcttgaccttttagtgttgatttgccagaatacgtatttgaaggttcggccaaagcgccgccaaaggtgttgaagagaattcgatcgacaaaggttcgcttactcacgagtgacatgtcatgtttttattccccattccaatcgatcgtgatggactgactaagttttgggaacccatagacgctgaaacagcgaacacgagtcttacctgctcaaggcgattctacagagtctagcgagcaacccactaaaaaacgattgttcgttcttctacctttattattcactctcttgtatccttagatctaacaacaaatcattcgcttgtacttttgatcatgcttggtttagatcatcatacgtctcggaaacatcgacgccaacagccttccaatcacaggtccaggcgatggttgacccgtcgctaccccaaccaacggcggacgcggcgtcgtcctatgcttctgctgagcagattggaacaccacctatattagcagggaccgtcactgatggcgttgccgttgatcgagctacatgattaaaccatcaattgagaaagaaaaagaaagaaaagacaagaaaaaggatttacttcccttttgaaactgataaaccctctgagaacgcacacacgattacggccaaatcggtctcgccttttgctcttggcctcgatggccagtatcgaatttatcataggtttttagatatcttggcttcatcacatcgttcatctttccttgctcttctcacgtgcacctttccatctttttcttttccttattttcttttctcccctctcttttttctctcggtgtctctctcttcttcaatgtagttataaacacgatctgaatgtctgaccgaagcgcaaacgaaagatgacaacatattcgtaaacatatataattcgatcgtcttgcaagaagaaacggacagaggtgaaattttgctatcgttactgatcgccgtccatcttgctagctctctgtactgagaagtagtggaaacacttcaaggcttgacccaacctaggccgttacccaatttcaggacgttcccttccttttccatttgtccctcgtctatgtattcgacccttccgctttcatgaatgccagcatccaaccctctacggccacccatcagccgtctgggatttatcgcgcctaacatcttcttgaacgaacggtatcgatgtctggcgagtttgtgcttcgcacaccggactaggagctcaggcgggataggtgtcctttctcgtttcgcagcgttggcatgaaccttgcgggctctggctagaaggtctttaaactgtggggctagaggggtttcaaaaatttacaaggaatggtagaaaaagtaaagaaatcaaaagatgagtcagactttgtttcaagctgattgaaagggagtgcttttctagacgcaggcagacaaaacagagggagagagagaaaacatactctgaaccattttcttcaggagtttatcgttaggatttgacttgtaatccttgaacaaggacaggacttgactcattttcgtatagactttccaccgcttatgaatgatcattgaaattgcgtgaggttgaggaaccatcctcggcatgggtactattaaagtacagaaagaacgagatgaacaattgatcaagaggataagtacggctgatagggagacatagtgaagtacaaaatgtacggacggttgaacttggtagcttgcataatctctccagttagtgttcctctggttagtgaggcgcccggaataggtcctttcgtctgttcatgattgacaaaccgcacgatcagacatgaacttgtctcttccaaaagaagagaacagcaacaagaagaggcctatgagaagaagactgaatgactagacgaacaggttttttcaactctctgacaaacatcctcatcgacctcgaccgactctgaacccataagcgtctctcgagcgtatctatatacgacaggtcttccctcctgttctgcaggtttttcaagagctgaagagtacacaaggtggatgacaaacaaacaaagaacatcaggatgtgctctggaagaacggacaagaacatataagcaacataaagctaaccatccatccttccctaagtctaagctcgactgatggacctgtagccactcttcctctggaaacctctgagcgtatgtaattccttaacgttgtgtgcttctttgtttcttggagcaagcctctgtagagcttccagagaaactctcttctgaaaactgtcttggcgtgttcagcctcttcgagcgcggtctttgaaacgaccggagcagccggtgcttcttgacgtatatgatcaatatacagataatccatagcttccgacaggggacctgggagcacggtcattaaatattttagattcggagtcacgatgggtttcacgagcggctgggccggtggctttgtaactcttggacgtaaattcttgatccatggaggtttacgtgcgcccatgttgaggttctgtctcttgttgaactagaggaaggtgaggtatgagagcatggggaatggagagggtagcagagagtttattgaacggatcatccaagggattcccccgggagggggggtagtaaccggatcatattcattgcttgacgtatgttcttttgataaaaccattcattctgtatcatcaacccatcgtctggcagtcttacccgctgatgacaaccaacacacgtacgcttgagaaggttcaagcagagatcgctggtctgcagactcgactcgaggcgctcaggctagaggctgaggctttatccggaccgagtggcctcacaaaaaaacagaccggacttccgctggaattgattgaatatgcaagtcggcatccgcgttctgtttagccgtggtgatcgttgcttggaaaagactgctaatctttgaattcttcttttcgaggaattcaatagaaacgatatggccgccagatgattctccctggtgttggtttgtcaggtaaagacgataccgcgcgctctcctgtgcgagaccctctggatatgctgactctggatgcttgatcggtttcaacaggacaacttaaactcaagaatgcgtcggtgctgatcatcggagcaggaggtttgggatgtccggctctgcaatatttggctgctgccggtgtaggttggtcccagcatctcctccgatgcgagtggggatgatatgctgaaagtcattcgacatttggttcgctctgacatccgtcaggtcatatcggtttagtcgatcatgattctgtagaatcttctaatctgcatcgtcagatacttcactctacatcgagagttggctggctcaaggtggattctgccaaggctgccgtgttggcgtgagtgatcttgtgaagaaatttctctggactctaatcatcttgtctttgggggtttccccaccaaaaggcatgaaagaactagcctgaccggtttccgttatgaatcatacagaaacaacccaaacatcgagatcaccacttatcccaccactttcaatccatccaatgcgcttgcccttctcgagccttatgctctggtgttggactgcacggatcgaccccagacgaggtacttgatctctgacgcatgtgtgctggcgaagaagcctctgttgtcgggcgctgcgttgggtatgaacggccagatggcagtgtacaacaacggaccggacagtccgtgctatcgatgtgtctggcccagggtggctggtggggaggcaaagtcggcaacttgtgacgagtctggtgtgttgggggcggtgacgggtgtgataggtacgatgatggctctggagggatgtaagttgattcttggactaggaggtgagggtttctttctttttcttttttctttttctttctttctttccgatcgttttttttagcatctgtgtgtactgacgttttgagatcatcccggtgattgcctgctgcttctcctccttgttcttttcctctgttgggctctcttttaatttaaaaaaaaaaagaatcatcatcatcaccctcatcggacccttcgaaacttctcacgttctccgcgctttcatccaccccgttccgatctttcaaacttcgaaaccgacagcctcactgtcggtcctgcggcgatccgtccaagggggatcgaaaggaaggaaagatcggagatttagaaaacgaggactacgaggcattctgtggcggaccggatgtcgatagagatgccgagggcatgcagtatgggtcggttggaaccgggctgaagaggacttctgtcgtcgtaagtttcctccgttcctcagtttcgtcttctcttctccctctccgaaaggagggaagagagagagagaagagaaaagattcactcgggaggttcccttggaaaactcacgttggacccggatgtgggcttgagggtgaacaggaactgaaagcagctctgcaagacaagacccgttcgcttcgtctgatcgacacgcgttcgcctgaagaatactctattgtgtctgttcccggatcgatcagtatgtgctccgtccgtgatttcgttcatcttgttcagcttttgactttgccttttcttgcctttttttttcttgtttccttttgatctcttttgctgacacgtatgatagacatccctctgaaggatttcatggcggcccctctggtccacataaagtcgtcctctctgcctaacggtcaggccggaagcacgccgaggagcacacgctcgatttaccttatctgcaggagaggaaacgacagccagcttgctgcccgggcgctttccgacgcgttaactctgtctgaggcatccaaccctggcggacccgggcacgcggacggtcagctcgaggtgctcgatgtcagaggagggacgaacgcttggggcaggatggtatctcgcaggaatgagggtgaaagcgaagaagaaggcaaagaccgggtcgattggccagagtattaaagataaacagaatacaaagaaagcgatgatcgatgggcgtttatataacggtatgaagacgacgagcgtcggtttgatctcttggatggctgtagttaacaggtctatgtttgatgaggaggagaggcaagcggacgaatacgggaaaggaagaagaagagccacaaaaagtgcaagacagacagacagagaaagaaagaaagagaaaccaggtccctggtttcttagtcgatcggttcgagttccctcttgacgatcgtctccaaccgggtttgaaactgttggatgtactccctgtcgaccacaccatcctcccatccgacggcgatctccactccacccaaatcctcgcacccgacgaccgagagaaccaacgcggcgcttatcgggaggggtgcctgtgtaaagacaagtcttgaaggttcccatcgggcttgctccgtgtttgtgcttgcgctctcggccgggaccgaagttgaggcgagagaacccagcgcgagtcgaacggaaccgaggttcgacagttcgagactgtgttctctcggttcttccgtctttgcctttagaaacgagaccatccctgtaggcggcggggccgacgaggtcggcgccggctgttttggcccagagaccagggagagcagcccccaatcggatatcgcatcatcccaaacggcccggtctttcgaccacttgttgaacttgaccgctctctcccaaaggtccgagctcctctcggccggaccggattgtgacggtgtatcaccgggggagggaacgtcgtacgtgatcccagcgacgtacgcccctccgagtccaggggacgtcggagaaaggatcggtcggagattgacaggcagcatagtcctcagcggtcttctttccgggtcgagcgtctgaatcgcttcggtcaaagcggcgtgtaggaacgcggtgagtgtcacgcctcgttttctcgaccgacagacgatcgaccggacggtgtctggagagagggtgatcgtcctgacgtgtttctttcggggatgaggttggcctgatgatcggtcgcccgtccagatggacggctggtctacagggcggtaaccgagtctagagagaatgcccagaggggaaggaaggagtggcctgaggatctgttggagtacgatccgggcaatcttccctacggacggtttcgtagagatcagtgattccaagctggggggcaagcagggatggttgttgttgttgttgtcgtcgtcgtggccgctggatggatacactgtctggccggatggtcggagggtgagggtggaaagcgattgggagaacgaatgggcgacggtccaagcggatagcccgtcgaacagggaatggtgtcctttgaacccgaccaccactttcgtcccgtcctcggcctttccggtcatcggagtcagtcttgtccaaatgattctccacggagggatgacggtggattcgatctgtaggtcgacagtcatcatccttactagcgcgctgtcaaagctgtcctgctcaggggtatcggaccccgattccgccacctgaacgacgacgtcctcgagggagatctttttcagtcggctcagcccgggggacagggtgtggatgtctgtgaaccgggcgaagagcacagggtgggtctcgacgagggtctgtgtggctgattgaaggttggataggatggattgtgaggagaggacagaaggatgagagaatgtgaatgcgatgataggagccggttcggacgagatgagggatctgctccgggtgttttggggggggagagattgagagaggtgtcctttcggagagagctgaagaagaaagagatcctctcttacctggacaagctgtatctctcacagagccccagctttcgttcctcgatggacgtcattctgatctatctggagagcagcagtatgtcagaacagaggaggagagagagaggaagatggggaaaagatgggatgagagatgaaagaagcaagatgcaagaagcaagtgactattgatgacgaacgactaggccgcggagatgtttatcgagaaagaaagaaagaaagaaagaaagaagaaaagatagagagatcatcctatacaatcccacccaccaacacttggttcggtctttcctcttccttcttgcgtctcccttccttctcgttctcggcctttatctgtgttgtgtatagagagaatagagtgaccagatgaggctacctttcttcctgaacgggttcatcccgtttttactcttggcgacgtctgttctagccgccggcgactattacaatgagcttggaggttcgtccgtcttttcttttggctttctgtctggctcggaagggagcaggaagcagggagactgacggaacggtatgtttggttgatcgggcaacttctagtggataggcaggcaagcgagggaacgatcaaaaaggcctacagaaagctggccaaacggtttcatccggacaagaacaaggatccaaagagccagcaaaggtttgctgacgtgtctcatggtgggtgtctttgggttttatgttctgcctggggcggctttatatatagagagagagggagggaaaagagggctcacttgtattccgaactgtggtctcttgttggtggggatgtcgatctgatcccaatctagcctacgaagtactgatggactctgaggtaaggttatctgagcaagacaatggaggaagagaaaggagggaaagaatgctgaagcacgatgttctttgggaacacgtctacagaaacgagagatctacgatagatacggcgaggaaggactgaaacaacgacagaacggccagggtggtttccggaaccctcgggatatgttctctagctttttcggcggggccggcggtaagtttcggactcttgctcttttcattgctggctgggataggtgtggctgtgggtgtgaaagagagtgcgtgcttatcatgtgcatgttgtccgtcaaactggtttccctatcaggaggacaagaggagagaagagggccgggcaagttgacagagatcgaggttgacctggctgatttctacaacggccgagagattgaggtttgtgttcttttggtctgagagagagagtgtgtgcgtgtgtgtgcgtgcgtgcatacatgtatagtgaatgtttaactgattgccttttacatttagttcgagatggacaggatggtgctctgtgatcactgtcggggaagtggggcggcgacggacggagatatcgtcaaatgcacgggctgtgggggtcaaggagtgaaactccaacgggcccagatctttccagggatgtgagtggtgaacggtcgagagagaatagtcaagcgaggcgcttgacggcgtagtttactcatccgctaactttgtgcgcgtgttgtttatctcttgttctactgccacccccgctctcttaggtactctcagatgcaggtgacctgtaacgattgcggtgggaagggtacccggatcaagcgagcctgcccacactgtcggtctgcccggacggtggcaagtcgggtgcgactgtccgtgtatctgccaccgggcgcgcctgaagggttcgaggtcttgtttgacggggagtctgacgagagtccggactgggagccgggggatgtgttggtgagggtgaaggccaagcagtctgacggtcagggtggttggacgaggaaccaggctggacttgtttggagggaagagatcggtgtggatgaggtgagtgtgtgtgtgtgtgtgtgagagagagagagagagggcgtgtgtgattgtgcgcgctaaccatctagtgtgtgtttaatttattccacacaaaaacaggctctactggggttcaatcgaacggtgttccatctggatggacattcggtggatgtgagtcgatctggggtgactcagcctgggttcgtccgggtgattccttcggagggtatgccggcatatgatgggccggcgggtgatctgtatgtgcattacactgttgttcttccccgggcgctttcgtctggtcttcgtcagggtgagtctcgcgaggatttttctttttcttttctttcatgtgtgtgtgtgtctgtgtgggcgggtggactgtttgattagtgagtagagtgttgctttattgacacgcacacacacgttgtgtatgctttttctcgtgctctctctctctctctc

SEQ ID NO: 2127 - DNA, 729 bp, Xanthophyllomyces dendrorhous
ggggggggggcggttgactggttacgcgggttgagtggatgggttgttgggcacgtgatagaacgggggaatgtgtaacgaatgtataacgtggaatgtagaacgtgggaacgtagaacctagaatgggaaacttgtgcctgattacgttagctgtgtatgaaacttgccaacccaatctcttggcgtcctgcgttctcttggcgtcggctctttctttttatagacctgtgggacgcgggggagccagagcacggacaacgcgcacacagagagggacactgacaggctgacggtgtgacagacgacacttggctctgatggcgtcgtgctgtcttggctttgtgcgcgggggggtaagcgtggggcgtaagggtgaagcgagggcgagaaggcctggggcgagaaggctctgctcgagacaacaccctgcaccagggcaccagggcaacaagcaaggaacatcccaagcggaagaggcccaagcgagaagaaagggaagaagaagaaaaaaaggtcctgtttgtttctttttcagtgtgcctgtctgtggttgctggctctgtgtgagagggcgtgggtgggcgctcgtcctgtgttctctgtatgggtgtgtgggtgcgtgggtgtgtgcgtgtgttgtctgtgcacactctctctgtgctctgtgctctgtgctctcctctgccccctctcctagtgcctctcttccccctctcctagtgcctct

SEQ ID NO: 2128 - DNA, 1320 bp, Xanthophyllomyces dendrorhous
ttcctactactactgctactgctaatactaccaccaccagcaccttaccgatgaacaacatcctctggctcacaaccctggcagccgcctcggccgtcctcccacaggcaagcgctcactccagcccacggaacatcgtcaaccgtcaagcgatcaccaccaccagcaccaccatcgccaccagtgtggcagccgccccgacggtcatgccctcggaggttcccccgttgagctcgttgacggccagcatgtcaaccatcaccgtcgcgtttgccacgccgacggctggtgcccaaccgtctctgagcggtgcacctcctcttcctacctgtcggtctttctctttgtctctcttttgcttttttgcttgttttgctgctttccttctcctttaccttctccttctcctccgtctcttcctcctccttcatctctttcctttcccctgccccaacctctccgcgcttcacgctgccataactgacaacccaaacgatcacatcaaaacagggtcctacaccgccggcgcctatcccgcacagttcgtgaccgtcatcatcatcatcatccgccaagcgcacaaaagtgcctttaccttgtgtgatctcacacgcgctcaccatctttgtctctctctttcctttctgcttttctcttctcttgttctttgaaaaaataatataaaaaaccaccccacagggacaagatccctcctaccaactcgtacgtcgactcgaaacgttctctctctctctctctctctctctctctctctctctctttttctttcttcccttctcttcccttctcttcccctacccaaatcctccgtgctcgtcaaacccagtcaataacctcgcgcacttgctttcttctctcccgcacccccttgtccctctctgcccttgcacccccactcacaccagctcccaggtacagggttggatcaacgctatcgactggacaaaggtcagtcgcaacccatcatcactccgcatcacccctctcctcaagctaactccaacttccaactccctgtccctcacaggtccccagctacgccgccaactcgcccgccaccactggctctctctgcgacaccaacaccgctgccgctgcagatgcctctcgatggtaagagcgcgcgcacttctcttctacctctcttccatctctctctcgtttccctcttgactgactcatccggcgatcctcccatttcgtctcgcctctcttctcttagctgggttcgttctttctttttcctcgtcctctcttcttcttcttcctcgactcgactcgttacacaaacttacacgc

SEQ ID NO: 2129 - DNA, 3560 bp, Xanthophyllomyces dendrorhous
tggagttgcggtcagtgcaccacgagcaccgatatcgtcgactgttcccaagacgacacctggggtctcacctttgatgacggtcagttttccttttacctctcaacactaaccaaagcaagccatgacatgccaaactaaaccaacaccctctcccactcccatccacaggaccttccgacatgagccccggactgatcgattatctcgacggaaagaacctcaaggcaaccttctttgtcatcggatccagggcattgggccgaccggacgtcctccgatacgagcacatgcaaggacacgagtaagtctcgggccctcagaattatgccctcgcttcagctcgctcatcctttgtcctctcttcttcccctacgcaaactctcttttttttctttttctttttcttttttttcccctctccagaatcgctggacacacctggtcccacatgccgttgaccacgttgacgaacgaggagatcgttgccgagctcggttagtcccttttcttgctctccctttctcttcttctccctccttccccagcgcacatgctccgccccacgccacagctatccttccagtccaaacgtactcatcccccctcgtcctcttgcgcaaaccgcaaacccaccaccgccacaaaaggatggaccaagcagctcatcaaggacatcatcggagtcgagaccctcaccttccgacctccccagggagatatggataaccgagtccgagcgatcgccagtcagatgaacctgaccccggtcatgtggaccggcgtcggctccaacggaggcgatctcttcgacacccaggactttgaggtcgccgccggactcatcaactcgacccaggcgttctcccagtggaccaccttccttgacaccaacatccccaagatcgaaaagggcttcctcaccctcgagcacgatctccacgcggtgacggtcaacctggcggtgtactactaccttcccgaggccatgaaccgaacgaacccgacgttgagcctcaaaaccgtcatggaatgcaacggaaggtccatcggcgaggcctacaaggagaccgcccagaacatcaccacctcggccgtcgcctctagctccgcctccgcttcggctgcttctgtctcggcctcgacttctgcctctgccgtctctggatcttccaccagatcgaccgccccgtctgcctctgcctcagcttcgtccggcccggtttccggtgccatctggggaacctccgtgtcggccggcttggtcggcgccgtcgttgccctggtcggaaccaccgctctcgttctttaaacctagtttgatcggttcaaggtgttggtcttaattttccttttctttttttttttcttttctttttttttcttctctttttctcgttatctttatatcatcatcattacctcccttactcttgcttttcccttgctctcatagctcgagtcactcttcacttttttcgccctgactccctatccttccctccttggacgatatcttttcgcaattctcttttcgttgccttcttacatcataccccctctcacactctttttttttcgcttctccttcgttcaatgcgcacaagcaagctcccttcctttagtttggctctcatcccatcaaccgaacgtatcctcgaacccggactattttttttttaatttgatttccatcttattccatatatccaatgtctcgatgctcaacaaagaggacgttcgctcaacaagcaggcaccgtctgtctcttttcttttcttttcttttcttttcttttcttttcttttcttttcttttcttttcttttctttttttctgtcgttcgattttctggcaatccatagggacaggtttccctatatttcttgatcctcgaacgtattcatccaaacccctctctttcctttcctttctttttctttttctttttctttttcttcttcttcgcctcgcacgagacgaaagatacaaagcaacccatccatcggtcgcgacgaacgcgcacagtcacaatcacacgcacagagggacacacagacacaaggcggaaacagagcgcgcgcgcgcgcggggggggacaagagagaaacgctaggggaaatacatcggtcggatcgagtcgtacactctttcgtccttttctgaaaacacgcagaacacgactttcttgatctttggtcgtgcgcgcgtgggtaggtaggttttgtcagtaggcgagagatggttataacgaaaacgaaaacgaaaacgaaaacgaaaatgaaaatgaaaacgagggacaaaccgaaggcgagggtttggattctaggaaatcccgtacggctttgaaagcgacgtgcgtcgctggttcgatcgggtctttttttttcgttttgtttttttttttcgttttcgtttggtttattcagatcagatcagatcaggaccatagacagatagaaagaagagccgtgttagtccccggtggatgggggaaagatctagacggacagcaaggtcaaatcaagagaagagtggacttgcagccgtctgtgatgatcatgatcgtccgtttggtccaggtcaaggttttttttgttttttttttgtttttttgttttaaaaaagaaaaaaacgtaaagatatcagcttctcaaaaagtagctctcactcacaaccacatgctcacacaaaccaatcaaaacatggcgaatgaacaaggaaaagaattccaagacgtacaaacaccagtggagatcgaacaaaacccaatgctgccccatccttcccgttcggcctcggtcagacagttcacatagcagtttctcagcagtctctctgcttccgccggcgagtaggacgtatacaccgggccgggagtatgtgcgatccgtttactcggcaactttttttttttttttgggccccgaggacaaggtcgtgttttcattctgtcagcctctatctattccctggttgtgatcgattggacgaaatgagaaagaagaaagaagaaaccacaaacgttgtacccatcggtcatcttgcattctcccgtctgacagcctcccagagacctgcattccttcaagagctcaggaccggccgcccggtggatcgcaccgtccacgccacctcctcccaagagagatctgtttgctgcgttgaccttgggttttggttatggttttggttggatccccccctccgggaacacgattctcaacacacacacacaagtcagaacaaggtatatatctcttcggtccggaaaaaaaaagacgacactcctcgcagcgaccagaccagagcgtcacataaaaggagacaagagggaaagaatgaagaacgaacgatgacatcgaccgaaagtttggttatatcgcccttgaaaacagagatcaacgcgccagacatctcgttactcgtgtgctttcttttgtttatttctttgctttctttgcttgttcgtttgttcttttggtagacgggcttctgtctgtattttcgatgggaaactttgcgaaacagtggggaacaaaaagagagagagagagaga

SEQ ID NO: 2130 - DNA, 109679 bp, Xanthophyllomyces dendrorhous
tcgttttgtttcctacaaaatatttcggacaatcagacagcagagagaatgtggaaccctccggacgtcgctctttctgtagaagcgatggcgagaacctataggggtggtttccgtcattaaacatggtcaaaagagatgtcacaaccctttcaccaaaagaaaagaagaagaagaaaaaagcgcaagagacaaaagacagaggcttaagaaaagaaagagactcacgtcgtgtttgggagaccaggcaagagcgttggtgacgccgcccgtaggaatctttgccaacaaggatctttctgtcgttccaaactattctcgcgatccagaggaaaggagatgaacagaacagagtgtagactgcatcagccgaatagaccttgtgtttaggggggaggagggggtttcaatgaatcggaataaggaaagcatgactaacgatatagaccacgctctcctcgccacccgctgctagcatctctccgtcttgggagaacgagagttgtctgacttcgcctctgcagacgacgtacaatgaagaaaagaaagaatcatcaagtcaaagaacgagatcagagatcgagaaaaaagaaggggaaagaaaaaaagaaaaagaaagaaaaaaaaaacatcaggaagacacgtactgaacatcgccgaaactcttgaggccgacataatcatcggcatcccacagatttacaatcgcatccacccccgctgtggctaaatatcggccggtcttttcgatcccgatcgagtcgcaacttcccgtttgtgctttccattcgtacgtcggcgccttggctgattcactctcggaagagagtaacgaggcccacgaacgcacatacaccttacctcctcgggagcaaagaagaaaatcttgacccgatgatgaaaagccaatatcaaagatctgaacattacatggcgtggttttttttttttaagtcttgagcaagcctttcatagtaagaggtaacagaccgaaagacaaagagacccacgatttcgatagcagctccggcgctaggagcagggaacgttctgtccgtactagactcccagctgggtctctggacgaccggctgaggaggaggaggaggagcaacctcgacggaactcgaattcgggttcaacgtcgccaccggtttctgactgcccatcatccttcgttcgaaaaaggaaacgtgttccttgatgtcgctcactgcgagcacgtcgcccgaggggtgatgatctatttgaaacgccggggtgggtagactgatagtagaaagcggcttgatcggcttgagtcgggcgtcaaagaagcacagtttgccatcgcccgtgctgccagaggagacaagctcggtaaggtggtaaggattccattgtactttacttatcggcgcggtcgatgcgtgcggggaagggatcaagtcagagtgcctagggtccagctatgtgtttttggagacaaaagttaggagtgaacagcgtgagaaagcgacggcccagaggaaacgcacataaagacgaacaccagcatagaactcacttacggtagaaccagacgaaccagcgtcccaaattctgagacctcgatcaccacccgtgctactcgacaccaactttcgtccgtccaagctccacgacacacactggaccggctcccggtggccgcccaaaatcggtttcggtttaggccatgaagatggatccggtgtctttagtgacgtgtagagaccatccaacagcttcagtcaaaacgaaacagacgcgtcggagggagagtagaaaggctcgaaacaagactgaccttgagtcctctggattgatacgtatgtgataacgggctcggttgaacaactgaaaggggtataggagcaggcggcgggatctgagctggactggctgatagattgttcatggtctggaaaagacaaggagagtgagggatagaatggaagaagcaatgtctggatggatggatgagctcaagagcttgatatgctgtagttagggttatacgcgcttcaatccgaatctcacaggcttactcctgagctcgttctcaccatgctgtggcatcgctcaaccatgcacataggactcacaagatgatactggagattggcttgagtgcactagatctagagagacgtccgtgtgtcagaaaaaggacggacgttcgtaaagttggctcggtgtgacggtactgaagacctagatacgatgattgatcgcttgctgatctatatcagaaaacaaagacgcaagaacagatagagatgcaagattgagctagatctctttgtagaaatgttcagcatggatgttcttaaactctcaacctactagtgacaggcgtgggttgagcagtatacgaggggatcatgagcgatgtcgctgccgaaggcgatcaaacccggccgggccgaaagtgacatctctctcccactcactcccactcccgcatcatggaagtccagccggaaacccaagctgaatccgatctcgttagcatccaagaagagctcgaacagattccgggtctggtcgagctcctcaaggaccaagcaagagcaaagaacatcttggatccagaaggtctcttcgtctcggttagtgaagctgtttctctttcgttctctccctttccctcttcttaagatctaacatagggttcatggtttcttcatatttgctttctctcatctgttcgatcactgtacatgtagaaactatcgcatgactatctagaacggatctcaaagtgagctagctttgtacaactcctcattcttcctgatgagcctcttccgaacggaaacagacacgtccatcttacccgaactccttttgaattattccttccgtgatttcttcctagtctctcccttgaatccctccattcggaaccatcactaatcaaggaagaatcatcattcgtctctggggagcttacttctctctgttttcgagagtatcgcaccttccttactgttcaccaatgctcgtcagacgtatcgaccgcgttcacctccttcacctcctcacttgactcccttctcgacctcgttccctcactagaggcagaatgccacgcctttgctacctcgaccaaggctactcaagccgaacgtcgcaaggctggcttcgttctcgagcatcacgataagcttcaggatctgctagagattccgccgctgttagacacctgcgtccggaatggatactatcacgaagcctttcaactcggagatcactccaaatcgatggtcgaccggtacggagacatcccgatcgtacttgatgtcggcagagaggtcgaaaaggggctgctcgtcatgacagtacagctgatgggcctgctgagggagcctatcaagctacccgcgttgatcaagtctgttgggtttctcaagcgaatggatgtcctttcagaagatgaacttcagatggcattcctcgccagcagggagagcaactttcgttctcaactcgttggtattgaaagggagagagcggatccggtcagatatgtcagacgatacatcgatttattcagagagaatgtgtacgacatcatttctcatttcactaccatctttctcgaccctcgacctccctcctcttcaaccactactaccgccgccgcttcttcgccatcatctgcctcttcagcacccttctctgaaccaccgagcgttctctttgcgttctctcaacaatcccttgccgatttgttcgccgtactaaacaaatatattccctcggtcgaagattccgctgcgctctcctcgttgctcacccaactcacctactgcgctacgtcgtttgcccgaatcggactcgatttccggtctctcatctgtcaaccgtttgaacgggccgtgttagcgaacgcagagaaaacgctcgcacaggcagaactcggtctagagaacgtcatcagagattcgttgaaagcaagtagatcgcctacaggatggatggtctcgatggagaatcttcccaaagtattggatctctcttcagcctggtcgtcatcatcatccactctatccactagccataacattccaaccacaggctcgatccattctccgccgaactacctcgcttacttcccctcccttgccatactctgtaatgcacacatcaacgctctgaactctctccggttctttgctcccctctctcaattcgaagccttggtcaaaattcaagcaaaatcactcgacagatcggcagaacttataaaagagtactccgagacggcattgtctgatgtcgggatcacttcatcatcctcggctctttcacccacttctcattcgtcaacaccattgccatcatcattatcctcaacgacatcaccaacgataggaacccgtaaccatagaagaaaccccagtgtttcagccgctccgtcagagaaagaacaagtccagataaagaaacttctgagagcgtatggcagagctttcgttgatggtctcggacccttcttacaggtcgggctgatcgaaggtttattcggaggagaaatgggttccaccaaggacgctctcggaagatgggatcttctcaaggggggatcagaagagagagacgggcaggcagggctaagagtttggatagaaagactggagatcgagttgaatccgaaaaagacggaggatgatcgacatcaatcacaggagcaaaagaataaaacggaggagcttgaaaggaagacttcgacggttgatgtaccagctgcgttgacagaggagcctgaagatgtagcagctcaagaggaggaggaagaacccagaataagtgttgagaagagcaaggagagcagggcggatgtaggtgatgaagatatagatcaagaaatccagagattggaaagcaagaatgaagcggtctaggaaggattccttgtttcgtttcgttattgatcattgatgaatttttccctttcgatgttctcctcttctcttctttattcttatcttctcctatgctctcatcttaaggagatatgtgtgggcggatgtgtctccaagcaaaacaggacaaacatgtccacgggaatcaattgagacaaacgacaccactccatacgttcgcggcaaatttagagttgtagacagaatagacatgacggaaatagaacgaagaagagagcacatagatggtcgattaggtagatggaacgtgaggtcaagcagaagggatatttaaacggagatcgtctgttttgcgaggtgaaacaaaaaaaaagcaagacattaaatcagtccttccgatccccctttaccaatgtgttagaggaagagagtgtgacaacgatagaatacttaccttccagcagttgaatccaccacttcctgtgctgactaccgctccggggacctggggcaagaaagcaacctctttgcaatcctcctgatgatgctcaaacaataactgagctggcacgtccaatccatcctccgtcttctggccttcttcatcttcatcttgttcaacagataaatcccacaaagtgacggttccctcggcggcagcggcagcaaaggtggaagtctccgtaggatgccatgcgacagaggttatcggcgaagtgtgccagttgaaagaagctacagggcttggggtgggaccagatgctctgcgacaagatccaccagtaaacaagtcaagaaagaagttagaacaaaagaagacaaacatctgacgagagacgagacaaaccctttgaagtttctgagatcccagactttaagtcctccttcatcaccaccactaaccagaaggtaactggttcccttattccaactaataacgttcacatcactctcgtgagcctcgtccaacccgacgacagatcttctgcccttctgtctgacgtcccaaactcgaatagacctatcagccgagcaactagcaaacacagttcgttctgtaggtgaccattgaagatcttcaacagaagacgtgtgggaagtgaaagcctggttggaagtggtgaaaccggattggttggaggtagtgagataaatcttggaatggatatcacccgtcaacagacgaagtccttcggactctcctccagcccaatcaagtgcgaatccttcagctcgaccgtggttgttgatagtgtaaaccggtttgtcgactacagatcgatccataacatatccaggaacgtccagggattcgattagaggtcgaatatcccagatgtggactttaccggtctcggaccaggaagcggtgtggtaaggaacgttgacgggcgggagcgcagaggtggacgcgataggctgggctcggactcggttgacagttccgacgtgcgggatcgatcggtactcaaggtaggcgtcgtcgtcaacgtccgaatctgcctcagaccctgcatcagagagatctgatatttttgagcagggatgagaacacgttgaaaagaagcttgagtatactttctctcttcttctcacaaaagacacgagatacagaggaagacgaaagaaagaacctaccgtcatcaaactgagttcggtgcatgcctcccatcttcataaccaagagctcattcgagttctccgactcagcctgggttcctatatgtacacgaaaaattgaattgaatgtgttaagcaaatacctctaacgagttcgcgtgtggacttaattgcgaaagcaaacttaccagtaaccacatacgccgtatggggaaactttcttcgctcatctccaagagaatcctaggtaatccgaaaggatgtaaaaacaatatcagatcagcttaaaagtttggtagatgatggtgctagaacggccatccatttttcgagcataaaatacacaaaggacattgaagaacgaaccctcaacacatcaaaacttaagcaaggccactggacgttcattcggtgaagcatctcatacacgctttgatcaggctcaaggacctcatccttctcaagcggtctggatgatcgaagataagtctcaagttcaggctcgacaggatcctcatcctcgaccgcctggtcgacgtgcatggctggatgagagcgcggagagaagtcgatatagggttgagcatgcggatgagaatgaaccaagcagaataaatagaacaaatacacgtactctctccattttcagactcgtcagattcggactcatcgtccctgataatctcttcggcactctcctcaccatcatcaaagttgtcctcgaactctcccatttcatcctcctcgttagttccatcctctccagttgatcgaacaggagcagaaccttcccctaaggctactgatttgttggtttgctcggagattggcccgggggacgaacgcctcttgtttgctttgaccatttgagcgtgatatatcgattgactagagcttgtacagagaacaaaaggcagaggcataagagtcgaacgcgaggggtcaaccaaaatttggacttatgtgagctcagtgaacatcaaaggtgactaacccctcaaattcaaattaaatttcatgaatatttcaaaattatatattttacaaaaaaaaaaaagaatgaaaaaacgaaaaaaaagaaaagaaggatggaaaagggaagctttcttgcctctcgaccatcacctataacacacacgatgtctaccgaacccttacggtgaggcttcgggtttcatcactcgagcttgtcctctgatagggacatattcgctgatttgtttcgacttgaattctacatgcgctttgggcttggttctccgttcaatatcggctctttcgaacttgcttcttttcttcctctgatcccctctcttctccttacagaatactgctcctaggtgctggaggaagagagcacgccctggcttggaagtttgctcagtcagcctctgttgaaaaggtctttgttgcccccggaaacggaggaactgcctcggccgactccaagattgagaacgttcaggtcgcgtacggccagaactttgatggtatcctggcctgggctaaatccaacaacgtaggaacctctttcttgtcatcctttttctccccactgagccagttagactgtcaatagggtgctctgttaacgaatcaatcgcatctgtgatacccatccaatgttatcacccaaaactgatatcatcagatcaacctctgcgtccccggccctgagcaacctcttgtggatggtgtcgaggccgtgttccgaaagggtaaagttccggccacgaatatttatacatgtctgacaaagagctatgcctgactgaccatctcatctgcttgttggttgattcagccggtatccccactttcggtcctactcccgctgccgctcagatggaaggctccaaggcattctctaaaaatttcatggccaaacataacattcctaccgccgcctaccgaaacttcaaggccaaccaattcgaggaggctaaggcctacgccaagtcctgcgagggtcgattggtcctcaaggctgacggacttgccgctggcaagggtgttctcatcccggagacttgggaggaggtggagcaaggtttgaaggacgtcatggtcaaccaggtcttcggatctgccggtacgttttttttgttgttcttccattcgttctagtcgcaagaattaaacctaaacatacatctcgtccgcttgtagggtctgagatcgtcatcgaggaattccttactggaccagaactttctgtgctcgccttctcggatggatacactattcgagcgctccccggagctcaggaccacaagcgaatcggagatggtgatcagggacccaacactggtggaatgggagcttacactcctgctcccgttgctactcctgctatcctcgctgagattcagacaattttggagcagactgttactggcatgcgaaaggacggtttgtccttctatctcttgctattgtttacggtcaaaaacatctacgtttgtcttatacgttaagctcattcggtgatctctttctatctaattgcgcatcttcaatgttcaggtttccccttcgttggtttgctcttcaccggtttcatgcttactcccaagggtgtcaaggtgcttgagtacaacgtccgattcggtgaccccgagaccgaggctcttatgcttcttttggacgagaagactgacttggccgagatcatgaacgcctgcgtggaacgacggttggactctgtcgagctcagctacaggactggatacgctgtgtctgtgatccttgcctccggaggttaccctggcaagtacacaaccggcattcctatcactgttggcacccttccttccgacgtgtacgctttccacgctggaaccgctatcaaagacggccaagtggttaccgccggtggtcgagtgattgccgtggccgcatttgctaccactctcagagaggccgtcgaccgagcttacgagggagtcaagcaaatctcttttgagggtatggttttcaggaaagatatcgcctaccggttagttcagtctactctccaacagattatgtcatacccagatctgagacttatccttcttatctcttctgtatgcagagcttttgccgacgccgacaagagcgcggataaggagcgacttacttacgcctccgccggtgtggacgttgatgctggaaacgccctggtcgaggctatcaagcctgccgtcaaggccactcgacgggctggaacggacggagtaattggtggattcggaggaaccttcgacctcaagcaggctggattccgagatcctgttttggttagcggaactgacggagttggaactaagctcaaggttgctttggactgtggcaagcatgatactgttggtaagtaatcttattctgaactatagagagtgaagctatactgctcatacagttatacaagtctaacaactctttactctatgggacctcttcttaggaatcgatcttgtcgccatgtcagtgaacgatttgatcgttcagggagctgagccgttgtacttcttggactactttgcgtgcagcaagctcgatgtcgagatcgccgctagcgtcgtcaagggtattgccgctggatgtcttgatgctggctgtgcgttgattggcggagagacggccgaaatgcctggcatgtaccacggaggttcgtttgcattatctactgtttcaaatcaatcgctgcatggtccgattctaaccctttctatccttgacaactcgggcgttctcttctatagaggactacgatttggctggtttcgccgtcggagctgttgagcgaaacttgattctccctacccctgacattcagcctggagatgtcatccttggacttccctcgtccggtatccactccaatggattctctctcgcccgaaaggtcctcgcccactctggcctctcctacacctctccttgcccttggtcgccgtcgcagacgatcggtgacgctttccttgttccaaccaaaatctacatcaagcctctcttgcctgctatccagcagagtctccttaagggaatgtctcacattactggtggaggattcactgagaacatccctcgagtgttgcccaagggaaccggatgtgatatcgatgctgcttcctgggagtggccggcgatcttcagatggatggccgaggttggtcacattgagcccctggagatggccaggacgttcaacaacggaattggaatggccatcatcgtcgccaaagaaaaggtcgacgaggctattaagagcatacagcaggctggtgaggcagaggtcaagatcatcggtgttgtgactgacaaggagggtgttgccatgaagaacctcgaagcttgggcttagtttagaagaaaccaaaaccaattttgttcttcgtctctcttctacataattttttgattcattttggctttttatcttgtacctgggcatcgttcatattcttatcttcttatttgaacttcatatttttcaaggtttattcaacgaacctatacaatcttcttttaccctagattctgatttctcgaggaagaaatatttcatcatggttcttttcttcctgataacagccagagacagatcttatctggcgcacagctttatcacgaggtctgagcgcaagagacctgcgaggatcactgatatcattgacaacgaagacaactctgatcaaacatactttaatgaccatgaaaataaagcaaaagctaccacgacgacttattcctccaccatctcgtcgtcatcatccatttctgagagagcagctgaaggtccaaccttgaacgtttcgctccacttaggatacgttcgtttgtacagagacatgcagactgtatcctgaggattgaggatcgcgtcgaagtgggctttgtagtacccgtgtgtaccaagggattcagtgatatgacccgttctgcccatctttgtgtgcatctggataggtttgaagtaagcgacatcgtctgttcatagcgaggggcaccaaggaaacgaagttgtgtcagtcaatgaatatataatgagcaagaagaggtcaagagaagagagggcgaaccagggttgaagaacatgtatcgaatcgttgctgtcttcttgtggatcttgactgggtgaccggtaagaataattcgcttagcgataattctagtagtgtcagcgttcataaaggatcctgaagcaaccaagataggagctgtaaaattgaagaggaggttagtaaactcaattactgattacgttgtcatagatcgaggctagctgctccttaccttgagagtcgtcagtctctcttaaaagcaaacaaggctgctttccaaacacgataggtccatacgtcgtggcgaccatagctgtaccagctctcaagaaccgttcagacttgtggacattgttcgctccctttcctcctccacgaacatgttgagaatagatcggattaatccggtatcgacggggcccaacacagaggataagaggatcctttgctcgaacaggttcatcgtactctgtgtttcgctgcacgacgaaatgcagaacagactgcttgtgctcatgctccaagagggagaaaagaatgaacggcacagacgaccgatgggcatcgaagactgctttgggaacgtctttgatgtggacttcgacgtggcttccgacctttaagaaggaagcgaagaaaaaaacatcaatatctgtaaacccttcggatctgtaggacggctctgaaagaaaagctgaatgcagacgaacctcaactccaacctcttttccttctttgatgactctcttgcctgtgcgctcgtaatccttgaatccgaagatcttagcgtaatcgaccggcaggttctcatacgggtcccaagggctcgttcggaaacttctcagacctctgtaccgttggaaccgagtcgaagccggaatatgcattggggtatcgatctcgtccgggaaggcttggtcatttcgatcctcgacagctcgagaggcccggtaggatttgagtctgagtgacaatcacgaagatatcagaattaggagtttggtagggaaggttaaggtaaccagggtgtcgaaagagaagagaaggagacgagagaacatactgggcttcctcctcatcctcatccaattccctgaatgcaacgctcgttccacccattctgctttcaacctccacatcgacaccttcttctccatccaatccatccagtcctcctccttggatatcctctccctcgctccctccgtcaatctccatatcatcatcatcatcatcgtcatcatcactgtcatcgccctcttgctcgtcaccctcctcgatccaagcagcttggtaggcgctcgttcccttcggaactctcttgactgtcttgggtgtcgtacccggcagagccggaggcaacatcaaccctcgctcaccattctcgccagagacaggagcaggcatatcatcctctgtaggccaagtttgttcattggccataaaatcaggatcattgagttctgtgagatcatcagccgtctcaggatcaggcttggagagaacagaaggagcttccggatctgtcgacatggaagaggaggaggcgcgagcatgagtcgaaggcagaggtgcggagataatcttgatttttcaagaaggcaaagacattagttcggacacttcagtcgaagtaggcagtggaactagtagcgaaactcaccttttctaccatgaagtctccaaaattgggtatgtggaccagtcgatcagcactccatttcccacccctcaaataacccctgacaaccaatgtaccctgttccgccccctctccttcaccatttgtacttggggtccaccctagctctgtagactcgttgactagccatccccttccgtttcgccaactgacatctttggggataccctcgcagagcgctcgaagtgtgacagaggcatctgaaggggtcgtggtgtggtagactttctgaagcgaagggaagaagtatgtactgaacgaaagaagggattttaaagtagctgacggaggcgccgtaggtggagtcgtagggttcggagactagagagatagtgtgataaatctagatataatcagaaatctcaagtatgcccgacttgaacggcgaagagtaatagagccttacctggcagacagccacaatctcagggactccctgagactggaacgatctcagaagagtttctccccattcactgacatcttcttcatccgagagcaagagaacgacgtaatcagccgctttggcgctgtctagagtagcatagaagtctcctgcaaggggaaagaggaactggagggacgtcttgaatcggggagctctgtttgatcggcggacgcgtcaattgagagcagaatgaaaccaaacatcagagtttactctatgctgtagaacagatgaaccgaagagacacgaagaaaggggactaacttgatattgacaaccccggcttcatcctctttgaaatcttcttccaacacctcgcataaatccttcgcgaatctttttccgttagtgtcctctcccaattcaaccacacacacgattctcggaacacctgctctgccggcaaaaattctaccgtcttgaacgatggcagctcgctttttgagttgaagttgtttggtagtatttcttcgatcctgcttagtctgtgtagtggaaaggtgagaggtcgacgattgtttggtcgactttcccggaagccgaccttttgaggcctctttcagggaagatttcgaggcatggcctgatttgaatggcttgttttgctgcttgagcgtcggtctgtgtgagtgacccatcacagaagaaggaagaggggatgaaagaagggaagggttgaagcttgctaggtgactgtacaaccgatatagttcctaagaaagttgtgagaagcccaaaaaaatcattattgtggcgttgatattcacgtgtggaagcacagccatatcattgctcatacagtcaacatacccgcctgttactcaaaccaccttcgagatcatcatcatcatcatcaccatcagtgcgatcatcatcagtatcagcgttgctatcttcttagaagagttttagaatgcacttaggtagacattcggtatcctctgttcccattggcatattcaatcagatcaccgtcaatcagcaatcagacaccttcgcccttgccactaatcaagggtttcaaatctggaatcttcatcctcttcaacttctggccgatcgtcgtttgtcctactctgtctattcacgtttcatcagacaggtcttattcttattgttctgcttatggttactcagaactaccgggctcaattggccatgcttcgctccttcatcgaacatcgctcgtatttctcttgggtggaggtgtcaatcccttgtatcctctcaacaagttaatcatttgggacgacagatttcaaacacccgttctcgaacttgagtttcggttcgtacatcttagacatcttgactagatctagctttggtacttacgccatcacgcattaataaatgcgacagagaaaaaatccttggtgttacttcccgtcgagggctcctcgcactgtcctttcgcaaacgcgttgttctattgacaatagacggctttggcgaagaagactatacggattccaagaggccaaaacgcagagggaaggaaagggaatctatcactgagtctcaaatacccagggtaggggcgacggacgatcaaggaaagactgtgggtggattaaaatggttcgcagagtgggagacatgtgataaccctcgtggtatgtttcttcgtgttttaactacgtctcttcattgatgaatcatcttgaatacaccatcatgtatgactgcaactgaaaactcctattatgtcatgtgtttctcaaacaatcatcaaaacacaggtcttctggcactatctacgtcccctttgtccacgttactcactattcctggccgtcaacctggacacgttcacctcctacatctgcctccctgtcctttccctctatcctcctccgagtctcccttatcttcaactcctccttattccctccctccaccctcaaaatcagctctacttatcgctcatactcaccctttgagcacgctctcttgccctccctcgggtcggttcttctcaacatcctcagacagagggacactaatccgtgtttgggacggtcgttcaggcgggctggtcaaagagctgagaaggggagccgatcaggccgtcgtttggggagttggttggcttcctcctccacgctccgcagaggatggggatggggatggaaaagaaggtgttatcgtttggagcgataagggcacgattcacgttttcactctggaagaaggaggaaaagtctctgataagggaaagctcaggtttgtctgtatgctacttcgctctgcattttcttcccagtgttgaatacgattcttgttttctactgaaaacagaaatcccaaatcaccctttcaaacgctccaaccgtaccttcctatttcgcttcccaaatactttctctccgaatggtctcatgctcaattccgtcttcccactcgaactccacacgccgagacgctcactcacttgagcccttcatcaccttctgacctaccttctacatctacatcttcaacgtctacatctactgctcagtctgcttcatcagtcaggtccggatcgagcagtacagctatggaggacaaatgtctcgtgagctgggtacaagtacactcttcttctgcttcaggtactgccgctggcatctctaccactccataccaatatgcatccaatccatctctatcattcaagtcacgtccatctacatctgaaatcacaccatcactccagatggaataccaactcatcgcattgacatatacaggaggatactaccgaatcgctctaccttcctcttcttcgtcgtcgtcttctgtctcatcacctctatcctcgtctcatgaaggctctgcctcatcacttggtagtccttcgttacgggaaactgatcgaatcgacatcgagccaacagaatctgggatcaggtctgggtcgaaaggaggaagtagaggttgtaagctggtggagttcagaagattcggacaggattcaaataaaggtttcctaggcggatctggaagaggtagttggaatgagggtgaaaagtggtagtttagatgcttttatcttcatttttcgtccgtctggttgtgtccattctgttcataagttttctgtatttttttcctccatctctcgccttttcgttacgaccacgaccaatttgatgcccttgaacgaaaagaataagaggagagaccatatcatagcttggcatgatcagattcaagatcctttcatcgaacacgctcctctgtcctctctctgactccctccttaacttgttccaagctcttctccagggccctttggacttgacggagacatcgatactgacatagttgttgaatggagggcagggaacgagatgatgggtacggagacaggcctttgctattgaggaagaagagcgcaatcacatatcacctgggctcattcgcgcagaaaaaatatatgtccacattaacatttttctttgatacgatgatagataccaaaaatgcctacgtgagctcgccggacgacaacatgaatatctcgtcctctggaatcgcgtcccattttgatcagacctggaaaaagacaagcgcccaaaacttctttttcttgattttcggaccgatggcatctctttaaaagttccatctatataaattcaaagaagtaggggcggaacggtcagcatcgttatgttgtgtctacaggatagaggcatagagagaaagagtgaacccgagtcgcatccaatgcacttcccagttccggaacgaatgccctgtataaacctataccagaagatgaaaagctctgcttcgattcatgaagtaatctggaaaattcccacgccgactggagaatctcaaccaaggcctccggaatgagacaatctgtcgattctgttttgactgaggcatcggccagggtcttgatagatggtccatcatatttcaggagaatgagaaatagggatggcatctgcgcacgatacagttggttcatgtgaagagcgccacgcgtgggattaaaaggtaaaagatctgaaccgataaactcatacatcagcacaagagagcgcagagaatgctcacatattcttgaagagtctgaatcatgagggcccgatcaaagtcgttcatagaggcagagcacgtttgacgacctgtttcgagagaacccatcatacacggtgcgaacattagagactcttccacaacgtccgtataacggctaccgagactaacgccatacgctagcaacaaccgggtcacctggggattgacaagtttcaaagcatcagagccaagcatcacatcattacttcatgtctactgtacatacgactgaagatgcattcatgaatcctccacagccgttcattctgcaagatttcatatacgtatttcatgaaccagatccgacgtatgaatcagtctcattgaagctctcataataggaaagtatggcttacttaccgcctcacttgaattagttagcaacaaacggttgacgaccccattacagataaccttcgagattgcatgtctcaacaaactctgtaccctcagacttgctacatcttggtgttgtccctcattctccgtacaattcttcgttactgctgcccagaaatcaggaaggagatgcggatgacggatgacgagggtcgaagcgtatcgattaatgagcgccgctaaagaggaggcggcattattgatggtcgagtcatcggtggaagaaacacctttgaaggagtttcgatttgaatgatccgccccataagtagagtctccctaagaaacggctctcagctatatcagtacataaggagagtatgaagcgaagcacaacgagctcatattgacctcaagctgggccactttctttttcagtagtttaagttgtttttcttgctcctccatctgatctctctgaagttctacttgggcatgagctgctcgaaagttcctgatcaagtgtatgtcatatagtgtgagcctcattcttgctgtgcgcgagagatttacgaagggacttacttgaggacgtttcttaatttttcattgggagttcaaagatgagagaaaggggagttaaggacgttctatgctcctgaaatactcaaagagaaggggcttattactgaaattgctcctgtgaaacccattcaaaagaaggcgggcggacctagaacggaggaagaagaagccaatacttttgtctcaattcgtctctatatcatctttcgccggttttaaaaatgaagggagcttatggaaagatagggaccttaccgtccaacccaattgttgcgacgttgcattcgaattcgattcttcctgttcctcaagcggcaaacgatgaggaagctgtctttctagactcatctttctgatcgtcaacggttgatgtgatccgcctgagggatgttcgtgggtggtcaccatagctgtggttgtctctgcttctgtttctgtccttgccggtcaactagacgacataaaagatctcctgaatgaggaaaacatcaacagaacaaagtccaaaacgcaaaaactaaacttgagtgaacaggcaagcagtggactatagagcttcaagaggaaaggaaaagatgatctttgtgagctggtacatgggtaagcggaatgcaatgtgatatttatagtgagaatcagctatcggatgtaagtacatgtatccaaatgtgagtctgcctcgaaagaacatatgtacatgcaaggccaagcgaagaggcggcataggaggcgtgcaagggttcggattgatatgcggagcaacttttggactgcgtgcatgctcggctgtacgacacaattcaactctttcactaaacatattcaactctggtctgtttgccacatgaaagacgggctgattggactgaagcaggcggcatggtttatcagcttataacaaatcgaaggattaaaacggaatcaaccagcaaaagatacaaaaatgcctcgatagcagtaaattaaagtactgagtacaaatagccgcatggaaacgaattacacggcctgctgagcgtctgtcgattctaactctcttccatccccttgatccccttcgacgcctggcgttttagatccaactgaaccagatccttccttctctttctccctctctctacctttatcagagatgacggaagccgacctcgatttcgatccacctgaactggtcttcctcctttcccctccgttgtttcctgcgccagagccgcctccaacagcaccttgaccacccagtccaaccatcaatgatgaagacgacatcgacgagtccttcaacgcggccgtggcggtgacgccgaatcgttgctcgaatgcaattaaatctcggatcaattcttcaatctcctcggatcgtgtctttacacgtaccggctctggctcaacttcagactcggttgaaccgttagtggttgtacttaaggtaggtatcgatggatcaatatttcccaaaagagccagaggcgaggtggtctccgaggtgatgggaagagtagaggggtcagtggctatgtcaaaggtgactgtcggttcggaaactagcaatgtggtagcaacagtgatagaaggtgaagatgtagatgaagaagacgacgagcctccattcgacgatgacgaaagaacagcggctgcagctgccgccgccgtcgtatccaccggccacctacccacataatccaaaacgcctctcgctcgttttctcatctcgcccagtgtcattcgtcttcctggccatctaattttcgaaggtgcttcttccctctcgccatctgcacctctcagtccagccgcgccagatgttcgtttccctctcgcgccggacgtatttcctgctgaagagggtacggcagtagcagtccctgaaccagatggattgagactcgatcggatgacgagtggctgaggagctggtgatgggagaagatgtgttaaatgagatagatgatctggaactccccacgcaaggatagtactattccggagagcggcggcagcagcagcagctacagacgcaggtgaaggtggagcgggaggagctagctgctgggccggtggtgggagtggatcgttgggaccggaggatggacccgggattgatggatcccactcagctgcaacactagagaccgagttcaatcctctcacatcacctccagcagcccaatcctcgttccaatgcgcggaagaccctatcggaggagaccgacggagatgatcgtcatatcccggttctccgggtgtcgagttggaggataatcctttgaagcgaaggctgcccacaggattatttgatgagcttgtcggttttggtcgataggtgtattgattagggtgtttagtggtgactgttcggccggaaggaccgatcgagtgattattctctgatgcagagtttgctgaatgagggtaggatgatgagagcatggcatccagactcgctgattctagtcctgttgatatagcattcggtacaacaagatcagtatgatgcaggaaaaaattatcaagctattgtgcaaacacactcggaaggacaaggaaaatatagatatacgaaccttgttcattctctttcttgactttctttccctttctgacacctgcaccattccctccactacttgtcagatcatcacttccctgcctcggccttttgattcctattccaactccgggaactaaacctccttcgtccgcccctccgctcagatcatcctcaccaggaaatgatctgcgatgtctggttgaagacgtcggcgaaggtgatcgtctgtaaatattcataagtggcaaaacgcgctgcgatgagtcttccttgatttagaaatagagaaagagaaattgttaaacaaagagacgaggaagggatttgaacgaacacagagtcttcttcctcagggatcaatccactttcgatcaagctcgccctgatagccttctcgtactctgcatcaggcctggaattcatcgttgagcgccttttggggctgctgcgcctgcctttctctcctttggccgagggtccatgtggtggactctgcgagtttgctgagggtgatctccgagggacagctgatggatttgagggtgtccgcttatgatgggatggatgcgaggatgaagaggaagatatcggggcttgcccttttgaggccgaatgaggagttggaggatcgacttgggaaccaggtggcataggtgatggtgttggcggaatgccactagcggactgagacggatgagcagtcatatttgaggagcttggctttccagaggagtgttttgacagaggcttgttgtgcgatgaagtcgtgagatctaccgatgtctcagccggggtcgagtgagccaagacagtggccgtcgttgacgttgcagcggccacggctgtaggtgtagataccgtggtgacggacgactttctcctatgggaaacagtcggcttctccgttccgttggacgtcgaagtgctactcgaagattctttccctatcaatgcggccaccttgcccttagctccttccttggccgctcgggatcgtcgaccacctgaacgagcaccgtgggctggagtttgttcgtcctcgtcttcttcgagcggggaaaggccagcgatatcatgagtccatcgtttggactggttcggtggtaaggtactctccggtggtttcaatcggagcaagtcagatgctgacggaggcaaaaagatgctgataaagttgattgacgagaaaattgtcagaggacgcgtgtcttgaaggagtttattgcacggctgaattaaaaagacgtgacaccaaacataccctcctcgtcctcttgatttcatccacttcttgagcgtgacgtgaagatctggtctacatttttcacagaaatactctgttgtgtttggttcggcgtgagcaaattcaagatgagaacactttcgcagttaacgatatgaatggagtccgacagataacgcaccatctggcgtttcttcctctgtaggaattccaacacacgctccatgctgccagacgttacacgtatcgcacgagatcatcatgtcgtccgattctaacattcgtccaaatcccaaaagcggtaagattgtgaaggatacggaaagaaggaaaagaaatcctgaagtgagaagaggatgaacagactcacctgtgattccacaaacacatctcgtcacctcggcctcttcataatcctcctcatcttcctcggcgccctcgtcttcttcctcaacctctggagtgagcttattgcctttgaccttcgaatccgacttggaaagaggcgattttggatagtcagcttctctcttcatcggcttgatgtctcctccttcttttgggaaaagacttgattctttgtccattttgatagcagtcgactcgctcatgctcttttttcgcctgtctcgtttgccgaggccgtcaagagattgggtgtagtacatgtgagcgagagcattagcggaaggcgaggctgagggcgaatctgggtctctggaaccgttggactggtggtcgtctaatatcgttggcggcagtgacggtctggatcgtgtcgatctaggttgaggaggcggggaagcagctatataaaggagaaagccatccaaggaaaggaatagtgacacatttgatggatcaaaacgaaataaatgatgacctgcaagcgaaaaaggaaaatagagtgatcggaagactcacccatgatggtcaggggaatgactccttttgcagaccaagagcaagatgaagaaaggcgggagaaggaagaatgaagggaaaagatttaatttatacggatggatgtagatctgaatggatccacgcgatgaaccggctgatcttccgagacgaaaatcaaagagtgagagtaagagtgggcagaaagacaaccgagaaggaggataaccctggtttgatggtgatggtctgatagtgttctcacttgtctcattcgactttctttccggtcgggcggagtgtttgtgtgtggaccatctgaaggtgtactagcacagccctatagtgacgctcaacaatcacgtgagtatcaagaacctctaggacccgcatacgctgctaaaattgcataaatctgtctacattttttttggactttccatcagcgcctaggacagcatacatccccttggatagcatacagccatcccaacaggtcgtcaaacggaagcctgctccttcttcattcatcctctcttcctatttaagaaaagggggttatcaaaatggtagtcccactatcttcccctcttcagccgggctcaaagtcccacaagtcccactcgttccacacgctcaccagagaagccgcgttcaagtatccgtctaagactggggcagatatcccggcgcttgaggagctcgtcgcacctcatattgagtccttcaacgctcttctcgaggacccttcagctgaaggcggaaaagggcttcttgcccttgccgttcaggatattggggagaaagttgtgtatgatggcaaaggacgagctgagggcaagcgattgagtagtgagtatctgaacaaatgctccagcctctcacatcatggtcattcgcgaggtcagtactatatgctaacatatatacatttattatcactatcagtccgcattgcggacgtcaccgtaggaaggccgttagtgcccgacaaggacaagtctgctaaggagcgacgaatctatccgtctgaggtcagttttcgcttggtgtacctgcttaccgacatgctcaacctcgcggaaaaatccctgatcttcttttctcttcatcgaacaggctcgagagcgattgactacatacaaatctaaaatgactgcccgaatctgttggtccgttgatagagggccagagacagaagaactacgagagctcggtttccttcctatcatggtcaaggtgcgtaacctcctcttgctcgcgcgtcacttattcatatgcctctgaccggtcctctcgctatcaatcaccacaccagtccaaccgatgtaatctcaaagctgcctcggcctcgactctcgtgaacgcacatgaagaatctacctcattcggtggccacttcatcatcaacggaaacgaaaaactcatccgattccttattcttccccgacgaaatcacgtaatttccattttccgaaactcattcaccaagcgaggacctggttattcggcttatggtacccagatcagatgtgtccgaaaagatcaaacgtcttgcacgaacaccatgcactatctctcttctggaggtgccaccctcaggttctcgtggaggaaaaacgagtacatgatcccgcttatgcttatcctcaaagcgctcgtctcggcgagtgatcttgaaatcttccagggattggttcaaggcgaagaagagaacacgttcttgactgaccgagtcgagctcttgctcagaggtttcaaaaactacggtctcaagaccggcaagcagtgcttagaatacttgggaagcaagttcagggttgtgcttggcttgccggaagattgggaggacgaggtcgtcggaagctggttgatcgacagagttgtgctcgttcatctagacgacccgagggataaattccgaatgctcttgtgagttcttgttttatatcaatccaaccagtatattgcctcatgactttgggcttaccccttgttttcttttcacctactacaggttcatgcttcgaaaactgtactcactcgtatccaacgcttcttgcgctgataacccagattctcctcaacaccaggaagttctccttcctggattcttgtatggaatgatcatcaaagagaagctcgacgaagccatcacggccgtccgagctcagatctcgcaagacgtcagaagggatgtcgccggcgttgatttctctgatagtcagttttcccatttttctctccaaagattttcccgaaatctagatgtacaaatatttatttctttgttttctctctcttctaatctttttgtggcactgtagatcgatatatctccaaggtcctccacaagatcaattttgacgttggtcaaaagctttcttacttccttgctaccggtaatctcgtcactccttctggtttggatctccaacagacatccggttacaccatcgttgccgaaaaactcaacttttaccgatacttgagtcatttccgatgtattcatcgaggagccttcttcgctgagctcaaaacgacgactgttcgaaagttgctgcccgaagcatggggtttcctttgtcccgtacacacgcccgatggatctccctgtggattgctcaatcacctgtctcacacctgcaagatcatcacctctgcccttcctgtttctcacattccatctctccttacctcgttgggaatgacccaaccatttgccacgtcatccatcgacggcacaaagttcctcgtcgttcaacttgacggaaagattattggttgggctcctcctgcgctctgcctcaagctatcatcgacacttcgaaaatggaagaccgagggaagaaacaatgtgccgttggacctcgagatcggttgggttccgatctctaagggaggtcaataccctggtctctacttgttctcgtcaagagctcgaatgatgagaccagtgacatacaccgagaacggaaagctcgaccatgtcggtacgtttgagcaggtctacatggagatcgcttgtaccgatcaggagcttgagaaagtcacgaggaagaacattgagtctggagcaaaggaggttgcttttaggcagagccacgtagagctagatccgactagtgtgttgagtgtgattgcaaacttaacgcccttttcggacttcaaccaatccccaagaaatatgtatcagtgccagatgggaaaacaaacgatgggaacaccctcaaccgcactcagcagacgaacagacaacaaaatgtatcgacttcagtccggtcaaacacctattgttcgacctgagctatggaataagtatgggttcgatcttttccccaacggaaccaacgctgtcgtcgccgttatttcttacactggatacgatatggaagacgctatgatcttgaataagtctgctcacgagcgaggcttcggttacggaacagtctacaagtctcagatcatcgatctcaagactggtatgcgatcggcctccggtccggcgacgaaccatttcggaattggaggggacatcaaacagacccatccgttgagagagactgtcgacgaggatgggtatccaatgatcggtgccaagctaacgagtggaaccccgattgctgctcattacagtgatacagttggtcgaactcatgttcacaagtataaaggagacgaggtcgcctacgtggatgaagttcgagttctcggtggcgatgctggtgactccgagtgccagaagattcacatcaagcttcgaattcctcgttcacccacgatcggagacaagttctcttcccgacacggtcaaaagggagtgtgctctcagaaatggccagccgtcgatatgccattctcagagagtggaatgcaaccggatgtcatcatcaaccctcacgctttcccgtcgcgaatgacgatcggcatgtttgtcgagagtttggcaggaaaggctggagcgatgcacggtttggctcaggacggaacgccttggaagttttccgatggagatactcctgttgagtactttggacagcaattgctcgcttccgggtacaactatcacggaaacgagccaatgtattccggtatcaccggtgaagagttccatgcggatatctatattggtttggtttactaccagcgactccgacatatggttaatgataagtaccaggtccgaacaactggcccagtcgaccaattgactcgacagcctgtcaaggtgattgctttcatctgtactcaataaattcacttctgttgagagatcttgtattttcgcatatactgacattgcccgttccctctttctctgatgttaatcaactcatcaagggtcgaaaacgaaacggaggtattcgattcggagagatggaacgagatgctcttctcgctcacggaacatccttccttttgcaagaccgactgatgaactgttccgattacactaccgcctgggtctgccgatcttgcggttctatgatctctcttggttacgacctcgatgccacaatggatgtttctggcggaggagagtactgtagggtgtgcaaggaagagggcgagaacgcggggttgcacgacgtttcactcgctgtaccaaagtcgaatctcttacagggagcaatcggaccggggaacgatatggacgttgtcgctgtaccctacgtcttcagatatcttgccgcagagatggcatgcatgggtatcaaggtaagctaaatccacagtacaatcagatcttctagggaaggtgatgaaactgactggtcatctctcccttaaatcacagatttcggttgctgtcaactagatgttttctcttctcgccagtcattgcatatcatccctttctaccctttttccattcactcggatgagcttgctctctttcctttctgttttttctcttctcttcttcgattgcatatttttgcttcgcatatatatcatgggtcaataagatttccatcattgactgccatccattcattgccaaactggaagaaatcattttcgctacatgcaacgaaataaaggaaactaatcctctggctaggaagacaacgatgcctacaaagcagacaagacataacaagagcaagacaaaagacaagacgaatggaaaaagaatagaggtcatggacaacagggtaacgtaaaatatgagtaagggcatgaatatgaaataagaccgaaaaaaatcatggtcgggcaagatagatgttgagatcgtcaaagaaggttgataaaaagcaaacaagaacgagaaacgaattaaaaagaaaaaaagagtacaaagcatagaaaaacacgtggtgaatggtcaggtcaaagcaaatgatctcaaatttcatccgaagttccatccgagacatctctcatgggtggtggcgacgccgccaccgacgaagcagtagcctctgtgaatgcttgaattcgtttggtcagcccagcaaacattcctgctccagatggtctgtagaaagacgacgaaatcatcgattgctggtttgagttgaaatttgaatcaatcttcctgttatgaccagcggaggtggtgtcaggtggagatgcccgaccgatgaacgtagaccgaatactctcgtctgagcgagtcggccgaagtgtcttctcaatgataggtgtgtcgaatgaagggtccaaaacggcatccaagactgcagagattggttgagcatacgctccatttgccgaacctggcgcaaaggaagctgaggaattagaatccatctgcctacctccaaaagagtttgacgatctctgcgtggtcgtaggtcggaacacctgtgaacttgctgatcggagttttgggccaagtcgactcgaaggagcggctgagccaatcccaccagaggttgtcgaccagccaccttgagggacagctggcgccgctcctgcgaaaattcctcgaagatgctctcggttggcggatatccttgtagggcttggggttcgtaccgcacggccctcgcctggaatagagagggatgaatgggaagatatgacagatggcgcatgaagcgcctcgaggttcgactgagaagccctcgagatggttccgtgaggagtagatggaagctgaggggctgtagtagttgatgtggctcgacgtacaacacccgtacttccgaactcgacatttacggtagtcgtcgttgaagccgtagcggccgctaatttgggagccgctttagagggatatagcttgtttcggtccggcccggccggtcctgttcgagcattcgaaaggctagtgttcatagacgattcgtcctcggaggcatccactggaggagtaataaagaatttctgaatagggtttgcgatccatcctaatccggaagtctgtctagaaagtttggttttgagtcttcccctagcgtcttcctcttcgtcgaaaagaacaatttcccgcaatttgatggcactcgagggatcaagaataacatcgttgactgttcccctaagcatggagagttcagcaaaaatgtctttgaacaacttgacaagtaagaggaaatcctttctagtaaccaaactctctggatcgtcgttccctctaggcactttttctgatctacgttccagatccaacactgctcggaaatgattcctaagctcattgacttctgtcaagatagcattgatagttgatttagacaggtgcccgacgtcgcctggaaggtgttgacgtttgagacgcttggtcagcgtctgcacgtctgcttggctgaccttagtcaacagacgggacatgtgatctatgagcgatacaagagcggttgttcgatagtcgtgtatagaggctgtatctgaagaagctgtctgggaggtatatactggtaaggtcggagatgacacagccgagtcttgagggttgggtgagaaggagatggatggatccagactgttatttgttgacactgagggtgatatcgagacatgagatacatgtcgtctgcaagttggagttacaggttcaaggtttgagggtccggttgaagtccccatgtcgaccatgtccgtttgaacggcttttgatctgctgagcagcatcatcggtcgttgccggactttgactttttcaggactcgccgttgcaaacccgagatcatctactccgagaacgtctcttgttctcttagaaatactcgaggcagagccatcgatgtagatgtcgatgtcatcataatgagtagattgacttgagttaggtacagatgcacgtcgacttggtgaagcagggaagaaaccttgatcgcgctcggggtcagttccattctgctcgtcatctgtcattggtcgttcggcgatagagtctacgccctgagaatggaggcaatcaaatgtcaagaaaccatgagtatcattcttgatcctgaaaacgcgcagaggaaatagagcgtactgaccgagaacaccctatgaatgtttctggggccatccaaactgaaacttcttttaacgtgtcctctgacccaagttccacttccggatccacttcctcccccacggactcttctcccagctgagccgttggaactcttcaacgcgtacaccccacttcggagtcctgaatttccttgaaaacttccaaacgaggactcccttccgtctccttctcgtccttccgtagacagaggcgatactagagttgcactgccaccgccggttccaccaaagctggaagaggagacaaaagatggtgcgatacttggtgtccaagaatcgtttcggccgtgttgtcttctattcccatcccaaggtagcggtaccttagtatttatcgatttaagcgacggcgcccaactactcttccgaacatgttgaacaccatctgagaagactctatcaagtacaggacgcgaatttgttgatgcggcgagttcatcggagaaaaaagctgtggaagagcggctgatgttgcctgcatcaatatcatgtcgattgtcaaaataattggtagaatcatgaggggaaaacgacggcgcctggggactgagagtataagatccccggtaatcagaaagaagctcttgaagctctgcgttgtctctcttcaagtgaatgttttccgccataaggccatctacgaagtacgatacgaataccgttgaatatatcagtctggacctgccctaatttgtgtaaatgcaagcaacagaattgacatacctagtaccgcttgaacttctgggttcgtagatccacttgcgtcaagctaaagtaacaacagacgcataagtttcaaggcttgacgtttcctcgcgtcgtgacgttgaaaggacctacctcgcttctgatcatctgaatccgggatgcagcatcctcgacgatattcttcgtagcgtcttctcttgattggtttgcgtagtcaacagctctcttagccgctttgattttgctctccaaatcagctgaaatgaatcaaatgttcaaagagagcacgcgcgtgaccggagtctttcataagcttgtcgaagcagaaacgtgaaatctagtttagcaaacgtaaggtttaagatacgaacctattctgtcctctgcttttctcaatcttctatctgactccgatcttaatttccgctcgcccaacagttcctccctagtgtcatctctctccttctgagcgtctctcaccttgtcctcccagcccgtacttctcgcttgtgcgccagcctgcttggataatgaacctctgacggatgaaagttctgctcgaagcgtcgcaattgatgaatcagataaagtgagagaagtcaatgattggagaagacgtcgctcgagttgagcgttctcccgagttgatttggcaagcttggatagaatattttgattcgtctgctgtaatgattctatctttgcatttgccttcgcaagtagattttcaccatcgacccgctaagccgcgaagatttgttgaagtccaaacaaggcgtccaagaagaagagctgcacgtaagtactgaacaaggaaattctggatcatagttgagcttaccctgatttttagagcttccatctcctgttcggctttttgaacgtacgcttcatgccgatttaataaagcttgacctatctctgcgcagagaagcaactctgactcctactcgctcaaaacgcggtgaccgaaacgttctttaactttggatcaccctcccttacagacttaataaaacttactagttcatccttcttcccgttccattcgtttgacggatcagtattcggggttctgtccgagactcgtctttggatcgaactcagcgatgccgttatatcttccactgtcgtatcctcacgaaggaggtcagaagtcaataggcggattgaagatgtgttgtctgaaaacgtagatgcggactgtagactgtcgtcggttcgggagtcattcatcgttcgtttgggcgtgaggagggaagtacgtctatgaatttgtgttttgttgcgaactgaacgtttaagtgatatatgtgtatcggacgggagacagtcgactgaactagcccctcaaggagctggtaaggaacagaacgctattcagtgataccttgaatgtaattgttggctaccttgaagaagctgaaggaatataagccaggccaagcgggcttggtaaagtcacagctgatgggaaggagaatggatgttgtgggtacgacgggttttaatctcaacgcgtaaacaatctttctctaccttgctctcttccaatctcgctttctccctgtcttcattcaatcattcgttccatcaacctttctttcaatattcagggtatagttatgttgaaagtataccgagcctaatatggctattattttgaatataaataacatttcatagagcacaacaacttgttcttcgatatttgaatgttcttagcagtatttatcgctgcagtcatccaagaagatccagatcaggatagaaggcaagtcagtgccagagcataaagcgaccaagaacacacaacacttatcaaaggaatgatgagaattattgaccttttcagcttggatcgcctgtccagtagggtctctgagagattgccttctttgagtgccttcttgagctgaggtcgacggtagcagatgaaacacgaacgaatcagtgctgcgatcagaagttgaagatttaccttcggaacggaggtaaagcacattacacatacttctttcttgcttcctgtactcgtcacatgtttgtctccaaaccagagcatgcgttcttttgtcaatttcgcctcgtcgatatccttataatgcatatccttctgcctggcagaccctttggcatcatctagctccattcgagctttctgcctgaagcccgcctgaactttgcatcggaatgattcggtgaacccgatggatgtgctatctccccgaagcgtaaacccaccagtggcggtctcggacaaggacagataggtgccgtgactgagagaagaaaaggatatagtcagatacacaagtgcttctttgttgaaaccaatttcaaaattatgtccttcaaaactcacgtggtttctaaagctaagaatgaagaatccacgatatgaggagtgaagttctccaaaggccctctactttctgaagtcgccgagatctatcatcgcaatttagaaaatcaattgagcgtataagcatatcgaaatagaattaaaagaaaggaatgagacgaacaactccaaacttgtcgcaacccaggaaatggccgtccgctgtgcgcagattgatggatgcagctccggataattttgatacgacccagacagaatgtatatcttcaggctcataagacagcgcaggtggattttctgagctagatgaggctgctactgtaggagaaggaaggggcgctgttgtcactcgaaggcgttgaggatcatactgtgttgatggacacccgattgaatcaacctgtctgcaagaaaatagccgagaagtcaagaatctcaacacgtacaccgatacatgcaggagggtcgcttgggtgccagataaaagtagggcctgtgacttcatttggagcctcgggaaagacccaagctataatgaaaggtaaatgatgtccaaagataaatcttctggcctcatgaacatcagcagtggaaagattggacaaacctcctggctcaagaacttcctcttgtttcttactcttccgcctagagccttcacccaaatttctttcggactcatcatccgagtctctcgatctcttatgagacttcttcttcttctcacctttgaaagagagtttcatcgactttggctacaaagaggaaagagcgggttggtttgatggcgaaacaaagcaggaagatggtcagaaacaaattcgatatggataaaacatatggagcactcatgggtattgaataacagaaacacaccttgccggacatcgttactttgtatctgcacaaggcgatggtgatggtgggatacgtgatagtcaacggcgaatgatgtgtagagtcaatactgataatgggatgtgaggtgtcatcaagcgtggcgattccacgtgacttgacaaagctatgaacgttgaatgaatcacccctctccaaatacttcaaccgtagagaagagacgaccatcctgactctcgagcttatctctcttgttctgtcgctacctgtctttatatctacttctagtgaagcctttatgaatgaacggatggccagatacctacagacctcctccgttcgtgtatcagaaaaggcgtccgttaccgacagagtctcatttacagagcacgaacgaccaaggaggcgttagacttcaatatggttccctcggttccgtccgattggatgtcaagggatatggcaagaaaaaaggcttgaagatcagagcactggggcagaatttagaaggtgtgtgtctcacttatcaacctccttattgcacccaaatgaagacgggagagcgtgatgatgtacatgtattgaaaccacgatctatcaactgccaacgcagaatcaaaattagatcaacttgtccctccggttctcgcgtacccaccgacgaaatcgcccgacatcgctccctcctcatcttcatcactatcccttcgtaaaagaacagaggccaccaaacgattcctcgagaatcagcgggagccactacatatcccctattctgtactgcaccagcacttggctgaagttcaatcagaagaggaagacttgacttcttcttgggatgctttcgagggtaacaaattagcttgctcatgggtgaaaccattacgatggaagaaacaagtaggattggtcctaatccctaccgggccggtgggtcgggaactgagtaggctcttacattctgcttatagtatcaagtcatcatctctgacctgctgatttccattggttctttatgagagtttagatatctctccaatatattgggattcgagaaagaaagaagacgtctatataccctgctcatcacccagcgtatctttctcaacaccgatctgccagatcttagcctcaccctaccattttatctcctcagatattaatgccacttgtatgtttgattgccctgttctatccgagtcttccttcgcctgtaattgacctcccgatcatctgcttaatttagctccaacaatcgccatcagaatccattcctcttcttattttgtgtctttgatcatgaatgaagaccacaatcctgatgatactggtctcgctgtgtccacacaattgttgttcgaagtaacaatagcaatgactggcggcaatagacatatggatattgcgttatcaccttgggaaggtaatcgagctatcatcgtagactcgacgggcgctgtatgggaatggacgggtcaacataagttgtgagctcttctttgcccctataaagcacaagcgttctcgcagatgatctgatcttgctcacattttgtaaagaatattacgacgcgagccgctacaaaaaataaccggaacagaccctttcttcagagtcacttatggcccagatgataacatagtgtatctcatgtcggatcaacagatctacgtgctaaaccttgctgcaagttatttcttttttcatccatttgagtctactcaacttcttatcacttccatatttcttcttccacagcacccttcgaaggacatggtcttgtacgatgttatcggttcgaccagttatctcacctcgttttctcatcgaacatcccgcgagcagtttgaatcggatatcatctgtttctcgacaacagagagtatcagctggatcaaccggagggtcccaaagagagctctacttgcctgggagcatttcagagctttcgatcggacgctactagtatgggaagtagatagcggtttaggtatgtctattttctgtagtctgatgcagtctttgctcaagatcaaaaccatacttattctgttcgagctttatattttgacctgtgaaaagcccctacgacaatcatctcctctcaatcaacgaatctgatgacagcatataccgtttcccctaacacgactccgattgaatcccttaccgatccctacatactccctcatatttcatctcacgattttttgtcccctcgacaggggctcgcatttttccatcattcaagcctccctgtagagagacaggcagaagtgacaatgtttgaattaggatccgacttgtcggtttggatccgacgccttgcgagtagagaggctggcatagaagtcctaaataatcgatcgccgcataagatccccggtctgaggtggttgtccatattccaggaatgggccgaaaacataaaatcggaagagaagaagattagctgtttagatgaaagggagaagaaggtggttgacatgagaggcttgttcgaaggtttgagtttcttttccatacattttgagagctgttctgtgagaatgggccgaaataacctcagtgtgcgtttgagttagaccttttcaaagtcccttcttcagaatcaagcgcagatatgagaggacaacaggcagtggagggcattgcccgcatggaacagtttttcatcaatctcataacgcctcttccaggaatagtcactaggtgatatcctttttcgcctacttgcctttgttaagtgctcctcgcctgatcgaccgttcatcatcttgtcttgattgattctgttcagccgagatatcgcaatgatgactcacgactcgagacccactagccagacactcaataatccagccttcagagcaatacacccttcgccggatctcttgaaatctacgatccgacagcttcgttcctcaacattgagcaaatcatctccttttcaggcgtcaatgaataccagagtgaatgagctgataggcagaggccatggtgagccgaggatggcgtttgagaatttggagaagattgcggacggattgagagacagttatgctatccggtctatctcgagtgcatctcgttcttcttcccccagctcatcgacggacgacaacgatgagaccaaagagcacctcgttacctcatcaagcgcgtcccgtcaatcttttgagaagaagatatttgcatcatacgcatgtgatgttctggcatacgacctaacgctctcttcgtccgtatacgcctcagtaccgatcaaccctcctgtggacgtcgatcctgaagatgatcttgaacgagctacccaagcgatgagcttaggtcacgatcatccaattggtgcagacatcaatgttatggaggatgagattccgagattacaatttacatttctccgacctaaacctcaatatcctatatcgtccagatctgagcctaatcgaacatcatcaacgacctcatcatcgaaagtcaagttgaattcaaccccaatcccgaatacggatcaattaaatagccagactgctcttccagcgggctctaaaacagccagaatgttgatgagctcatggatcattggcgaagatccctctgaatatgttcataccgacttaaagcggcaaaacaacctcgaccttggtctatcatccaacttagaccgaagggcacccgcgtcttcccaggctgctatagctgcgaggttgtacggagaaggtacacagaagatgtacaccggatcttctcacccataccaaattcaaactcaaccgtaccaaactcaaaaccaaagtcaaagtcaattcttaactcagacgcctgtatttgggtcaacgcagagcgtaaaaccgaacgtattggcaaagatggcgcctcctctactatcgaccgttcccactttcgctgtcactcctgcatccaccactagtactgggtccgggttcacgcaaagcccgatatttattccgaagtcaacatcgtcaatcgcgaaaaacaatttgacaagcttgccatcttctcagccgttccctcagtctcagtctaactctcttccttattcccagcctcaaacccacatccagacccaaaagcagcaatcacaattcgaatcacaattacaatctcaacctcaagattcaaatgagaccacccttgccaacactcagattgtcagaggcccccatgcttctgggggtcgaccttatcctgggcttgggaaaacaaagacgggcgggacaggaacgggcggttcgaaaacgaagaagaaacggatgggtgggttctgaaaagatggcgtgatgctcttcgaacattttaatatctgtcattgaaaggacgtagagagacgacggatgaagtatagagcaatgacttgaagggctgatgtacgagataaccaatagaggcatgtgaggagaggaaaagttttgattcttgaatgagtagccagatatatgaatttctttgatcatcagataagcgaaaagaaaggggaaagcgaggtgtagtggacagaagaggaaagtgtgaatctatgatgtgatgatgcgtatagaacagcaggagctatcttgtgacactgaaagaagagagaaaggaagaggcgtatgcaaacacgacaggcgaagcgacatctacgccgtcagacctgaggtgagaagggaggcagaaagagaacaaagacgagagcgatagtgcaagggggagggacggtatcggatgcatgggattggtatagatatgttttttaaataaatgcttgatgtgtgtaaagtcaatgactaaagtacaaggatggaataatttttgttgagtgaaaaagcaagatgaagcatgcggtactgatggaagaggggaggaatcaagtttcccccttgatcactaccaaagagacgactcaacgactttgtcgtctctcatcctttcacccatcactgatcgtttcgtgttggccaaggcgacacaatcagcgaccgaatctaacgatccgactgacgtcgccgacttgattctcactaaatccgaactgacgaccggtggagctgtctcgtcggtcttggccggggtcatcatcgaggaagatgaagaacgaaaggtaggcgtgtcgggcataatgtccgagtcggacgagtaaaacccaagggcgtgtttggaagaagtagagctggacggagtgaaagactcgaaagcggaagcaggagctgatacgctattgtaagaagaagaggaggaaacggaagatgcgattgagttggatcctccggatggacaacgagcgtgcgaaccggttggactctgttttggagcagagaacgcaggacctttctccggtgtcgcaatagttgattgttgaacagacatgacgggaggaggcaaaagttcgaatcggcgtcctttgaggtactgcgctcggacaaagagcgaggcattgccgtagtaagctggtgcgtacttcgcgatgagaacctcggataactgttcgaggtgtcgcccgagctgggagtcgatcaggaacgcggcggctacggccggatcgtcttcatcaataggcttggtaggtccgaaacatgacaagctcagcattgtgcggcggtcacaaaaggggataagctgtatatagacttaccatgcggggtttgtcgagtaagaatctggcaagaagaagtgcgcctctagctatactcgatgggagaagtgggatgaattctttgtgaaagagtgaaatctccatcagaaaccgggccacatgctgggtttcggcgtcttcaagcgtggtctgattggaattgatgtcacgcatttgctgtgagcgaagctacgggagaaagatcgacatagaaggaaattgcttacacccatgcactgatatcgcaaccagctttccgcactagggtgaccaatggtccagccgatagtgttgaggacatgacgttccatttgaaggaaggcagactcatcataggcactgttgacggatagatggcgcgtttgttaggtagagtggtgaatatgtgcaatgtgaaatgtgaaatgtgatatataaaacacaaatttatgcgcttactcgcaacacattgaccgaagagtctctagagatggaatcttatctttggagtcctatggagggtagcaagagaagaaagattgtcaagagagcagtctacaatcatcagcttaattcttgtcactgacctcgtactttgcggcgatcctgtaatgttgttaaggtgtaggtgatatcagcttctgttggcggcgttggcgacagtctgaaataagacaacataccatagactagagcacccaactagttgatagtgctttttgaagacaatccgcttggagacgtatcgatcaattatgttgatggtaaggtagaggacttctggacggagccggaattgttggtggatctctaccaggaactctacgagaaaggggcgcatgtacctgtgacgagagatgtagtgtgagtgataaaatagagacgtggacgtaatggtagcaacggatttaccaggcaagttctggttgctggttcatgatctctatttttggtagagtaactttctactcaaggggaaagtgacacaggacccagaaatcctgttcagtctgacacgctccagagacagaagagaaaggtggaatttgaaagatatcgaaaagtgatatcaacatacctctaactcggccatgtatgctactgcctctgctgcgtattcgtcctcaaatagaatcctattcgctttagagaaactggcagactcaacaacctgagttgataccttacgaacagctgatagaatagacgatacagtcgagggctttgctagactcattctcttgtttccaccgatcttccgccgaacgtcgatcagaacagccgaggcaccggcctgggcctttgaggggagggttcgagcgggcctggagacttctgggccaacattgcaggcattgatattctctactgagagagtcgatgggcaaggcgtaacagaggaaagagaagaggagggggatgatgaattgtgcgagcaggacattgaaccttgtcgtactgctgacgaagaaggagagagcacaacagaggatcgtttccttgaagggtttgagtaagctcgatggcatggctgtccagacagcgaatcaggtatcgcaaccgagaaagacatttctgtttcttagtgggtatttgggtgtgagtgtttatgagaacgaacgggtggtgggttagagagcgagtatattattggaaagagagggatttgtccagagaatgaggagtgaacgcagggaaagaaagagagaaaagaaagagcgaggttgaccaggaaggaggaaggaggaaggagaaaggagaggaaaacaatggagcgaacaaggcaaggtgatcaaggtgtcgccgacaagaacaagcaagggaagacgaacgaagagacgggtggagagacaaggtgaacacacgaagtagagagagagagagagagacacacacacacacacacacacacacacagggcagaaagagagacaaacactcactcagacacgaacacgcactcgctcccacagtcactcgctcactcaggtcaacaaagacgattgtccggaacctcgctcaggaacaaaagaaggagcaagagcaggggcaggggcaagggcaggggatcgtgcgtcagatggggaagaaagaaaaggaatgatgccggaagggttcaaaaatcttctctaactctttctgtccagacgcgacggagcagaaggaaaggatagtggattgtgagcaggacaacgcaagagccgaacagcagagagaattaaaagaaaagaaaaagaaaggaagaaaagagagagagaaaaaggggctcgagcaatgaacacactcaggaacacaaccaggcacacagtccgggggaacgaacatccgggtaaattagttggttagccagcacactcatcacttattcactctttccatcacaattgcacacacacactgtattagtagagatatagtgtccggtctagctgacctgtcgctcagtcggctggatatcccgcacgggcctcttccgatcggatccgcacggaccatcctgtattcattttcacacagttgcccacactcacacagaagaaatacagacgtgatattccgggggaaatgagagatgtgatgtgaccgattgcgagcagtttgattatcatttaaacaagcggcgatagcacatcccgcacgcgcagcccgccgggcatacagtgtaacttggtttatttaacttgagcaaattgtgtttgtaaggggccgaattacagggttacgaagggttactgaagttgattagggatgctcaaggcgcggaggtttaggcttccaggctcagggaagagaggatgaatcgtgattgaatagcactggtagctactaggttatttaacaaggatcctaacttgaagaaccaccttttgaaggagcgcgcaagcgatccttctgtgtgttctagatacgatgaagtggcaacctggttgccactcgattaataactaaaggatcatcaaccagagataatcaagcaacagatcactaatcctgtcacaaatcaagagaacatagctgagaaggattatcaagcgcataaggtgaagagaaggagcataacgaaatggaaggcatgatgaataatggaatgtgagcatggttacactgccgtgtatatgttacctaaccctggttcctgacagtgttgtaaggttacaattcgcacatgggcgtttacaatcacgtgagtagataaccctaacttagtgtcatagtctctcactgtctcctcttgcacaaacacttgccttgatacccatctttctaggaacggccatccaacgcagctgacatcctgatccctgtctttctagtccccatctgctcacgtcttatccgttcgactctctcttttccctttcatcatggaggaagagtccactgccgatcaggataatctcatcctcaacgctctcgaatctcttcccggaattatcgaacgacttgccgtacccggagcagagttcaacattgacttacatcgacaacacattgaagcggccactctcgctgagctcgatgatcagctcgaccaagcaagactactgatggtccagagcgtagcctgtggagatggtgagcttagaaaccttttctgttcaaacgattctcataatgcgattgtatcctcaaacgcttttatgcacattctgtcatcttgtactctagatgtttggctccctttactcaaggactttgaagccaagtccgacctgtctacagcaaaaggaattcgcaccatgctcgaccttcacgaacaatcaatcgctgactatctctctattccgcttctggtcgctcgagctgaatttgttacacggacctggtaccgcgtacgagaacaggccatcgatcctgatgtcgtcctcgacgatgccatcatcgccctcttaaccgaagaaaccgtccgagaaattcttctagaaaccaccgccgctgccagagcccatatcgctcaggtaagccttgtttccttgttctcgtcaaaaacaacacgttcatacatgcttatcattcagctggccctgcacgtcccatcccgcagagtcacctcgtctggaacattttgaaagactggcagctgtctctgctcgaagatcttgaggtgagaatttgaatcaataatctagatgctcgcttaagaggcaaacatggctgaaaagatttgtctggcctaaatcgatcagtcccaagaaaggtcagtactattcttccccgttaacaccagatatttgagcttattatccgcctttttcttgtcgctcttgtatcatcagagaggcccgtctccctaccatccacaggatgtttttggaccgtctcaagtttcctcatgccagtgagtgttatttttctcttctgtgcttgtggtgcaacaagtaacagcttggtctatcttcagccatcgacgatacgttctccgcctacaattcgtttgtgtctgcttacgataatgagaactacgagtccagactggtcgctgcaacgaaatcaaagaccgaaggggccggtaagtgggctaagagagagagttgggaggatcagctggtgagcgcatttatctccttccttctctaccctttcacaagattattgcactaacaaagctgtgggcattcgactccctcaaaattctcttcagatcgcacctggcgcccacgcaccatcactcttcccggcttatattgcctgggaactcaagcccaagaagccggatacgttcctcgtccaaagtctttacgctcgggcaattacagacgccgccgctcgaaccgatgccctctaccaggccgaaccgttctggatcagtttaatggcctttttggtgcatacctagcttggctttttatttcagtgaacatatatacaatatcacggaactaatcgttttctttggtaaatttggaatcgaaacgatcaaaccgcgcgcgggagaaacaggcctctaatctgaagatcgaacaagtccttctttccactatcttcaaagctgtcagaagtgttccagtgtctggagaactctgggctctttacatgagaatactggtaggaatctatcgttccaattctttgaaggaaacactctaatcggttggctttccggattggttatatctaggaggattatcagaaacctgtcgaagagattgatggtacgtccgcaacagatgcaattcgtaactagcttcatatttactcattattctttggtcttcctttataattaatgcatacacagggatctaccgaactgctcttaactcagatcttttattgactcgtgatccagaagatgccgtgaagatgatgaccgctcgagtgagctacgagcgtcgacggttggaactgtctgaaggtaaggctgacctttcactaccaacagagtgggacgtcctcaatggcttgttgatcaggctcaatttatctgatttgttgtttcgatcgtgtcgtacacagtgacgaatgacgagtttgtcgagttgttgttggaggccatctcgatcgtcaatgcaggtttgtccctactattcctttcagtttcgacagtcttatgatctatgcttacgcttaacggatgttgatatccaataaggcgtcaaaaggggcgatccggccttcaagctggaaaaatacctcatcagctgggtgagcctgtttctcggcagattctcctcatcttagatcttatctcatctattaggagacttctcatgttgaatttgactgggaacaagtttgaacggacacaacaattggacgaggcttctacaatctggcaaggtcttgctaaatctcactcaagatcttatctagtctggaccggctgggcagctttcgaaacgcaagtccttcaactccccttcctctttaagagtaccccttagccaaacatgctaacaactcaagattcttgactgatatgattgggaatttggacgccacttcagtcgtcgaggcgcgctccctaaagctcgagatgtcttcaaagcatctctcggaaaagccaacaatctggactggccagaagcggtatttgaggcttactccgagtttgaacagttctacggcgcgctagaagatcttgatgaagcacttaaagggatttcaaaagcaacccaagtagtagccactaagcgacacaaggttcgtcttatagaaaacttccctatattttaatgcttctgtgtttcatatatgatataccgactcgatatctgataatgatgcatacctatctatcatcaggaggcaatcgccgccgccaagaacgctcctgcagatccttatgtttcatattccactcttccagcagaaggtgcagagtctgtcgctgcggcgcctatagcaggagcgatggatgtcgatcccaattctacttccatttctgcttctatacctacttctgtagatgagattgtcgaagctgggggcgcgccgatggattcctcaggaatggagggagatgcgtcaagaaagcgaaaggccgaggatttggtagataatcagattgagaatgggagtgaaggcgtcaagaaagcaagggctgaagagcagacggaagctgtgccgcccgttcggtatgttacatattcttctcctccaacatcgtgagggatctcttcaggcgagataatctgacaaacaggtcatgaatttaccgtgggcccatctcgggaagtagagatcgagaaaactctacggtttttgtttcgaagctcacacccgaagcgacgcaagacgatctaaaatcgttgttcaaagaggttggtctttgtttctcctcttttgactagatgtcaacttttgtctttggtgggagcaactgatcaagattttctgtcgtgccgttccgattgtgtatatttttcgggatgagtacagtgtggagagatccgggagatcaagcttttggcaggagccacatttggaacagtggagtttatgaccaaagtacgtccttttcgttcctgttcgaggacaaatattcattgaacttataattctttattggaacctcttttgttgattgaaactgccaggaaagcgtcccagccgctctgacgcgagacaagaaaaagataaatgacattgaggtggatgtcagtgtagctgagggatcgacattgtatatcaccaacttcccagaagccatggatgatacctcgatgagagccttatttgagcctgtacgtcccgtgtttcagtatccatctcaggaagttaccatcgagatgtactgatgtgagctgaggcacccctcattcaaatactgattagtacgggacgatcattgagactcgatggcccggaaagaagtttaaagagagccgtcgatttgtttaccttcagttttcgtcctctgtaagtctggtttttgcttgtcaaatctcaattcgataatggcaacactactggtttggtttgataacatattcgtttgtttgattaaccattcaaggtatctgcaaagaatgcgttggagctcaacaaaaaagaaatcgagccgggcagagtattgctagtggcaatttcaaatccaagcgtaaaacgagttcgaacggacgcgaaggctaacgatagacagatcgtgatatctcatctctcaaaatttgtcaagaaggaggatttggaaaagctgttcaacaaggtacattttctgaataccttcttgggttgtcaagcaaagaggtgttggtcttcgataactcacttccggccgtggtcctgttgggtgaaatctagttcggacccatcaaagatattcaatctacttcagaggaggatggttacgtgagagggtactgtttcatccattttgaacaagaagtatgtctatttctcaattctttttttgccactcatgacaaaatttgctcagagaaattcgttttgttctgtgttgggggatgaaacagaactcggcccaacaggcgctttcgatgaacaactatgaattcaagaaacgtaggatggcagtgactattcctgattctcgacgaaaccaaaaacagtctgtcgcattgctgctctttttcactcacatgacctcactctgacgcttggtttgatactttctgaaagaatcgtgatcgagcattgtgctaggataggaaatctacctagtggagttcaagaaggacttctccaacaagcgcttgagaaagttgtcaaactacagaaagtctctgtaaatgctaaaaacggtgaagcaatggtcgaactatcgagtgcagatgtccgtaccacttcttgcgtgtttctcctccttcctccctgtttcaacttttcatatgtctcgagctgaatagtaaatcttggcacttttgtaaactcacgaatacaggaagttgaatcgttcatcagctctcaaaacggatttttcacatacgacggtacacccctcccgattgttcccggaactcagaaattcacaactgctccttctgccggatcagccagagaggagtctggtattcctgatgaagctacaccggttgccccaagtgaaccgatgttcagacctcctccaagacccagaccttctcgagcgagacccagacctggattcggaccggccggtagaacgggaaggaaaccaccgacaccggctttcataccagctgccgccacagctaccaaacagtcgactgagaatgtctcgggaaaagacgttccgatgtcagaagaacaggtgaaaccaaaagggcagaatgattttagggcgatgctgctcaaaaagcagggttgattatgaaggagaaggaaaatgacgaatctatgagcttttgtactttcttaaattgcgggccattgatttcttcttcttcttgattaaatctgcatctgttatcatgaaaggacaaggggaagaagtacagcctgctacaattgtatcacttcccctgaatcaataaaggatattcacacgttatacatacctctatgttgatttggtcaacgaagaaagagagcaaggctgggagagtttatctcttccctttcatgaattgatagatgcgatcacgacagaattgtttgtttggttcccctcgttctgttcatacgaatagtttcatccagagctcttactttcagccaaatgaacaacagcagtgacaatatatgaggaatgttgacaacacgaccacaagagaaagtttcatgaaatgacaaaagcacgtggtgcgttacgccggacgttgtatcaagaaacgacacttcatccaaaggatatagaggaaaagacgatggacagatgaacgtatgctgattggaatcgaattgagattggaatggaatatacgtgattgattgaagttcgatggacagaagaaaagtgtcctgaacgaaaaggaacgacatgagacgaaaagcgatatgaattgggaagagaaaatatagaagaatacaaaggaagatatagaagcacctggcatgtgttgttgagtcgatatttgatgttgtatgtctagcaataatgtaagaggtacgaggagtgataggggaaactaaagtacactgaacgatgtcttttttttcccaaaggatttaaaaaagattttttttttgaaatttgaaggcaagtgattgataactgatgtacgatagatggaggagaacagagaagaaatcggagagaaggagagggaaaggagcaaaaatgaaataagataaggacgactgaaagagaaatagaagagagtggaagaattcaaacagaaaaggcaagctcaagctgttttcaagatgacttccaagcgttccacaacctcggccatggtaggtcgttgcttgggatcttgaacccacatgtgttccatcagctcaacgatgtcgattccccaatgaccagagactttgtgagtcgaaggtctgtataatatattcagcgagtgagtcattcaagttttatctcaactttgaaaccaatgtcaacattgatttgagagaagaacaatgtacctctgttttttggagcctacggtatcgtagatagcatgctcgttcataccctgtgtgtgattgttcaaaataaaaaagaagacaaattcagttccctatactaattctctcacaaagtgcaaattgaggccgcttacctcccagggatactttttctcaggcttatgccattgcagcatctcccaaaataccatggcgcaactgtaaacatcaacttttgagtcgtacttcggatgggccgtccacatctccggaggttgataacagactgttcccactgtgatcgtcatgaatgagaaattcgtcatcagcttcaaaaattactcagattaaaagaaaccaacggcggtgtcggatcgatcaagaaggcagcgtaggacagatcaacgaagctcgatgttgagtgagagattcgagacacggcgattcacaacctcgactttgcgtggttgtttttatgaaggttttgctggtaaaaaaagctgtaattgaaatcgtacctaaggatctaatcaatgatctggtcgagtgtttaactcttgccagaccaaagtctccaactttcgcgacaactttggatgtgataagaatgttggaggatttacactttaagatgatgcagaccagagcgatgattattagcataagattgaaccgaatcaggagataacatttggcacttacatcgcgatgaatcacggctggttttcgggtatgcaggtagttcagacctcgagaaatatcaagcatgagtttgatctgtaaaattggatgcaaaaaaggatcatcagacaagaacagagagaaatagactgagaacagctgacttaccacaacttttttactcggcgccgggacattcctaatgtagtcaaacagatccccattctcgcaaagttcgctgatcatcatgatcggaattttacgatcctcagggatcgagactccaagctaaattatcatgtcatagaaaatggacggttcaggtttttatacgtgttcggagattgagatgcgtgttcagtacttcgactcacgaatttgacgacgtttgggtggttgaagtcggctagaagtttaagctccttgatatccactataaaagagcgatattgatgtaagttactgagcgacgtgttcaaataaaaaagattaactttacgaactttcactgagttggcctcgaaactcggctatagcgaccttcatccgattccgaagcttcccaacatagacgctgtcgatgatcatcaacatgagagctcgaatttagctgagcatcctcgaatttgttataatgaaataaattgagacttactctttgaatcctccacttccaaccttttccatcttaaccaactgctcgcatggtatttctttatcctctaatcccaaactttctagatccaaattcaactcctctgttccaataccaccttgatgagcatgtccagaaggcggcggtgtgaccgaagggtgtttctgctcgtgatggacatggccgggctggtataatgtcggtgttatcttggcattcgttcggaagactggatccttgtcatgaagtcgtcgtggccgacgtgtcttgggaggactcgtggaattaggtcgagcggtagaagcggaggagatggaggatgaatcatcgattccgtcttcgccttcgttatcacgccaatcaagtaaggcctgggcgagttgcggctttgtccctaccacttcgatgtctctcgaagaacacagtctgacgagagcatcacgacggagccgtaaaagggttgcatgcgtgaagttactgaggtcgatgtctgtagaatcagaaaagttaaggatgtatgattagcggcacgttcaaagcatctattttcaaggctggaaaatgaacaaaccatcgtcatcatccatgttaacttctgtctcgccatcaccgatatcaccgacctgggagtccttcccttcaggaatatattctccatcatcgccttcgactccctcttcatcatcctcgtcttcattgtccttgagttcctctgcgctctgcatatcctcatcgtcgtcctcatcctgctcgtcctcttcatcctctgtcaactcgataatcgttgggacagaaatttttcggagcccacttcgccgagttacgcgtttccaagccttatcctccacgaaatctccatcgtcatcgacttcctttttcgcagtctctttttcgcctgctttcgcttcttcctcctcctcggtcacatccagatcgtcttcctcatctgattgaacggcgctgccgttaatttccagggctccttcatcaacatcgctcacttccctttccacatcatcctcgtcctcttcttccgccacttcaagatcttctccctcggcatctccctccgagaacgactcgacatccgcatcactaggtggcgtcggaatctgccctcctctcctctgtccatccttgtgtttccctccccttgattttgtgcctttttgtatcgccgtcgatgacgatacattcaaatccgttggtttagtcaaaactgatgttaaattcgatcgagtctgccgtctcaaaggtcttgttcggtctgagtgatccttatccgacagagcggcagaagcagaagatgaagatgagggtggtttggacgactgtacagagtgtgcggatgatgcggacgaagaggagcgagatgatagaggcgaggttgagcgtagaacccgagctgcgtcctccctttctttgccttttctgcttcttccagattcggtttcaggatggtgcataccgtttatcacagtcttaggaggagagggttgaccagaacggactgacggaagagaggaggttgttgttttccgagtacgtcgggttgtagcgtgtttgggcgtcgtgcttgaagaaactactcctcttgctctcgtttgaacaggggacgcgccgatcatctgtgacgggtttttctcagaatttcttctcctgctggatttctgactcacagcagacccttggctccctatatccaaacccaagcttacgcttcggtttcttacgttcctcgatctgtcacctctctttttatgattgaatcctccttcctcctggtttgagcttccttcggcttcgttctgtgaaccatcttggtcatgttgactgtcggacgagaccgaacctgcggagctcctggttcgtccattgacccccaaaagcttcattttcgatggccttctgggggttggatctgcgtctgacgaatactcatcatcactcaatagcgaagacctcgctgatgagctagatgatgccgaagataaaggtactgaggctgaggatgaagtgcgacttcgacttcgagtcctagggccaaccggttcgcgcgcatctacaagaagatcaaccaggctggtcttcgttctttcggcttcattggagagttcgtcccatagtccggcaacttttagaagtcgaatgagaacatccttgcgagttcgttgaagttgggctcgagacgcttgatagattaggtggtcatcggctgaaagatcccgttgataaaagcgttgtcatacagagttcgttgtcaaagagtgttggtcaggatcctaaagataggatgtggagaaaaaacttacaaggatcgatcaggtcgtattctgttctagtggtcgactcggcatccgtaccgccagcctcacttgaaatgttctccgatccgatagacatatcacttcctcctgatcttgtactcatattcgtattcgcacttgcactccttttattcttccccgttgattcagttgtgccaaacacatccagctcaacgccctgcaacctaggtttcgccttaccggttgagccgatgagaccgtttgcgccggtaccagactttctacttcctcgtccgttgaccggacgagacacaagttctagaccgcttttcccaaatgcgactttcgtgaactctccttctgacccagctcgttttcgtttcctgcctaccatcctagatgataccgaattagacgtcagccctgggtaagtttggctagcggctctccggagcggtctgttcggaacatccactgaggcagatgacgagatggaaactgagctaggccgagcgagttctatatcagaagcatgtagagtagcatccggatcttcttccagttctgaggttgactcctggtcggagtctgtctgttgatctccagagaggcccggatcagacgcgtgtaaggatgatgacggtgatgacgacgacggacggacggtccgcttcggacgtttgagaggccgtctgggaagtaaggttcctgttgtagtattggaagacgtagaacgggaacgagtcgaacgactgacggacttagacgatgatagagagactgaacgagacgttgttcgtcttgacatccagaaagaaggggtatcagaaggagtaattgaagaatgaaggggggcacaagagggtatctctactcgatttttttgtcagagtatgtattattctgtctcatatgaatggccgatgacaaacagtacacttggtcagaacagacctgataaaaccgactagaggttgcttataaaaaagacgacgacaaacggttgttgtttgggtagcgaacgcgagcgagcggtcagaaagaagaagaaggttaagaagccgcaggtggaggcttggtgggagaacgggtcgttcttgcttagtcagctggcgccctttgcgtccacatccaactgtacacatgtataaacaccctcacacgctctttgaattcgctggttgcatggcttgcgtggcgatgaagcgtttgatatatggaggataggggatgattcatctcagatctctgctcatgaggtattcagtgaagatgatgattggcactctgtgccagagttagatctataaggcttcctcagatggcttgatcatctaaagcttgaacgtatccagacctggtctatttgcgctgcgacgacacctatgctatcttttctactcgaagtgtagtcaaaagaatgcttcaatcctgccagacccgttctgttcaaacccttgttctacatcttgtagattatatctcggcaagtggagaggatgatgttgtttattgagggatcctacacatctaacccagcgatgcgcggtcaaactcttaccgcgtattccactacaacgctctcggtcggcaccttcagacagcatctcccatcacccatcaccttcccatcaaccacactcttgaatcccctccataacccccgttccaaccaccccgttcatcacgtttacagattaatgagccagaaaacatcggtcatgaaggtctccaatgtcaaacatgaaccagatccgtctcatgtggtgagtgtttgtgactgtgactgtgactatgactgcaacatcctgaggtacaactctgcttatcgacatcgtatttctgtctcatttccttgccatttgtacggctcctctgcacgatcagaaacgaatcgttctggagtatctctctcatcatacgtacttggctactgcaagagcactttcccagcctcgctcatcaacttccaaaggaaagtcttcgcaaacctcccaattgggccacagctcagatcaggatgtacacccggccgacacaacgtctgtatctgatccgaatggagagtcagtccaatacatggtggacccagcctctgaagtagcagctcaagctttgataggagaagttaacccggatccagatggagatgaggctatgatggccgccgaggaagattcttcagtagcatcatcacagccgataggaaagccgtcagatccagggcacgaagtccgaccggatgatctagaggaggatcagatgaagtcaggaggattctcagaaactgagtttaagcagatagggtaccggaaaggcaagtagtcttcgcaagagatgttgtatcttataggagacacgcattaagcctgtctgcgctttcatcacctttcattgtccctaatatgcagacatcaagatcgccattcttaagggggagacttctttggcgctcgatctgatcaacaaacacttccctctgtttttcggttcaacctctcaaatcaatcaacctaccccttctcttggtccgacacattctcagcccgatacaaccccgtcgacgccttcccgtaaaaagtcaaaaccctcagcccctagtccgagcgctactatcgtctcaaatccgacgtccacattcaaaccagtgttggcatcttcaatacatccaccacatgtatacctgaaccttcagattcaaatctttattgaactgatccgaacgattcctctgccttatcctcctaactcgaagacccctgtcacgcctgtagattcacccaatccttcccccacgagctcggctcaatcaaactcgtcagcgttatcgacctcgcttaacttggcacttaacaaagcaagggatttatacaaccatgtggaatcgcttcaggaagaacgtgacagggactggtacagaaaagagcttcacggagtcactagcttgttcgcatacgtccccccagagacggcaccgacgaagaagtatttagaacgggaacggagagaggccttggccgaccagatcaactcagccatcttgagtgagtctttccatcacctaaccaactgagtgcgagatgtagtttagatgtcttcaacgactgaccttcttcttcttcaatcctctgagttcagttcataccggccaagcagctccgtcggtattggagagcctcgttcgacaaacatcagtcgtttgggaccaactttctgaacagaacgttgatccagttcctccgtggacgaaggaagacggtgcagagtgggaaacattggccagcgtgagtccgatgtctcgcctttatatgatgaagattgcactggtgtcccctctatgtatttgctcacttctctgaatcttgaacattctttgaaccttgaatcttctttgatgaatgattctctgggaataacgtatcggcagtacttcaaagaacatcgaacatttgctctctccgagttcctcgacgtataagctcttgtatcgtggaggccccatcacgtcattctatgctgctgttcatcagaagagaatccgttctcttctgatctcgcttggcgattagaaagagttgccgaacataggccgttgatgttcattcgatcattcttactcttgttttctctcttcaaatatgctttgtctcgatctgtcctccttcactctatctttgtctgtccatcacattttgcgctatccgttatttgtgatttcatatttttattcctcggtcgcttgtcatcagccggtcatcatacgtctgtccatcacgtcctttctcttcagcttcacggaaacttctgatcatacttcatgatcgttcccctttatccatgtcattttgtcttcaatgtaaattatacgatggattctgtcttgaacggaggatgaaagaccgaaaccaactcaagatcattcattgaagagaccactcaacccctatgagaaaaaaaaatggtcgtcaaacggtgggtctttgttttctggctcgatctgcggaaacagggggagaaaagcctaccgattcatggtgtttcccgcaccctttgcgttctcttcggtgtaaactgcccagttctcatccttcaaccgtttcttctcatccgcttcgatggcagagagaagaccgtcttgttcggaagctaactggaggatttcattggtcgttggagcttcttccgatgctttcctattatgtcgtcaagattattaatgatcaatcaggacactgacagatcaagattcgtgacgattgaaaaagattgaaaagaaagtagaacgaacccgcctccggtgatgactcttcctgtatcaaactcgttctttagatactcgtcgatcgacatcgtaggtaacctatgacttgctctgaagacttctgattggagtctcgtcctttcatctgttgatgtagccgatggtaggactgtgaaaggtctcagaggctatttgtttgttgtatgcagaaaaagaaaacaggaggagaaatgagatggtcaggacagacatcgatcacgatggagtcaactcgcggtccaacaagcagaacaaccgacctttccagacttatccataagctcgcctctcccatcaggaccacctctatcgaccctatccaatctccacgctgccgtctcgttgtcgtcgccatccctcattcttgacctgtcgtctgctctctctccttcacctggtctgaccggcgaaatctctgcaggcgcgtttgagaggagttcttcctcctgctcaatcgattcgagcgagtttaacgtttgagcataaagtagtgagagtagagcaagagtgtatgtcctggaagcttcaagatgagagtaggctgacgaagacgaggaggatggtgtcgaagggggtggagggagaagagagttgatcagcatgaaatcgttcgaagaagtatcggaagtcgttcggtttgataatgtctagtagtacttaatcgtcagccttttggtcgatctttcaccagagtcagaatggagagacaggcaagcccaaacatacctcgagactagatcgaacttgcttctcccatcggaactgattgatcttttcttcccgtcgtattgtaggatctctcgtgcctgttcttcgaagtttctctctttcagaaggaggaacgatagagtatgcgtccagaagattgatgaacccctggaagtcgatctgaaattgttcatcaagatttaggttattgagatatattactgatgtccgatcaaggaaagttgcctagtgtcaagaaaaataaaatgaacgaacctttgcctgtttcaatcttctcaccctttcatctctcccttcggttctgagccgacctccgacttcgccagctacataaccgacaaacatgaaggctaacccatgagtgctgacgtcttcgacttgctcgtttgtggagaacactcctcgggcgtcaagtagattcttggctagttgagtcgctcgatatgatgtttccagtgcggtctattttgtaaagcgtttccgaagatttctgactgtcaaacttaagggagacacaacagagacagacccgaaagctgagaacgagagagtgtacaaacctgggtagattcagcattcgtaggttcatcatataccccacctgccaggatcaacgctttcgagaaaagttctgcgagcgataattcttccagatcttctgcgaaggacatgtttggttttctttttcggtttcgagtttttggtttccggggtttactcttgctcttgctattgttgtgatggtcaaagaaacgttgtgaatgaagatcaaagcgttcgttggcgaatatactaaacaaccgaggatacatttcgtcagaccggttagtcactctgactccctttcctcaactatgaattcatttgttgagatgtcttgatatacacatcatgcaccagataacagaccatgatattcagaaggaagaggccagaaacccagtaagaaagtactgtagagtgagaatgtggtagacgaattaggaaaccaaaattgctcgcttaggatattttatcgtaggattatactgttcgcatatgcgaaaggtaagccctacatgaatcggttcagatacgtgccgttcgcaagatgttagttatgaaaccaaagcagatacaacatgaatgtaggaagaagacggaccaaagaccttgagaggcgacttctcccttggctttctcgaacgtctgtccagcggccttcccgtgtgcccaaatctatgagacataggtgatcaataatacatcgttacaagtcgattcttatgattataaagagacacgagagagagagaaagaagcatacctgtctgtagaagagaagcgagccgaacagctgaataacccacccaaccgaggcaagcacgcataatctgagatttacgacaaatatcgaagagagtcggaaggaagtttgcgttaagtagaaaggaaagaagaaggcagaaacacgaataaagagcttacacggcagcagcccagtgctgaccagcaaacatggcgatcatgttgatcaaacctgcagatccagttgatggaattctgtatgaaagagaggcgatgagcgagtgtagatgttggttatatcgaatactcttctggaatgactcacccaacaaccatgtataccgagaataagatatggaacccagcaaagatgtagtatctagatcgtcggtgaagttataatggttgagccgagagcagagttaatgcaatgaaggtggtgggaagggcagatctcacagatagaagaagaacgcgtgttctttggcgtatccatagtagataggtctaagaagtgaaaaggatcagtatacaattatgcggatctttgctaatatgatgaggaattagatcttacctgtaccaaagatacaacgaggggatgccgatgaacggaatatagactgcagcgccgatcatgtcctttgctccgtccgacgcgccagagatgagaagaagaacacaggcgacgatattgacaatcaatgtcacgaccaacgcgagccagaggctgtagaggcgatgtttgcggaacaggtgagttttcgtgtctgctactgctaaaggtattagtttcaaaggagcagggaaagttgaagacgaaactgatagagacgtgtcatgagcgcccgagactgttctggtataacggcatggatgtcgtggtgcataatcggataccctatgagatattgttgtatagacgacgacgacgacattaggcggaagtaaggtgaggattcaggctagatggaacacagaacgataacatacacttaggccaattattgggctggatgccacttgcagcgatctcttgttcccttcttgcgagctcggcctcgcgggcgttcaatgcggcttccctttcggcaaagcttggctgaacttgaggcagttctgttgaagaggcgaacggattctcgttgacagaccgactgtctaccgatggatcagcaaacgggttatctgaagctgtttgaataagagtatatatgagtgcattggacctgatggaaagagcaaggaggaaggggtgtgctgaccagaataggctgtgtatttagtaggtcaaacaaagaaagagaaggtgtttgattgccaaacggtaagcatatcgaccgaattgaaggtatactgcgctactgtgtacacgccttgatacagatggaatgcactcacccatgatgggatgctgttgctgcttgatggctgctgctgcttgagggtgatggctgcagttgcggttgcactcaatggaactcaaacgggtggaatggaggccgtcccgagattacgtaagcccagccatataccctcaaagtctcgccatcacttttctcctactactcatcgtttggagggtttatgagttggtgtattcagtatgagagtgcgcttctatcatctgcatatcgatgaatcgacatgagcatctattctctctagatgtatggtcatagaggcccaggtgatttgagtacatattcagcaccgccctgtatgtggtcaaaatcccacgtgatcactgttcctttgccccagcatcctccttaaccttcaccgttcaacttcttctcctttgttctccatccatcactaacaatcctcttctttttttcgttctttaggtctcccacactcccttcctttcccagccaacccagccctctcacccaactctacaccaccttcaccgtcttatacagacttacccacagcttctacagcaaaaccacattcaacaggtcagtttatctttgtcattcagctgatgttgcttcttctgttgacgttcttctttctctcttctgtctcttgcgctctcttcatcgcaactgcacacgttttcgcattgtttgcttgccggttgacctttaagacttcaaattctcaaactcaacaacctttcagcctaaaaatacaatgttcgcccttgcttctattgctaccatccttctcgccgccgttggtcaggccgcccctatccctataaggcgagccgaggtcgcccctcgagcaaccgctcctgccggttgggccactggatacttggagtcttacgatgtctaccacgctcgggtatgttgccgcttagaaacacgcatgtggcgttcgctttgttgacttgcctcctcctcgatctgtcttgtttacctttttttctcttcccccttgggaatgttgtctgatttttctaccgcagtacgactcgttctccgtaagtccagcgatcgatccttattcaaaccaaacgtcaattgactcatctgtcgcttccctctttcgtgaaaacacacatctagtgcaagacccagcacgggactactttctttgacgagtgctgccatcctcttttggctaccgagtccgtgtccagcttgtcctccatctgtgtcgccgcttccagctcgtctacctctgccgtcgccgctacctcctctgccgccgtcgaggatgacgatgagtgtgatgccgtcgccaccaccgccaccgctacctccactgtcgccgctaccaccaccgctatcgtccaggccgccgccgtgactactactgcctcgaccaccagcaacgttgtatcgtcgaccgtctccagtgccgctgcttctgccacgacctctgctgccgcttctacctactctggtcagtccaaagccgctatcggtagttacttcagtaccatgactgattcctttcattttcttcttttctggttaaataggtcacgctacctacttctaccaggaggggaacgccggtgcctgtggtaactacaactctgacgactcccatgtggtcgcgcttccttacgccctttacggaaatgatggaggctctccttccgacgtgagtctgactttcctaaatcagttgttgtttgcactccgctgatgtgttcacatgtgtcatgttgttgttttgaagtactgcggcaagaccatcaccattactcgaaagtccaacggtgctcagacgactgccaccgtcgccgacttgtgccctacctgcactacgacctactccattgatctctctgttggcgcattcacctcaattgcctctgaggaggagggtcaggttgatgtgacttactcattcaactgaatgtttgaacagtacaggctgcattttgtgcatagttttggtttttcttctctttctctttttcaagtgtcaaggctggaaccttcactgtcacatgccggtcatggccccctcatttccctcttttcttcctacctctctctcgtcgtcaccataacgggcgcgaatgactggggaccatcatctgaggacgggaaaccccctcctagcgaggctctttgctctaccttgatatgttggttccctctcgtttcgctgccttgtcaaccttggtcacgacgttataccgattacaaacttggcggtttgcccatctcttgacgagaatccgctcggggcgaacactggttgtttttcattgattccccacgccgctcttccttgttactccgtcacctccagactttatatctatactcggacggttgatccgtcgatctattagacagtcatctatctctccctattttcgtagagtgccaggttgcactctttgatcaatctttttttacaccacaaaacactgttattcactcaacgattcaatcatagtcgaatcacatgttcgtcaaaagtaattttgacaagacaaacaatctggaaaaacaaagttgtatatgcacgaaacactacactgatagctacggctgctattggtctacttcaactagatgagatccgttcatatcctaacccttgagcctgctgacgtctacgacttctaaaccaagcgaacatcgtcgagcgttcgcccgcctctacctcctcaacaccatttccatccccattctgaacttcctttgctttgccatcaggcaagacgacgtacgttcgacctctccattcaaccgtattacccatcatcgcaacaacccacactgggaacgccaaacactctctgatcatccatgctcccaaaagttgaaatcgctctccggattcttcagatggagtgggagacaaggaggtcatcactttccaatccaacgtggcccacgaggtccagtgaatgatccagaaagccaagaacgctttccaccaaacaaggttcccaaagaacgattcagacagatacgttcggagggcccagaaggtcaggaaacccagaaccacgctctcggtcagcggctcgaccaatgtagcagctttcgtcatttccttacggaccctgatccaccggacgcgtctccagaagtaatctcggaaagtcatcggtccaatcaaattgattgccacatccggtgtttcaattgaatgacgaatggatagttgatgcatcagggaaagagccaacatgttgtcttctgccaaatatggtgaaaacgaagctagacccagaatcggtggtggattagaggccgggtctgtgggaaggaagaaagcaagtgcgagaaagatcaaaacgggtggtgcacgaaaagagaaaagcaaagaacaatgaaacaggcatggggaaaatgacacggacttggaggttttctaccaggaatgatcttttgcacatcggatttcagataaaagttagatttacccatgacgcatgaatctaattctgttctgtaagatggtttcaatttggaatcccaaaatgttgcatctgttagctcatcaggattcgtacgtctgttgcacataaggctacttgaggaagaagaagaagtgctcaacttgttgattgcgagatacatcttcgcgtggttcccgttcaagaacacacgttcgagccaactgcccaatggtctattccctctaggagggatcaccgcaaaaggtacatgatggactagccccactctttgcttctcagttttgtgtccagaagacggcaaatatgaggtcgaagatactgaggaagaaggccctgggttaagaagaaattgatctatcgctcgggacaaggtctgacgagaggggagaaggattccagaatcgagcacccagagatggtcgtattttgccagcgcaaatggtttagctaaattgttgatttttgggtttggtcctaaaggagtttcacctgtgacagtcatcgagagaagaacgttccagtcatctgtttaggaggacaagatcaaagactcaaaatgaaacagacgaaccgaccaccactcttacatctaccccgtcctcccttccttctcttgcgccgaacctgtcaatcaactctcttactacgcctaacgcgcggtcattctcgtctgccaaagaaaaaattatctcaagaggcccaggataatcctgggtgaaagaggaaagcaggttttcgtatagatttggatcaagtcctttcagcggtcgaagaatggaaactcctggcttcggggtcggtgtgtctaaaggaggtgctaccgggcgaggacgatagcgacgaatactgtatttaacacacgtgaacaaacatacaagtagtccagatatattcccatcagcatcatgctatcttccacctgtttaattttcccaactaaacggctggaaaagagatgagagaacttgaaaatacttacgcgacggagagccctagaccagaaatcgcccacatgacgacataccagacgagcaccagcccggcaagtccagatgtcaaagaagaagtccattgatcatccaacagatcggaacctgcggaaggagtagccgttgccactgcagacggcgatgacgccattgaacgaagagagggttgacccattggaaagggcggcatggttggttgatggatggagaatgacgggagaagcggggaagttaaaaacggaacctttccgctaccaacgtcgacaccgatctgtccatactatcttctacacgctctcatcaatggactgccctatactctctatcgcgggctctgacccggtaagtctgtctgtacttggttgtatatgtgcctatgtgtgtgtttgtgtgtgcatgtgtgtattttcaactcgctcatctatttcgtctacgtagtccggaggcgctggcattcaagccgatctcaaaacgtttacggccttgagcacatacggcatgaccgtccttaccgctctgacctcacaaaacacccaaggtgttcggggagttcattctgtaccggccgaatttgtcgtcgatcaggtagatttccatcacatctattggtgtctgttatatggtgttgacaagaagctgatgctcatgatgtgtcatcttctcatcccttcttactctcggtaaaaaaaaaaaaaaaagttgaacgccgtgatgtccgacattcctcccaaagcaattaaaacgggcatgctcgctgatgcttccatcattcgatcgctctccgaagctctcaaatcaactgcctcgccccgcgtgccgctcgttatcgacccagtcactatatcgacctctggtcatacccttcttcctactgatgcaatctccgcgctcgtcaattcgctgatccccttgggtacattgctgacacccaatgtccctgaggcaagcatgcttctcgccgctgcggatccttctcggtctcaaaaagaaatcgatagccttgaaggcatgtttcaagcagcggaggatttggtgaaattaggctgcgcgaacgttctcctcaaaggaggccaccttagtttgtccttggcggctgtgaccgaacttttggatgaagaaggagcaaagaagacgctggaagagaaaactaagtgcgagatccaggtaatctggcctcaggaaatgtcaatcaagattcttgatgccttagcccccggtaaagaggagcaagataaaaaggttgtgatcgatgtattgtacgagccggctgagacccgaaatcaatcaaccgggcgtttcacagcaatcgtcagtccactagtcgagacaaaagatacccatggtacgggatgcacactctcagctgctttagctgtctttttgggaaagggcgagacgggtacgtatgctgtcaaggttgatcttgaaacagagagtatattggaataccccacagcgctgatgttcgactaattcaaatctatttgacagttcaatcgtcgacgatactcgcggtccagtatgtaaagcgagcgatcattgcagcaaccttgcatcaagtaggatcaggcagcggaccactcgatcatctccattgcatcacatacaagccgcttcctgcgttagttcatcctgtcatcactgatataacccggcagattttgatactaacttgatttgatttggcaaatcaattccagtccgactgcgttaaacccttatccattcacaactcacttgatcagttcgataaagcccctctggaatcagtacgtaaaccatccgtttgtggtccaattgggcaaggggacgctcgatcgaaggcgatttgaaaattacatcaagcaagattatcattatcttcgggtcggttctttctcttcttcttcttcttccttcaatcaattcgatacgcgtttcatgcccaatttccttcacaaacattggtctcacgtttgtcttgagacattcaaatagcactacgctcgagcgcacgccttgctttctttcaagaccacagacttcaaggatatcaaagcgttctctgaaattgctctgcatgtagctcgagagtcggagatgcatgtcaaagttcgttcttgctcttaaaaatttcattgaagtttcccaagccatcatgttctctgacattctgagtaattctttttctattcaaatgtttttgcatacgtagttctgtgaaaccttttcagttgatcttccccagctactggcgactcctgaaacgccggcgacctccgcctacgcgctctatattctcgatgtcgggcaaagagggtccgtgatggatcttttgctcgcggtggccagttgctgtttaggatatggtgaggtcggattgatgctcagagaaaagatcgataaggcagaagatggattttttgaggagggaaacccatatcagcagtacgtacctgctctctcttctccaatcttgctagcttcgagatatcaagaatatattgacaagtttggtgaaatcaatcggttccccatttttttttcctttctgatttattctgtaaccaacagatggataaaggattactctggacaagaataccaagatgctgttacttcctccatcagtttgtccttttctctatagtcttgagaaatgagacgaacacttctcgcgctgctcgaccttctgactgacttctgtctctttcaacggtaaacccatctgaacaacagagacgctcgagaccagaattgctgagataaaccccacagccagtcgacttgctgaactcacaaaaatctgggagagatgtaccaggctggagatcggattctgggacggcgccatggaccttcaagtggatgatctatagatgagcttttcttcctacaaaactttcatcactatcttcccctatctttcacttctctttttttttcctcttgtcattgctttgtgttatagagtaaattattcatcacttgttagattctcaggatgatgaatgtgctttcttctttctcagcctcattgacttttgcactctcaaatctttacctttccagtctcgctaagatctgaggaaagaaaacacaaccccatatgacttggcaaaccaaaacaaacacgctatagcttctacagaaaaggttaccccgcttacgctctcaggtcgttttattataaatcaggtagagaaatcatgtactggggacgatatgaaaggagactgctccaataggtccagcatgtttccatcaagattgtcttcatctacttcctcttctgatggaaacctacggttctatatgtgaagatggcaaagaaagagaagatcagtagtagaatggcgaaataccagcaacagatattcgtgaatagtgtcggatatagatagaccgcacataggtgtgtagaacaagcgttttgcccaaactatctgactttagtggatcaaagaatccatcttatgccattggtatgctgatagtccgcgaaagaaggatgattgactaacctcagatgattccgaattatagctcctcgatgcatatctggagtttacatcatctcgttcgattgtgatggtttggtccatatcttctctccacatcaccgatgattgatcacgttgcttccgtttggatttttcgactttcgggtccttagctgtggggtacggtccatatttgagttcacttgttgagagatctcgaggtggttcatgaagtttacggctagaagattcagaaaagggcttaggcgaggaggaagaagaagagagggcaggcaggctggagatatatttccgagaagccgaaaggatcgagggaagctttgtgatttataatcacgaagagtgatcagagacatgaccctagggatgtcaaatgaagaggggccgctcacctgataaccactctcaagcaaagacctcatccccctgaagctcttttctgaagaagctatacgtaagaatgtctcacacctctgatggtgtgcagattcaacgtatgagacatgattatgcttcaatctttcagccattctgaggaacaactgacctttttcaagtgatttccgctcctactccccaattcctcaacagctcctcttatgtcagtcacagcttgcccgcttaatacatcagactttacacatagacctaacaaagagatcaagagagcttctttgacaggttctggagatataatgaccaaattaagctcataggtcagtcgagatgacaattgacttaacttcatgaaaacggctcaccatccgaagtttctttcaggcaagccatcagcacatcactcggaagagatgcgctcaactcttttgagaaaccctgggtatattcacacgccagcactgctaagatcatctgagttgtcaaggactttggagtcgtctcagatgactttgcgaagaaagcgcccaaaaacgcattttgtgcttcagtgccggctacatgacagaaagagagagagggtattatcaagtttcagcctgggttgaaaaatatacaacgtaaaccgttccgatagttaccattagatataatgtttagtacccgaccaacgatcgattccaagactctgtctctatctttgtcgtctttattcattggtttatgggcatcactcttcccttccagaatactccacaagaggcgtgcggtacgagtgccatcatctgagcgagtcaagggaacgcccaccagtatttccaaaacctcgagggatcgagttttcagtatttcgagattagagtaggactttgatgttgggaaagaagctataattctgtcaaggtgaagttcaggaagtgaaggtgacagtcggctcaaaatcttcaacgtctattgatcagaagggtcgatgaaacagtaagcaagatgctgtagataatatcagagtatactgtatagatttgacgaaccagctttctagcaagctcgtcagtactattaagtccattcatgatttgttccattcctccttcattgagtgagccctcccagacgctgatatgcccactcagagcttcgagacatctcaaggcgaaaatgtattcgttaggttgactagagtgaagggcgctttgaatggactgaaagaatgaagattgggatgttgctgggagctgcatcagagaagaagagaatgattctggaagctggagcagaaggagacagatctggagaataagtgctagaattgttcccgtttgatgtcatcagataaagccttttcacttgaccagagggttgacagaatgtagagcctactttgtcggtgtgcctgagagcttgatgcctcgattgaagtactcagtaatttgactagatcatctccctgacttcaggaaagaacaagaatagatatcagtgtgtgaaggtatattcaatggtaacgactatcgcacgaacgttccaaaattttcgaatgagaggagagcaagtgtttgaatgacctccagttgaacagatggcgataatccagtactacatctatcaacattggccgcaaggcatttcatcaaggcaccaatagcaacgtattcagaaaccagcgaaaactggcccattgaagatagaaaatcagttccacgcgtgagactgtgttttgatacttgcttgaacactcacttctatcattcgtctcaaagctcgaacagcatgaagtgctactccagtatctttgtcctctaagcgcttccatatcttgcgctctttcaatcccataaggacgtctggtgaatctttcgacaggcttgtaagagcacaaagagacaaacgcctgatatccgatctatagtgtgttcaggagattcgctacgaataagaaagactgaagaaccacacaattggagaaacaaagttttcatatgactaacgacttgtgggagacgagatgaaccagctgagtttgaatggcagggacgatatctttggacggattttgaatgattgagtttaaggcgagagcgatcgtgggtacatgagatgaccgaagatcctgtagttggacacatggatcataatcagaagacaattaagctttctattgaaacgagatgaccaactttgaatatagtattaaaaagaagtagtgagaagtcatctgttggcctgagggtgaggttcaggtacagataacctgcagtcaaccaatattcaggaggtcagttaatagcatcatgctcacaactccagaaaactatgagtcagatgtacctgctcttctaaccgaagctggtttccctccttctgccaggttgagagcaagaatgctggcaaaatcgaggttttttctggtagaatctgtagcgagaggttgtacagttgcgatgtatagcatgaagatgagacattccctagccgaagtctgcgttgttgcagacataccatgagatcgatgactctatgtggatgttatatgcgaaggaaacttagtcttacctccctcagcggcttctttctctgagtgaccttattccggatggtgtcaatctcgtttctgcatataaggtcgagctgatggatggaagacgcctgctcgattttgtgaacaaacgcatagtgggccggcgaaagagcggaagagagcaggtaggatgtattcattttatattccgtcctggcctttctatttgttatgtcgctgttatcgatgaagtctgattgagaaaagagaaggtgatgaatgctatgaaagggtttgttcaccatgttcatcttgatttccatctttccatctgtttcggcgtagagcgagattcctatgtacttaaataaattcatatatcagaaaaagtcacagtaaataattagagacttgaataccctgctggtttgtctagcaacatcaccgtcattgtcagatggacaatctaagcgatagtggtagcggcaggagtgagggcgcacctttcccaaaaccgaaatcttcggacggcacatatcagcttcgtcgtgagtgtgcgcttcgttcttatcagtagccttcgttccgtcacttaaatccgatcaaatttcgttgtctgagctgatgtttccatttgaactcaaccgaaatactctggtagaacaacttcagcagctcggtctctctactcaaggcaaaaaagaaaccctcctgaagtctgttcaatacgacttcgtgtattggatgcagaacttagggattgaccaacgtttttgtcatcgctgcctctctctttacagacgtacgcgcaaagcttggaatgaacttcatggcagtcaagaggtcacgtcagatggactcgatgaggaatctttgactcaagatcagaccgatttcttctcaacaatcaaaggcgtaggctctatcatctactgatcaggataacgattgatcgtagacgtagctgacacttgcactctatggccggggtcgaagcgataccactcgttcctcgttcttgtaagacacccgagtattgtcgactgctttgcctcatgtcacttgctaatctcaatcagtctggaatcaatcatcattttgctggacaggatatcgaggctacttgcgagagcggtgatcataaatttggctatcccaacgaagtgattgttcgttcgttcaatattcaaacagcatgttcatcaacgtctattgtgcggcttacagggaatactcatccattacaggaacttccagtagtgctactgaaatggcgcgctcgtcaaaagacagacttaagttcagagtcctgtaaagaatccactagtgtcacagttatggagctatacatagaggatgagtttcaatcttatgtccgtccgactttccagccgaaactatcaacgtattgcacaaccttaacaggaatcaaccaggtaagcgccttgatctctcctccttttccactctcccttgtatcgtttgttcactctgtttctcactcggcctgtctatcacgtcaccgctaccatggattttgaaggagacagtcgatgcagcgcctacatttcctgaagccatagtgaatctcgagacatggatggcaaaacacggtcttgtgtcgaattctaccttgaaaaattccgagtcaaatgacagaaagaccgaatcgtttctctggatcactgacggagtgagtctcagctttatttatttcattcttctcctagtttttaacagaggaacaaatggaaaaatgtagagaagactcatgtctatatcttgttcttggggacctacttgcagccattcgacattcgagactttgtttgtcctggactaccttttctcacagtactgattcctgtgcctttaacacccgtactgactgatcaatgaaccgatacatgacgtaatgtggattcaaaacagatagctaaacaatgctttatatccaatatcgctatacctgagtacttcacaggtgacgtccttgacatcaagacttttctctccaaatacttgaccagactctggctagaggaacaggcggaaccgtcactttcttccccttcatcaccaccatcgcctctcacttcagcatcatacactgtagaagaggaaataaattcgaccacagacaacataaaggagagttacaccacgaacacatccagttcctctacccttcttccttcgacgtcgccggctgcaaatcgagcgtctatcaaccccaacatcgacccttctttcctcccttcccacttgattttgtctcagtctcaaccctcttcttcacccaaagcccctatgacaaaaagggaacggcatctgacaaagatgcgtgcgctagaagagaaaaagaaagatatgacttcgagaagaagaaagagtggtaaagggaaaggaagagaaccgcctaatttttttgggacgataaaaaagaatttggagaagctaggattgggtgagtttgaaggcagacaacattctggaatcgatgtacgtttctatctccttgttttgtctcgttttgaagatccaagtcaaggaggttgaggctgaagatgaatcttgtggcaaaatatgtcaaaatacgataggattcaagaaatatcgctcgtttattgattgagctcgctcgtcgaggcgaaaccttatgtccgaacttatttatcaaatctggttcgaaaacatggccttggatgggtgttgaacgaggagaaatcatctggaatgtatcccgaagatcatgaatatatgtgtgtccctgcccctgtgcctgtaggcgtatctacttcgtcttctctttctctcaacatttgacccgtcgctgtttcccagtatgtacattgaaactacgatcagaaaggggggccattgatacatttcttatgcacttggttatgatacaagcaaaatgagcagtttcttttcttcttcaaacaaacagttcctctttttttcacgagctgtcaaacctgatcgataaggagagaaacggaagaatataagcaagagacaaagacacatgggtgaaagaatcagcgctacgtacaaattttaagagctaaccgactcttgttttcttttgagagcccagatgtggtccgagatgtatgcttgggcttctagcgatgatcgtggaagcttagatgctccgtcaattgtccctaggcagttctgtaagatgacaaagcaagaggaaacgaaatgagacaaaatttgcaagcgatacgtagttcaccagaaaggacatgaacaagatccctgactttttctctacacaaacatttgaacggcctgtccatctcccattccgtcgaggggtagaagaagctaagggcatcaccctcagagaggtctctcaaggcttcaaggtaccagtcgtcaggattggatgtgatattgaatgcgacatttgggttacatgagtgattgatatacaatagagaagtgttgagttcgatattgtctgtcggtaacactccgacttgaacggtagaataggccttctggggttctctgaataaatcgaacggacatctgatcagtatttactgtgaaggaaaacgagatcaaggcacgagaccaaaacttgcctagtccatccttgaatctttgtgatggagtctccttttttgaagtctttattaacaactaggtaagagtctgccgtacccggcctcaaggtgacggtgaggaggcccggatgtgattgaaggagttccgcgctaggatctggagaagcttccgcctccgaggtatatcccgagtcgatgtatgccatgttggctttttgtatggagatagtcatttttgtgtgtgttttaaaggaaaagatatggacggcaaatggatgagacgagtcaaaagcgagcagagtggatagagtggatagaatgagtaagatgatagatgcaacattcccgtcggttcggtcttaagaagtctgaacggaggggagccggttctggctaaccttcggttaaactcgggccggatgatgccggcgagagtgtcgtcgaatttcctgctcgttctctcttctcaagatatctcacgtttgtctcagagttctctgagatcatatatttgccatccaagacaatgctcactcaggttgcttaaacgttgtaaacagatgtatgtgtgcgtgtatgtctctacttcagcctaaaaaaagggcgatcctcacaatgagtcatcatggtactcagtcaaagtatctaggcatatataatgaagtatctcggccattattgagttgcgttgtgcttcggggtcaactcatgtcacgtatcttcatcgttctcgtgatctgcttgtaacacatccacagaagaacatgaccaattctatccaaagtgttcgcaatacaatgtaaacatcaaagcagattgtatactgaggctctctggatgcaatggccgagtacgtttacgctgggaatagataggagatccgaatccttgtgtcgagaaagccggatgttatgcgatccaatatgttggttgatcagatttatatgccaactatcttaatatctcggttagagcgagatgcagatgagaagtatatgggaagatttgaacgacaaactgatagaggaactagtttgaaaggaaacgcatcttctcctccagaggcttagaggcaaaacgatccatctcggcgttgttttctacattttctctcatgatataagaaaagagcttcgaggaccgacaaaacacagagcgatggaagtatgcaagcaaatggacatgcgtagtttgagttcttcggattcaaccaaatttataaccctagcaaaagagtcatcatctggatcaatcatcttttgttagctttgcctaaccttcatctcaaacatcaacaccagctactgtcttgactaaatattcacaacaatcaagaagagaaggatagaatcatacatctagtcagacaaacatcatacgtccgcgatgtcatccagaacttcatcagcttcgttcctcgtgattggcatgctcaccaccggagctgcaaattccctcttgaccaaatggcaggttcgtgcatttcagctgaccatcacacgactgattcttcatcgaatctttctttcccaagcaatagaccagctgtatactgttgcttcactatacatattgttaattctgtttttcgatcttcttttactcgatgcggctcattggacttacaggatatggaatggttcgtacctggatagccggtcacagaaaggattaatcacaaggggtttggatgatctattgactggttgtatctcgttttctctaccctcatatctctatggatgattagtgtcgaaaactgtcagagtcctaatccagcagaccgattagcgttcgaacagcccgtatttcagtctctgagtatgtttctcccagtcattcttcaacttgaactataatgatgctgacgacaacgtttatgtttcatcacctatagacatgttcgctggagagagtgagcccagatcatgctcatctaaccattctgatttatgatatatcatgtgaagctgactaagatctgtttgcattaaaaagtgctctgtctactgcccatcctatacaactaccttgccagcccaacaagccccttctcaggcaccactagagccgtgcgcctcttccaaaaattcggccggaagttgactcccggtgatcgtaatgtagaaaactatcaggcgctctcgcaagatgaacgagaccgtcaggaagctaccaccgctgcaggcatcgacgatgacgacggcgatcagccgagtccgttctcagagtcagaagaggtcgaaaaggccttctttggaacttggaagatgctcctgtttttctttcctgccttttgtgatatgactgctaccactgtaagttagatatctccacatccaataattttcgatgacccagctgatcctaccaagttgtcatctacaaacagttgatgaacgccggactaatcttaacaccggtgtcaatctaccaaatgacgagaggctccctcattttattcgttggggctctcagtgtggtttttctccatcgtcagtctgtcctttggcttgcttgtattatttgtttggtcattagagaaggctcacattatatcctgttgaccaggccggctgcatctctatcaatggctttccttggtcggagtcatgatcggagtgacgctcgtcggcttgagtggctctctcaaaccctcgaacgaccatggagaagggatcgtcttacaagatgaagagaatagtgctgcagtgtttggaggtattctcttgattctctttgctcaggtcagtctcagcttgcccatcaacgagagctgctttcttcgaatactaaaaaaaactacatcatatgaacctcgttctcagctgttcaccgccactcagttcgttgtggaagagaagatcatggcaactcattcggttcctcctttggtgagtcgatatttgttttaaggggtcttcgtcatccttcattgtatgtgctcatagccttcgattgcacacagctcgcggtcggactggaaggtttctttggctttatcgcaactgctatcgccatgcctatcctacatattcttgtaatactttgatcaattatcttcgtaccttggttggttcaatggcctgtcgctgcagtctgactgaaagtcatctttcttacgcctcatctagttctcagaaaagagtgattactttgatgtctacaaactctaccaccaagttaccgagcatcgacttgtttgggcgctgtcgctttgcatgtgtgtatatctcaacaggtcaaatagctatggacgtgattgagaatatgtccttcttcattcttctttcttttagtatgttgtccattagctccttcaacttttttggactttcggttaccaagctgctgtcagccaacgctcggtctactgtacgttgtttctgctcatttgaactcgtatcatgcctgatctttctgacctgatatccatttgctatctgtcttcttcagattgacacgtgtcgaactcttctcatctgggctgtctccattggaataggctgggaacatcttatctttccttccacaattcttcaactctcgggattcgcatttctcgtttacttcactcttatcttcaacgggatcgttcagcctcctctcaagagcctccgagtcactcctcaaggagagatcgcccttccaggaggcgacgatgagcttagagaggaagtattgggtgttacggcagagttgccagcagaggggctggctggaagagtcgggttggatgtggtcgacgtcgagcaaccgtctcatgaaagcgcgactaggtcttgagatgttgtctccgttaaacactttggtacactgaattcatgtagtttttggcaacgtcttatatagggtcgtatcggtaatgtctctttctcggccgtgattttgctttagcacagccacacctgttatcgcagcgcgtctagcttaattttcggggcgagttgatagccgaacaaacatttttttctcttcctcttctaccttcctttctgatcatcaccaccattgatatcgttcgtcctagatcctatatgcttagtgtatagatttggttggcgctaggtcagcttatcctgcgagttcgtttgataaatagatgtctgctccttccgagatcgcgaaccctcctgctaccaccgaggtgcccacgagtgatgtcgctcacttgaagtccaagatgggtcttcaccgtgcgttcttttctaccgcaaatcctccttcataccttccttatcatttaacttatatctcctcaaacttctgtgtttgtgtacgggcttgatactgctattgtaattgtgtcatcagccaactttcctatcaagggcgtcacattcatcgactttttgcctatccttagggatccccaggatttcgagatgctcctcactcacttcttgaaccacatctacacggtcaccatgcctaaggctggtatcaagaagatcgatgccatcgtcggtttggatgcccgtggattcctccttgggtgagttctgtcttggtttttctcctcttatttccgcagaagaatatcatagtgagggaagataagagggcctgactttggcgacgcgttttctcttgctatcatgatacaaaaagacctccgcttgctcttcgattgggatgctcctttgttcctgtccgaaaggccaagaagcttcctggcgcatgccacaaggtgacctactccctcgagtacggagaggacgctttcgagattcaggagggttcccttccggagggagccaatgtgttggtggttgatgatttgattgctactggtggaagtgcttctgcggccggacagttggtcaagaaggccggtggaaagactattgagtacttgtttgttgttggacgtaagtttgtttcgatcatttgaaccatcctctcttgcagcctgttaacagctttcattgtgttccatgtctttgttccttgttcctctggaacagtccccttcctcaacgtaagttctcgttcaggatcaaacttttattgatcctcttgactgacttttcttttcaccgtgcctttgaattttgacagggagataagaagctcgatgctccttcctactggattgtcgagggagaggattaaacgatctattttgctccgccttcctcccgttctcttgccctacccttctttataaactttgaacgattcgatagatacaaaacactgcttattcttgctcttatctttgagagttttgaacgatagatatatgaatccttttactgttggacctctgagttcttgtcaaccgggtcaaagacttgcgcatatagtttaacttgagaaaagggtttaaaaacatgagagacagtggaaagaaatcaagatgatcatatcatatcgttttactaagaatctcataatcgacagattcatggtcaggaaactgggatggcgagatcggatctatcataaacctgtcctcatttcaagtcatcaaaggaggcacgagagagtgttaaatggaattgttggtgaatatcgaaatgagtcacaagcgtaccctattgattcgtagaaggtcgatgctttcgcgttggctacttggtgaccccatgagaaggaataacaaaccgttaaaaacatcgtcatcttgagttgtccaagagcgaggaaaaggacaaaaagagagagagagcaagacgaatagagaggacaaggagaacggacctttcaaaagggtcaaaaccatcttccgcatatttgtcttcttgccaatctctcctgcagcattcacgaggtatctccctaatcctgatcgttggaactttggattgacggaaagctcatatctacaatacgtgttcagtgtcggtgtaagcatgattcatataggcttagagacaatggcgaatgagggaacaaacatgtagacaacagggtccaattcatcgtctaatctctcctcctgatcgaagcgaaacatgatgtatcccgccatcatatttgatttgacttctctcacgatcgcgtatcttgacgacttgtggaacaattcttttttctttgaggttggattccagccgaaagcagaatttacgtatctgtatgtgtacgcgttcgagatgttcattgatatctatatcgactagcacgatgagaacgaagacaaagacatacagctgacgcatattcgtagaaaatatactgaaaatttcgtcttgctctgtctgtaagaaaggagctttccgaacaatcgtcttgaattcgtgctgaccctgactcgagctgggcaaggaaacctcggatatgtattgtaatatctccactgtcgagagctaaagggtgcgcggatatgtatctacagctttgtacatatactcgaatatatgaggtgagcggaatcatttactcaccttctgagctgaagcaaccaaactagcagaggatgatgccgataattcttctgaggacatctttcttggctgatagttggggtctcttttgggtttggatgaagagttagatcagatgtattgtgggtcatggctgactaccgatagtcacccaggcatttcttcatacccttcttgagcgccgcgatgtatgcacggtgtatatgcgtcgagtttcaatatgtcggaattgccatgagaaggcgagtctgaatgagaacagattggtcgtcttatcgtctggtcgtggagatgcttgatagctcgataacgagtatggaacgaccttgcaaggagaaggatctttccatctcctttttttcgtgatcgcttttcagtaggcttcctaatcttttcgaaaacatttcagttagcgcaagacgagtctcgcatgtctacaacatactcgcgcgtacattaacaacctccttacattcgacagatcaaagagcaagaaaatcgaaagccttgaactgatgagcataacaaccaagggcctgttcttgttatatttcatgctggcatcaacagtagttggtatgttgtatcctgagaaggtcgtagttagggttattcacagcccaggccgatgacaatcactcttctgcccaatctcagcatacatcagcgtcattaccatcatcagcgtcattaccatcatcagcgtcattaccatcatcatcgtcatcagcatcagcatcagcatagccagatgatgtttctttctgcagctaggacgaatgtcccagctcggttcatctctcatcaatgcctcattcgatctccagccagtttactttcttccagatgcctctctctctccttccctcggtccgctaaagagcaaaaggaatcagaagagcgattgcctgagtcgacactgacgactgagcaaagcacaaaaccacacacgacgaccgattcaaagaagtacgcaagcacactgatcctaccaaagacgacattccctcaaagaccgaatgtcaagactcttagagaaacttttggagaaaagacgatgggtggattgtatagatggcaggtcagttcattcgccgatatcggacgcaacatcagtggaattatcactcgtcttcgtcatcaaaaagtattgattgtacttggggttcctcttgatgatgtagagagaacataacaagggaggcaaagaatttgtttttcttgacggacccccttatgctaacgggaatttacatatgggtatgtaaagccatcttaaatcctgttactcttgttgtttgcatccattgacctgaaagtctacgcattcttggccgatcttttaggtcactccctcaatagaatattgaaagatattactaatcggcatgaagtgcttgaaggatcgagagttaattatgttcctggctgggactgtcatggacttcctatcgagaataaagctctcaaaaaactagacgtccgttcttccctttctgtcttgactttctttgtctcgtggatttgatcacatacacacacgtaatacaatctccgtggttctcattttctcgacaatagaaagactttcatgacttagctccgagcgagatccgatcagctgccaaaagtctggccgaagaatgcgttcagttacaacgaggagaaatggagatgctaggtgtgatggccgattggagcaaagagggaacgtatcggactttagatcatgagtatgagatcagacagctcaagattttcaagatgatggtggaaaatggtcaatcttgtctttcttctgggtctcaatacttggtcaaatgcgcaccgatcaactaaccgaagccaaccctgatgattgaattcttacgaacaggtttgatcaagacacatcatcgaccatcttactattctccctcatctcgaacggcgttagccgaggcagagttaaaatacgtagaagatcacgtctcgttgagcgcgtacatcaaattgaacctggcacaggctggatctaagttggagaaagtgctcgaagacaaccagatcgagaatcagaatgatatttcattactcatttggacaacaacgccttggagtatggctagtaacatggttcgtcttctaggtcctgattctttttccagtatagctcttttgctcgttcaaagtttatttcgttggtcgatgatcaatgcctctgaatctgtgtcttcttatttacttctttattgaaatttaattattacttccgacaggctgtcatggtgaacacaaatatggactacgcacttgttcgatataagtcgacaggacagcttctgattgctgctcaggatcgacttggggatcttaccaaggatttgggagatagcaacagctcaacggtagagggggtttttgagaagttagcaactttcaatggtgaatacgaatcaagatacttaagtcatacgaggctcatttccatcctcatatgaaagcagaggccgatcagatattgttcagcccattaattgtgattactctccttttcgatcacaggtgccgatctgttggacaccacctatcagcccgtctttgtcaatacgccctcatcggacaacgcctcttcaaatccttctcttctacgcatcatagcctcttctcacgtaacttccactgtcggaaccggtcttgttcattgtgcgcccgcgcacggactcgaagactttgttacgttcaaggaacatgctgctactggcggattgtctcatccgaaagatttggtttgcccgatagacgcggatggaaagttcacagatgatgttttagaagacaggttggtcggcaaggcggtcttggaagaaggaaatgaaattatggtagacgttttgaaggacaggggactgctattgaaggcgaagaagtatacccataaatatccgtacgactggaagacaaaaaagccagtcttgatcaggtttgttttcttttgtccttatgttgctgatgctacggccatcttgttcaagatatcccatcgatatctaactctacttcatttggcttcgggttacaggtccagctcgcagtggttcgcaaaccttgaaaaagtcaaagactttgctttgaaatctctctcagacgtcgagttcgttcctgcaagctgtcagtgtctaccaaaccgcatctagctccgcacttgtcggtgtaagaaaatgctcattacagttcttcttctacgctatacagcccgaaaccgactacaagcgttcatcaagtctcgatctgaatggtgcatctcccgacaacgtacatggggggtacccatccccgctctctacgatgagtctaccgacgaggctattttgaattccgaatcagtatctcacatcatcgacgtcctgagcgaaaaaggtctatcccactggtgggatgcccctgttgatgtgttcctcacgcctgcccttcgagagtccgggaagacctaccgtaaaggaacagatacaatggatgtatggttcgatagtggatctgcctggacgaatgtcgccgatcgttcgtccagtggccatgtggcggatgtcgtgttggaaggaagcgatcaacatcgaggttggttccagagtcttctcctaacgtacctctcggcagatgcaaaggtcatgaatggcgaaagtaaacccgttgctccatacaagacgatcattacacacggaatggtgttagatgactcgatggaaaagatgagtaagagtgacgggaatgtgattagtccggtttctatcctggacggaacggctttcgctacaaacggaaacaaatccaaggtatagttgaattttgacgtgtgctgctttttatccacacgcaaggttgcagtcctgtcgcttactttcttgtttacaatcaaagcttggtcctcaaggtgcagatgttcttcgtctctgtgcggcggcaactgactacaccacggacctctcgataggaaaatcatctattgagaaggcttcatctcagcttcagcgatttcgagtactgctcaagttttgtgtaggaaatcttcgagcggacacccagccaatcagttccttccatcgagatgatctctctgtggtatgtttttctgttttcttcttgaaacagtacatcgtctgttctaaactgatttaaggacacttcatctgtagatcgatcgatatgttcttcatagtctatggaaatactgtcattcgactcgttcatcttacactgctttcagctatcatcaaggtcagtacttcatacattgtctttcctgacgccagtgtggatttgttgaggtctgattggaagataaaatcactatctcttgttcacaaatcaagtggtcgaaaaaacaatattactcctcaacgatttgtctagtgtttacttcgacgcggtcaaggatactgtttatgccgatcttccggaggaaatgaacaggcaaattcacctgtcggtccttaaagaggtctgtcttgtccagccgctttgacagtgcttctttgagagaaaactaatgtccttattttacattttctacatgtgacaatcgctgaaaccttcaaacaggtcgtcaatgttgtctctcaagagcttggtcctattctcccatatctgattgaagaacttcattcgcatcggcctgatataaagaacacagatcgttctttctttgagcaaagacgacaaagacctgttagcccaaaattattcgcctttttccttcctttcttctatctgatcatgttgctgattgatttgatgatcttcgcctgatgaacacccatgtgaaggaggaatcttggaaagacgaagaagcagaatctgaaattgaagctttgatagagattcgaaaagctgttcgaacattaatcgacactggaaaaaaagaagagtacgtagcaaaacatcttcttctccttttcatatcatccttggtcggtttgtgtgctcttttcgggatgtttgtctcacattgatgatcgtcctcatagaaaattgagctcttctctcgaggctcatttggaattcacatctgctcccaacgggtccttccaaaagattctacagaaaaaccgtacgtcatttcagactttctctgttctcccagttctgcttgcatcaatgcgataccaatgggattaaaactcgatctatgtcaacaggtgatatactggctagattgtttgcagtctcacacgtgacgcttatggctcaacctatagatgaaccccaaagttgggaatacagcaagacaatcacatcaggtaaatcttgtagattctcttttcaatcattttacgaacactgattcacgcgcttggctttttgaacattgaacagattcagaagaaagaacttcaacgaccgaactatacgttcgaatctttccctcatccatgcacaaatgccctagatgttgggtctactccgcccctagggaaaacatgctgtgtgtgagatgcgagaccgtcgtcagggcggttacagaataaattagcggcaagaaagtgatgaagaatgatgtttgttgactttcatgattgtgcattcaaagattggaaacgtagagcaaggaggatatatctcttattgtgattacaaaactaaatatagcgtataagaactgatgtgaatcaaacagagacatgaacagacagataaagataagatcgacaggaagcgatataacataacaatcatggaaaccaagacaaactgggatatctcaaaaaaaccgttactgcccagacttgttggcctgttggttgacacgacaagatgacgaaagcggtcagagtcgacaacatttgtagtataaacatgagcaaatcaagcgaatcgattcaaaagggtcagtgaaaaaaacagatacttactagcaaagccaaaagttgcgagacatcgcccgccggggctgctgccgaggctgaggcagcagcagagggtggtggtcctcctatttgtccgggtttacctcccacaggtggcagaggactgtaaccacctcctgcagccgacggcgggatcggtgatgccgatgatgggcccgaacctaaagtcgggggttgcagtcgagtttgagtctgttgaaggagtgcaaggattccagggttgacactcattcctccaccagctaacggtatcgcggaagaagaggctgaagaagagggaggggggagaccagcgcttggtggggggtttcgaggatccgaagcggtcgttcgaggatcgatagcaggagcaggagggtaggacgatggtggaggtgcttgctgatgagggggggtgggttgatatccagtagtaggatgattgtaaccgtaaggcgtagatccaagcgcctggttagggttggcgtaatactgagttggtagagcaacagaggcattgtagggagcagtggccggttgaccagcataagctacataaggactgccagctggacccgaggcggatgcagcggatggaggagcctgagctggagaagcacctccacctccataagagctgaggagctgctggactttcttggctgcttccaatcgctcgtctacaggctatgaacgtaaaaaggagatcagaaacaagaagagtcagatgtggtattttgtcatgagggaagggtcaagatcgtacaggagggggaccgggtcgaccgtacgatgcggtggtaggagagggaccgctagcaggaggaggtcctgcgtaggagggtcctgcttgataagctccctcctggtatcctccgtagtctatggaaaagtcatggttttagcttcttcgttgacactgagaaagaatgcgatcgaaagtgactgaccccttccttcgtaccggccccggtctgctcggtacccttcctcgtatccccccccgtgactacctccacgtcctccacggtaagcagtggctccgcctcttcctcgcccgtatgaatatccgtcgcctcccctgggataatcgtcataacctcctcgtctggacggacttcgactcctctccctgctgtagccttctcgactgtctcgaccgtaatagccatttccagcaccggcaccacctgatcgactatcgtaggctccctcatagccgtctcggctatcatcataaccgccgccgtagccgcctcttcctcgaccacggccacgacctcgatagccgtcagtatatccaccacgggagtaactatcataactttggtcgtcttgatagtcggaacggtagtcgtcctcataccgaccgtaaccaccccgacctcgcgtccctcggacgcctcgacctcgacctcggtttcggctcaggtctcgagaacttaacgttgggtgttgactatgattcgataaggaggtgtaacagaaaaacgaagaagtcatcaggcggttagccatacatcatatggagcaagacattcctcagaaggagaacccaaggattccacatacagatcgtcgggtaaaggaacggcggggacatcccaaacatatttgatctccagtgtcccatcttggaaaacggatcgatcaagcctttctttggcagctcggaccgactgtgaagaaacaaaaaaaaagacataggtagatgaacacacgagagatatgaaaacaatttgaacccaccctgctatcatagaattctaccagtcgatccctgtcaaacaccaagcagaaaacggacagagtaaagagtaagcgcagattcaaaaccgcatcatctcgcaagtgagaagaaaacaagagggaaaacgatggcgtactcctgaatggtatcatgaggtttgatattttttacttctccgacttccccaaaaacttttcttagctcgacgtcatcgatggcccggttgcctggggaagcaatcaaggcaacatgtagggaaccctatataatttcgtcggatgagagcccacgtaagagacacagtcacatacagaaccaaaaatacgcatgctacgtacctgattcttgtcagcgtcgcaagcaccgctcgattcgtccggcctagggagcgagtagtggacatcgatctgcgatcaagaccaccaacaaatcatgttaagcattacgaaaaggtgatataatgacttcgagataggatatataatcgacttcaacgaaccgagcgacctgcgatctcagtgccttgcatagcctcctttgcttgctcagaggctcgaacatcgtactttggaaaaggcgctcataatcaacaagcattctctcatgaaacggaacatcgaagaagagaggacacacaaatgtgacaaagatcatccctcggttggtgatcaagtcgaagaatgttttgacttctccaaatgcttcgaaagatcttctgatctcatcggccaaagcatcgtactatcacaagtgtgaagattacgagaagttgaaggatcattgatcagattggacgggtttgttgacgtgggtagtggatgatgtattggaggactaggctcacggaaatgtttcgaatgaacaacgttctacaaggtctttccctattgactcgttcagctattaaagaatcgtgttcggcatcatcttgctctagtgaatgggtagaaacgatccgtcgaccacctcgacctcggtctatgggaaatcaagacgcatagacttaaatcagcttggctttcctcagaatgatttcactcttgtctggtcttcttctcctcttcgagtaatgtcttcatcttcccaaagctgaacctctctctctgacgtatagtctgcttgcctggtaacggattctcgcatgggcagtcgaatgaatcttcacgtggctcactgatctatcgtttcccttccactcgttctttgcaaagcgatcaaggccggagaccttcctttgcctcaacatgattacggtgtcgtctggttcgcctgttgaattgaatatctcgagatatatgtatgcgcgcacgtgtgtacgcgtgtgcgtaaattttgttcttcttcttttatttttcccttctagccgagtcgaagggtatagtaaaagagtcatacgagcagtggagggcggacatccaaaggcgtaattcgaaatagaccaaagagagaggccagaaaagagtagaaaaagacacagaggagaccgcaacgacgacttgaatgggaccgtagaatagctcaccagaaaatcctcctctatctccacctctgcctctgtaaccgcctctgcctctgaagccttctgactgaaaacctccttcacgagcattgtatcctgattggtaaccaccttctccgccctgagatgctgactgatcatgatatgtatcttgtggtggcgggccggaagcgtgttgagtcgaagccgcaggctggtagtactggccggcaggcacaggaggtggataagctccctgagcataagaccccgcagtttgatacgattgatacgggtcggctgtatagccagatccacttgtgggaggaggagcactgtagggatcggtttggtaggatgattgttgttgctgttggccttgcatggctaaatttcttccttctctcttgtttttcttcttgtaaagatcaaaactaaatccttttttcttctgtcggaactcggaacaaactctttcttgttctttctgtctgtgtgcgtgtgtgcttctggatgagggtacaaaaggagaaggcaagagagatggtcgtcgttgtcgtcgtgaagaagaaaggagatggtgttggcagcaagaagaaaaaaacgtgactgtgcctaaaatttgaaactccgttcgtgccttggatggatctgtgcctgttggctgggtgggcggtccgtgcgctgctagttgaaatgtgatccttatagacttcaatcggccacacctccatcccagctgccgacgaccttcgcacctttgcacctcggtgtctttgcaacaacacagaccccaacagaatgtctcgtctacaggcatcactccgagcggcaaccagacgttcatctccttcgcccttcgtggctactgccgcttgtcgtctttttttctcgccttccttcaatgcctattccactagctctgggtcatccccttcagatccctcgtctcgggagcccacctcgaaacgcatcactgaggaggagacttcaaagccagctgaagatgagacatactcgtttccttaccatcttccattcaaggtatagccgatcattcgtctttggctgccatctgatgattcaactgcaaccgcgttggctgattttttttgtgttttttctctgcttcgttgctcttcccgttgttgcactgacccgaaagggctcccgagttgatcctcctacggtgatccctggaaaagagactaggcctacttgggatcccaagatgcctgagcacggaaaattcaccgctgaaaatgcctgggtatcaaccattcctctcaaagttcgatatcgaaccgcccgaaagattgatcgacttcagcctggagaagatcttccggtcttaaatgaccctcagcttaagcaatggtgggaagatcggatgaaaggaaagctaccgaccaaccctaccacaccggaacaagtcagagagagtcagctagcttggaggcaggctaaggtcgtgaaaagacaacggattcgtggtcaggtcaaggtcaaagataagaaaactggagattgggtaggtcgactctactcgttatttcgtaaaagccttgaagttcttctccaagtattatacacactttcaatttctcaagtgataccatttattgaatatcaaacgacgatcattttgcgtatttctgtagaccaacaaggtggttggacagcgcatataccttccaaatattgttttccgtttgatccctaaccacacgccgttcatccgacccaaaggccgaaaaactgccccgatcgcgatggaaccctacaatccttacatcgccaccttccgagtacccaaagcaatcacgaagcaggatatcgcatcttacctcaaggcagtttataacttggataccacttttgtccgcacagccgtttcaaactcgcctcgagttcggagccgaaccggtcgatggctttctggtcagagtaggtacaactacaagcgggctgtcgttggactaaccaaaccattccactacccgaacgatccggacaacatgactccaacggccaaagccgacttcgacaaggatttgaacgagcggttctacaagaacttgattgatgaaaacgaagcacgattcaggctcagaggaatgcacaacaagcaatggggtggaggtaaccctaagagtcttccgtgcgtttttttatgtctctctgtttcttctttccatatcttagaaagttgcggatatagtcgtttactgactcgtgtctctacctgtcatcgacttttcttctttgtagtaaactgtttggtcgaattgcggagcgcagaacggctagagagaatcttctgcgagaagaggttgctcaagccaagagggaggaggctgaggatagtgtatgagattgagatatggctaagtaagacggaaacaaataaaaaaagatggcatgtgttgttttgtatcctatgaaatcaatcaattcttcgcctgaggagcaatctgttgttgaaaagaaaatgaaccgagacgagctggtctttgttcgaacagatcagaaagatagggcaagcggactgtagtctaaacgtatcaacaaagtaatacggattatcagaaaatcatcaaatctaaatccaatgaagcttccgcgaaatagatcatcttcaaccacaccgccaacatcgatatttaccaccccttcactcctttacttctttacctaatctttcttcataatgcctgctcgcaaagcgaccgatgcagctaaaaaatctaccgcttccactcgaagcagtcgatccagaaaatcatctccccctccagatgtggaagccggaacagagaccactggaattcttgacactgtttccaatgccgttcataccgtgacggacttggtatccgacgtggttgaaaccgtttctgataactttcatgctgcccagagagctttgagtgatttcgagtcggcagagatcccgtctgttgaggccatgactgatgcggtggaggatgtggtcgagagagtacaggatttaacgggaacgattgggaatgatgttgcccgaggaactgagccgactccggtggagaaggatgagaagaagacaacagcaaagggcaatggaaaaggaaaggaggtggaaacggagattgaatcaaccgaggtacccaagaaagctgctttgaccatggaggagagacagcagaagatgagggagctacgaaaaaagatggtttgtcttgtttcttatcctggtttcttcatgggtgggtctatcctgggtagtcattggtccatctgatcaattaattcttgctcctttccatcactgtatgctttatcatcgtgtttttgttgttttacgttcttcgtatccccttccttccacatgtcggctctgtttgcagaacgcgtcaaccgctgccaatcgaaaggatctgatcactgagcatcagcgaaacaagacaaccgcccgcgagctcgccagtctagagaaaaaaaggcgactcgcagagactctccgagaacaagctgatgcagaagagcttggagaggataccgaacgaaacaaaaactggtcgtacagtatcgaggacaacgatcgatgggagaaaaagttggaagagaaaagagctcaaacgaatgatggtttcgttggtaggtcctcgattcaacataccatatcctatccatatatgcaccctagcagcatgactgaatgaatctctctccctgttacctctctttatctcgccaaactggtagataacgcccattctgctcatcgagtgtacgaaaaagcgaccgccagcctcaagcctgatctccagacatacaattatcaaagagagcaggctcttggtcttccggctggaacactcacacatccaaacacgtcgtcctcaaaagtcctagcgagaatgaagccgatgacaagcgatgatttgtacagggatgcaaacgggttaaactatgcagataacaagccgagtgaggacgcggtcgatcgagtcgttcagaacttaaacaagacgtacatacttcttttcttcttctttgacgagcccatactttcttttgacttttcggaactcacaacactattcccttcttgttgtccaacagaatggagcttcgaaagaacaactcacgtaagcgagccaacgacgaagatggggatgttacttacatcaatgacgccaacaaggtcttcaacaaaaaggtccgtgattctcgagtctcaatgaagtcaggcattcacgtcgattggtagcttgcttctgtactaatcttcccatatgtcatattctcagatcaaccgatactacgacaaatacaccaaagagatgtacgttttactccgttacttctgtgaattttccgctgagctaattcagtgatcctctttcctctataaattttagtcgtgcaaactttgagcgtggaactgctctctaatgtgtctcgagggtgcttcgccttcatgtctgatcttgcgtcctctatcttccacggtgtaccatctttcacatcacttcttggtcttttgacatatcattctctctatgtatcatcatctaccgttctccttttcttcatacaatttttcttctctgttttacgatgatatatcttgaaagttttgtcgcaagaagaacgagcgttgtcgaatgaaacgatatgtgaaggaaatcaatctgacgcgtgttttgaacgtgtcgcctgaacgaccttcttctgccccattacatcaacacatatactcgattgcctcattctctgatacctctcggaagctcaacttcttcctgttctctcgttctccctatctcttctgtcggccatagtccttcagagctctcatggagtatccatctctttttccgagaacctccgagccagcagccgccgatgttgatgtcgtcgtcgaccgacttgcttgcctggttgtctctcacatggccctctctccggcctcgcccacgtcccttctcctctcctctatcttacattccatattggcattccaatctaggtatatccttcattccactccagctaatcacctaggacgatacttgtacgctgaatgcttactggcatcaggggcgccccattcagcttggaaccttgttcgagaagaagccgagcttggagaggtggagttggcagaagtcggtgcaaaagcctgtgaacaaattggtcggtttcgagatggatcttggctcttggaagttgcgtctgagaggcgtcaagctagggaagctgagggaactcgtccgacacgtaagcctatccgaaatatctgatcttcacttgtctagcgtgtgcttataacaatattactcttctcaaaaaatggctgatggcgttccgaaatgaattttgaaaagctctcaaaccacctgttattaccccatcggacgctctgacaaaagcggcaagactttgtttgaaagcttcgctatcatcaaaaggcaacgagccggatcaagctggacatgcttacctgacagctctcaaactggatcctttctgctgggaagcctttcacggtctttgtcgacttggtgagttcctttcgatgcacctttagcatgcgtttagttgaagagtgagtctaaatgactgatataacttcattctggctgagtcacagggtatgtattccctgaggtcgatgtgtttcctcctctacaccagctcccgacttctcgatctcaatcctccgtgcccgcctcagccaatgttcctgctcctctccagcctggaagcccacttgcgggtacatctcgagcaataccgacgacaacatcacttccgttatatccaccaaatgccgtcaaccaattgtcggcacaatcttcgaactcagattcaaatttagcggcaacacctgactggggttaccaaaccgtaaacggtaatgggtataccggagggttattcaaaaagcaactctttccgagtcaagctggagaaggaaacagagtcggcatagggttctttacacctgaggctgccggtccagcagttagagcttctcgtcctctcgttgcctcttggttgattggaggatctcaaggggttcaaagccctgactcgtcaatatcttcctttcatcaacatactcatcgagctcatcatcaactcaatcctttaggccagactcacggttatcattcatccagcttagcgcagacgccagtaatggctgttccttcttcacacccttcgcttcttccaacggctggtccttccataccgtcgtggttgtcaacagcttcttcggctgtaacaccccctttgaatggagatgggtttccccaaattggaacgaccggttgtgagtcggaaaacgtagtaggaactggcaaactacctatgaaacggccgcgtggaggtcgaggtatgatattggaaccaacagcagaagattcacctacggaacaagcgggcatcaaggttagtttcgttggccgtatcgcgacgggttgaatatatttagtaaacatattctgatatcagcgtttgcttaattctctttgtctcgctatcgaatcctttatacctgactgcacagtcccgaagtcggacgaattctattgagagcatcaaccaagctggactcgcgaggagaagtagccggctgagccaggtacctggttcagcacttgttgcagatcggaaaccgaaagtaggctaattctggggatctttgcaatgtccgaacaaagaactgcaaagctgatgtacctgatcttcattcctgcagaaccttcccaaacgccgtcaaagatctaatcctatgtctccaacagcatctgattcttcgatgaccgaccagcctcactctcctcaaccacattcatccagatcaccgttaccaccttctctacccgacgtgctgtctgaaccttcttcagtcgaactcctcaaagccgacaactacatcctccagatcatgcgtctgtttggtttggctgacatgtacatgagcgcttacaaatgcaaagacgcgctagagatgttggatgctttgccggatgaggtctcatatcttaattctgatgtacgtgcaatggtggggagatgctacttcgagcaggttgaatatgtcaaggtaagtcaatgttttggatcgggaggtaaaaataccatcgaaggttcctcacatgtctcggcttgctcatttctcgtggatttcaatcataccaggcgaaaagagcttttgttgaatgccgaaaactcgatccttatcgtctacgcgatatggatctcttttcaactctcctttggcatctcaacgacgaaacgatgctttctttcctctcccaagaattgacttcgatcaatccgactgctcccgaagcttggattgtgacgggaaacgcattttctcttcagaaggaacatgacgaagctatgcgatgttttcgacgagcaagtaaccttgatccgagatgcgcgtatgcatactcattgagcggacatgaggcaatcagtatggaagaatttgacagaggcatcgcattctttcagatgtctctcaggatcgatagacgacattttcaagcctggtaagttgaaccatactgaactccttcctcctctgtgtgattctcgatgtgacctcgaagatggaattgacattgattctgatgctgctgaccgtaggtatggattgggaactgcttacacgtgtaagaacaaacttcgccaggcagaataccattttcgtcgggcggtcgagatcagtccgtccaacgcggttctgctcgtatgtgttggtcaagtaagcgctgtttttctttatgagtttatgcacttattgcgaaatttaagtccggtctactaatcgtaatagttttcttaggttttggagaagaggggcgaaaaagaggaggctctcaaagtattcgagcgagcctttgagattgcgcccgacagtcctatggttggttttagacgtgcaaaagcaatggttggacttggacatatcatggtgcgtttcgtgttttttcttttccttcaattcgttctctttattcgcatagagatcgactgacctgattgggtcgttttgacatccagcctgctctggcggctctcaagacattagttatcaaaacgcccaacgagttcaacatccatttccttcttggaaagcttttcaaacaaatcaacgaccatgcaaactcaatgaagagtttcgcgtacgctttggatcttgatcccaagatgagtagcgccatcaaggcggctcaagcttcggggagggatgaagaagaggaggaggggggtgacgacgtaggaagagatgtttaatgacgtgaactactttagcctatatttgcactcagatcaatatatacatacctccactaaatagacatgaaaattagcgaatgcaagtaaccaacacattcggagggacgttttgaataaaaggagattgttttgcggtcgcgtctgcacgtcgaaggttatcaaggatttcagcctcttcttctcctcgtcccatcaacccacttctcgtcaaccaacaccgcaatctttcctcttctgttctggtcagcatccgggatcttggggtctatattgatagatcaacatccgacagatatttgcaaaccttgggcttcatcagttgccggccgacctgtttacaagatgtctcttttagacttaagccatcaatcacacgatgaggatgaagacgacgacgacagatccaacgaatattatgaggaaggggatgaagaaggttattcagatgaagtccatgtgagttttggttccttctattcgaagcacaatatatgtcatgcctgaggtttgagtcgagagtgagaattcatattcacaacgtatatctcgccattcatcagagctcagtgtctattgactcaaacatcgacttttcgataaattatgctttgtgagtctactcaagacgaatcgctttgactgtttagagctgctgatctgatttccatcatcttgcagaaacaatttcgttgctacggttgaaggtcaagcaaatgtcacgagaaacgacgcattgcatcttagggacgactcaaatgcctactggtggctggttcaagtcttaaaggacaaccagattggctatatcccagcagagttgatcgaaaccccatttgaacggctggctaggctaaaccagcacaaaaatatatatgtgagttctctgtcgattgtctctttggtgttttcaaggtgtcacaagaactgaaaatagctctataaattgttttcttagctcgctgcgtcgacggctaacgaacaagcccaaggttcaagacttcaactacgaaaccactcaccttccgctgtctcgcgctcatcatccgaagcgtcaagaacttctaaatctcctgaaggaattaaatttgctgaacctacctatgttgatcaccctggatttcagaaggaatgggacgatgacgatgatgacgacgaagaagacaatgaggaacaggaggaagaagacgaagaatttatggaaggtgaagagggagaggcaaacgagtgctctgatgaggaagaagctactcaggaatctgaaaccacagaagatttgatgggcgaaggatacggcctcagctatcaggatcgaacgttaatggacgacgaagtctcatccagcgatcatcgacatgaagcgatccaaaagatgatgatggagccagatgacggaatgagctgggacgaccattcggtcgctaatgctagctctggcctcgctccctccgctcccatctatgcggctgacaaccccaatcaatctccctcatcagtcaacactcatgagtcacccagttcatccaattctgggtcttctatcattgggaccagtcttcaaacatcactctcccgacaaacttctgctgccagcatacgatctgaacagtctcctacaactaaacgcgtccttcttccgtcagaacagatcgccgcatccaacacggctcatcaagcgaagatcgcagaatccaataatccctaccatcaaaacctctcttcttcacctcaacagccttcctctctgcgtcccacctcaacggatgacttcttggaacaagttctcgagaacggagaaactcgcaaaatccatgctactcctcgagtggctcgtgtagaaggccctcctcgattttatcctagcgggtcagataccaatcttctggatgctttatccagtccaggtaggaagcgtgtcgccatcgaaaatacgagccggttcgaagatgaatcccctgaggaggaggaggacggaaaagaatctgctgaccatggctctttaagcgaaggtgaaagtggaagaaacgcgaccagaaagataaagcgttcggacagtgaagagggaataaaaaagaaggctggaggtgttttcgtcaattttttcaaaaagaaggataagaaggaccgaggtatcagttcttctactgttgtctctccagggtccgatgagacaagcccaatagacgcacgctcttcatcggatgaaatcagcactaagtcttcgactggaacaccccagtttgagaatgctttctcaccagcagagagcccagcctcggccgatccggaaaaacccagacgagatgttaggacgcccccatctgtctctggtagtccgagtgcagcagtttctcccctcgcacttcgtctacagcaaaaagatcaagagcaacaagccatgtatcaaaagtatctgacgtctagctcaaagacatcgatcgatcaaggtcttgcttcaagctcatacggaacacaagcagctgcaacgattgctcagtctttttcaacccaccgcaacacccgagcatctatcaatcctcatcctcgcccgggaagcttgttgatatctcccacggtcgggtcgaccagttctctcatgaaaaatgacagatcgagtggttcgcagatgctctcggtccttcgagtctttgccggccacgagattaactctgactcgacatttaagactgttttgctcaacgacaccaccactacctccgaacttcttcgtcaggcaattcagaggttccgtctcgattcgctgggagcgactgagcaatatatacttaccatcaaagggattgatggcgaagagactatccttggatctgaaggtcatccgcttatagtttttaatcgtcttcaggaggaagacgagtccctagtcgtccctagaattcgacgcggatctgttggatccatctcttctgtaacctccaatttatcgcttcatccagcaatcgctcgtttaggagactacagtgatgactctcaagtcaagctctatcttaacaagaggactgcaaacgactctgtgtctgtgaacagttttatttctgccatcgattccctttctcaagagcctctatcgacatttcctggatctgtgccaagtggtcgattcacccttcagattgccatacatatctcggatcttcctgagaatatggtgtttgacccaaactctgaagcaatcctctcacaatcagagatgagaaagcaaacgcctctatctccttcatcgcctccctcttcttcattcaatgcgcttccgggagataggaagcgatacatcttacttcctaccaataccacaatcgctgaagcgattgaggttgctctagagcgatttgggattactgacggtgtggtggacggaggcgatgacgtagaagacaaaccaagcaaaagaaaaagtcaaacgagggctagatataaattagcactcaaggcgcctggacaggatgacggtcagttgatgtgttgcactcctctcatgggacaattgcttgtttgtgctgatcatatgcttgtttgcttggtccgtcgctagaggctgttctgagtccctctgcaaaagtcatcgattattatagtgtcccaccgaatttgaagtcgcctccaacaatggatccccgtgagcggcgccgctcaagagaagtttccctggcgactccggaagatctcttatcaacggaccctgtattcattcttcgtcgtgctcaaaagccaaatagtccctctaaatctcagagacgctcccgaggttctaccgtcatggacttcagttctgacggacatattggaaaatcaagtcttgacagtcggaatggtgatcatagccagtttagctcagtctcaactgcatcggcgtatgagccatcacctcaggtgtcacctgtggccgctcaatttctggctccgccactctcgattcaagagaccatcgccgcccaacgtgctgcatcgaaggctagtcaatttgctgtcctgtctgcttcaaccaacgcatcccttggagtggacgtagtcatttccaataaaggaacaatccggtcatctcgttcgttggatggtacggaacggtctgacaaaatccggtactcttacatagagcctgatggtgctactgaatacgacatcagcgagttggtcgaacaggaatggacgcctgcggaatccaaaatatcctctgacaaacttcaaccaaagacctcgcatagggcgatatcacccttcgttgaagacgtgctcgaagttgcgctagaccgaccccaaaacgcaattgacgcagactccaaagcagacgccgagttggatgagaagatagatcgagtgctacagaaggtcagggatggatctgtgagacccgttacatcgagccgcccaccattgtcctcggtaccgtcttacttagcactgggaccggtggccgaccagaagacagtcttctccaaggccgaagcacctcatgaggccattgtttcctcctcgtcttctgttcgagatcagtcatcaattgagactaatttaatcccagcccaatcacctcttattttcggctcagaaaccgttactccgacgacaacttccagaaatttgccaatctcgaatggcgcgcctttggctggtgatgttttccggtcaaattcaagtgcattcagtcagatggttgtcacccgggatgattttgggataaagaatatgctggctctgatcaacgttcgggcgagggaacctacgctcaagaacctaagaaagagtatgattcagaatccgaccgggtcgctccttggaggagctaaagggacggatgaaattgagaaccttctattcggaaagaagatctgggataacgggcctgtgtttgagggaaagctagagctgatggaatttcaaggtagattggacgactttgataaggagctggacgtccttatggacggtgtgatgaggctcgcagcgggtgcaagcagtctctgagcacttcttgttgatcccctcctccaagtttgttctgtacgctctccttttgcattgtgttctatatacctataccaccatcatgtacatccattggatcatttttgggtcacgtgataaaggttattaaggacttatgtaaacaaatctaaattcaaaatcgtgtcgtccctgtgggccgagcaacagaccgcccctcttccctcccgcctaacatcccttccttatccccctcgtctcctcttcttcctcgcttgttaaattgtaagtatggtttattctggatcgtgcatgtcaggtcttgagaagaaggaagcatcaacacgttctagaaaatgagatcattaggaatgtggatttggaactggagaaggccaggggcgtttcctttgtctaagcgatgaactccctcctggccatgctcaatctcaattgatttaaaagttcacgacatgatatgtgtccttcatcaaggacgcggaacagaaggaatggtggatggatttgttggacataattgttcatgtcgtcggtgcaagaagcaactggtgaacatcaggactgactgctctttttcccctccggtttcgggctggcgtgctattccttttctttcaacaaaactgaaccgaaccgcattcactcatccttttctcaaatgtagaatcaagatgcaaactatcaaatgtgtcagtccttgttattgttatttttctatttcgcttctcttttctcacaagaatggcatgaaggctgacagacattgtgcgtgttgttgttgtccatataggtcgtcgttagtataagttacttcccgcatccgactcaagtcgatgatatcaagaatgctcagttattcttcttcttctgtgattgaatttacctaggtcggggatggagcagtcggaaaggtaagattgatggccaatttatgtttgaacatggactcgataattatctgttctgacagagtctatttgtatcaacagacttgcttgcttatctcgtacacaactaatgtaagtagtttgctcttgtgcccacgcaaaagagaatattaaatttctgactaggtttccgttatgatctgtgtcgatttggacgattacagaaagttggtcaggttttaatctaagttcatctgagccttactgacatccaatatcacatcagtttccaagcgagtacgttcctacggtgttcgacaactgtaagttgcactttggtcatgatcattttttctctcgtatgctgaaaactatcggctgtgtaaatcgaattttagatgctgtcaccgttatgattggagaggatccgtatactcttggtcttttcgatactgctggttcgttcagctgtcttttttacactttctccggatatctatgtatcgaactcatcgtgtgtatctttatatttgcaggtcaggaggattacgaccgacttagacctttgtcgtacccccagacggatgtgttccttgtttgtttttctgtcaccagcccggcatcattcgagaatgtgaaggaaaagtggttccctgaagtccaccatcactgccccggagttccttgcttgattgttggaacccaggtggatctgagagacgacgctgcggtgatggagaagctcgccaagcagaagcagaggccagtgccgcatgacgctggagagaaactcgctcgggagctgggagctgttaaatacgtggagtgctcagcgttgacgcagaagggactcaagaatgtcttcgacgaggtcaggcctttctctcaagacgcatccattgatatgtttcaatattaacacgttgcgtttttcattcgtggtattctaggccatcgtcgctgctttggaaccccctgtggttaagaaaaagtacgcctgtactgaactctttataatgttgatatccgctgatatgtatgcggtcctcttttgtacctttcatgaaaacaggaagggatgtttgattctctagatcttgagctccaagctagctagtcttttatataagcattgagctaaagaagagatgaattcccattcttcttctttctctttcacgaccttttctcttttgtctatttttgttgtttcgtcctctctgtcattcttactatcacaatcgccatgtcctctccttttctccttctccttcgcctcagtgtagtcattccctactttgctttgcgttctgagtgaaaaagaaaatgccacacttcttgttttcattatccttcccatcgtcagcttctcttcgtgcctattgctaccttttgattcttgtttgattgaactgttcgagtccttctttacctttctcttccctctttctcggtcgtccttctgtctatttttttttcgctttccgtctaacccgcctctttacgatctggatcaaatcatttttttctgaatgacttcgaatgtcgctgtcttcaacatgtgcttgaacgcatttgggaactgatcatataaacagggtttacttaggattggtccccttaaacaatggatcttaagatgctgtctgtccttgatgatgctgaagagttaatcccgccgacggtggcgcagtttttttttatagttagagaaatcctctagcacctttcatctctcgtacttccagctggcgtgtttaagatcatcgcttttttctacgttgacctcgtacaaacatctggttgtctcgttgacgttttgccatatcaacggaacgaggaaaagaaaagacggatcatacgatctgaaataaatattttgtgagtcggctccgttgttccattgagccctgagatttgttgcgcttctaaagacacaatctttcgatctctttgttttctctacttccatctgttgaggctgttgtcacagaaccttcttctctggattctaatctgacatctctctactcatcccctgtgaactggcatctggcttgttcctttctcagactatttgatctgtgagtcgacctctttcattgtagtcgatctgccatcttttctgttccccatcatcagctccttctttctcgtgtgttcagtctccgttctcttccggaatgatcctcttggcgctctctcttcgttcggtgtttggactgagaatatggaaatgctgactagaaatcgttttatgtcgtttggtttcaatcgtagtggcgaacttttcccttacacttaatctttccgctctcgaacggtcactattcctcactgttccatcctttcggcacttagctatgtctctggcaccgaattctagtgctgctgaagcatctagacgagcatctgggaagacacctcctccccaggcacctagtgcaatttacgccaaaaggttcgttcccgtttgtgatctgattgaggaacatgaaaataagctacagaaaccaacttcatttttcgtttcattccgctgattttcgtgatcaaccgtacattcaatcagggctcgtgagttagaacagctcgaagctcaaccctaccgtcctcccgctcttcggcattcctcttcttcctctttcagctcgcaggccgaggctgaaggagatgccaacgttgaagagcagcctacggtgataggaagtggctatcgaagggcacgagcagggtgagcgcgtacaccagcctgtgtgtatcttccatacacatgcattgatttcctgactcttcgtactgtctttcctctcaatcaaattatatatctaggacacttccgtctaatctcaatgctgcagcacagagatacaatgcaccggctcccgtttctggagtatcggtccctggaacagttaccgctcaacttgggaaccaaagtagtcttgtatcaactccaggtgtcgccgctcatcctagcattcgacaagttcttgattcatcttctggctcaggtcgaggacgctctggcagtctctcccttcctgcttctgggctgtccaatgctttcggaccttcggtcttttcttctgcttggcttggcaaccgaacatcctataacaacggttccggtcagcatcgccttgatgagatcactcggattcagtcaaatgattctattgcgagtgagcaagcagccggtgttctcgattatctaggtcttgcagatagtcctgctggtcatcagcctctgccagcgacgcttagtgagcttcgagctcaagctcagcaacagattcaaagtcaacgcaaccgagccagtactgtatcaagcccttaccgtcaagtaggcgtattcgctcctatccaatctacagaggactatggtgacgaatgcgtgaatcacgagagctacatagactctccaatctataacggatctaccatgtacactccttcgcaaacgcctcctaacgcattcaagaaggcgacccatctgatgccgtctaacagaccgagagctacgtccgtcggaactctgatggactctccttcccatcggaccactaccatggcttcgactatgatgcatgaggatgaagctttctcccgacaggcacaactcgatctcttgtcggagcgattggctgcgtcgacattgataaccgagcctctcaagcgtccgcccatatttcatgatcgctcgcattcggaaatggatttatcctaccttcatcaacccgctgtatcccgtctgatcaatatgaacggcgcactttcgacctccttaacacctaaccccgtcccgtcagac

SEQ ID NO: 2131 - DNA, 4981 bp, Xanthophyllomyces dendrorhous
ccttcccgaagtctctacatcggtcagttggattctacggtcactgattcagagctcatgcagatcttcaccacgtatggaccaatcgaatccgtccgactacttcccgagaagacctgcggctttgtcaattttgtggaaatggaggatgcgcttcgggcagcagaggatgttaaaacccggatgcgtggtaaattagtgccaaatggaagcccagtcaagatcggatttggaaatcccaatagcatgccgcctggaccaggggtaccgacagcctcgtccccaaccaacgcacaaggcgcgtccaccgctgctgttgtcaatgatactccatccagagctctgtggatcggatctatccccagcaacaccactcctgctgtccttattcaggtcttctcttcctttggacccatcgagaatgttagagtcttgacccacaagaactgtggatttgtgagttctgggttgtcctccgttgagtggaatcttcgagatgcattagttgaactgtgactaactctctgaacaactgttggtctgcaggtcaatttcgagcggcatgattcagccgttttggctagaaaaactctcaacatgaaagacttcttgggtcctgatgttggtgccatcaagatcaatttgtcagtgatgttcctctacatttcgctcaagtatcaatcatgatactgactactctacggcgttttgttctcgaccatcagtggcaaagttcccacaaaagctagttctcattccaacggttcaggtgcagatatgttgaacaattatccggtcagtaggacttgtccgtttgttcctttctcttccagatcgtgtactcacccatgattatataccttgcgataggttaaagccggctctgacagttctgccgaccagcaaatcacggggggtcatcctctgggagactatcgctcaagtctgacctctgacctggtcattggcggcgaacacgaaggattagcaactactgattctttagtagctgtggggccctcatggcaaccttctgtgtctgatcaacaggttggtctcttttacaagtttgtcgtcattcgttaatcaaagggaaagaagagtctaatgccatcaaattgctttatcgtgtaaagactgtcatgcgagtttttagcgctggagatcctcaggccgaacccgaaattcaggctatggcaggtaggtagtctgtcaatcgctcccaacatcaactttccgttgatgtcgttctgaacttgatatctccatcatacatatcagaattctctcctccagccacatactatacctctgtgccttctgtggttgatcagtcggcgactcgcagatatgatgcggccgctttgcgagacgtaaaaaaggctttggagaatggaaattgttcaatcgaagagttcaacacgtttgctatggatcttatggaggagtgcgtcgagctagcgagtgatcgtaagtgtcatcctcttctcggtcctgttgtgattcaggttttcaccttcttgctgcgaattttcttagacattggaaacacaatcattcagaaactgtatcagttctgttctcagtctatcaggttgatgctgctggagagaatcgctcctttccttgcatcgattggtagccacaagaacggaacttgggcggctcaaaaggtttgttggctactagatcaccatgtcagcaagcatcacacaacaaggctgacgaatctgtggtgtttacatcagatcatcgactgttcgaacagtcctgaagagtttgctctcatcggccagcatcttaggccctatattcctcctctcttattggaccaatagtaagtactcatttttctttacaaaatcaaccctgttgttcatctgatctcagattttgtatcatccctcttagcggaaattatgtggtatcgctttgcacgcgttttgagtcccctgccaacgactgtgcgtgttgtcaggtttcactttcaattaaatgtcaaccaacttgactaatcatagcttcctcttgatcagtcatctttgatgggatctgcgaccgactttgggatatcggacaaggaaggtgagctactgcgcagtttgtttgtcgatatgaatttgggaaactcatctattattttgcgttcttaacagatttgggtcacgaggagtcaggacctgcttagatagtcctcatacgacacccgcacaaaaggttagttttgatgttttttggatgactgtagcgagccgaatgaatactagattgatcgtgtgtgttgtgtttatttagaaacgcattgcaactgctattgttctcaattcaatcccgttggccactgcccctaacggtatgtccacttaacatatcataaaatgaagctgtagaatatcagtttgaagaccttagttcttttgcattataggatcccttttggttacatggctcattgtgagaaaacaattcctccgattttggattaccaaatgacctgtactgagtataaattatctcccgtacaggactcgtcaaaccttcatggacgctttcggcttcttgcacctcgatttgctcctttcatggagcatctttgcacccataagttggcaagcgtagctgtcctacgaatcatcaaccaaaagattgatccagagggtaagtggacgtctttatttcagcgacgaaaaaaatacagtcttgatttctaatctcaatgaattttaaaatcagcttcacaaatcttgcttgacgctctattcgcctcgccaggcgatgaggttttgattagggtgctcaaggatcgtgagtatcaattatcacttctacttgtattcttgtcctcctgtgtcatgaacttgatcgactgacaacccttctctttttttcctttctggtcatcagagatttatggagtctctgttatcgagaaaactgtcacgtctgccgcgtttgatcgcacagaacgacaaccgttggtagatgctacgaagagagtgcttctgtctctcgaggacgcgtcgtcacaatcgtatcatcgacttctacaggtaggatgcaattttttatattccttccggtcgggttactaatctaacgatctctgtctatgataggctgttggccttccacattctatgtcacccaaggtctccgcccagacctacggaggaatgcacacaccaagatctcaacctggaccatcctcttcatacgccaacctcaacgcgttcccctacggattgaatcttccagtaatgtatgatcataatcggccaagtcctatgcaaggtatgaatgggggcaactggccttctgccatgccttctacgttgcagccattgatgttggggtcaatgcctcaaatagactcattccgaagcattgcatcaccgactttctctcctacgtcaggtaagctcagagctagctatttgctcaacctctgttctgatgtcgacgcacgtaattgatccatatcacactttaccgtttttctttcagatcctttcaaccctttcgctgtaagctggtttgccttctgtgtatttgcgttggccaaaactgattatggtggtcttgtacaacagacgtatgcgcagagcccaccaaggtttgagagacgttcgtcttcatcccgtcaaaagtcgagcagtcgaggtgagaagaatgggagtgttcgaggaacgccccaaggttctgtgtatgatggaggctaccaacctcaaatgctggactggcagaggcagcaggggtctttggtaagtcattttgtgtatgtcttttcggaagtaatattcgaatggaatgctcaagtctacacaacttcttaaacatcctcaaaatttgcttgcagtataaacagatgcatgcctaagtgtgtctcaaccgatttgaatgtggtcccaattatcctcctgtaccttgtgttcttcttgttcactttccgtcttcggtttctctctacactgtatacgttttattgtcacactggccttaaatcagcccctcctccctctttctttacttcgcatcccttattagtgttcttccgatgtagtgtaacgatctttgtctagcctaaaaacaaatatgttccttccgggcgattgaaactagcaacatttccatggtatttgcaaccctgagattgttaccactcattctctatctggtcgtctcaccatctgtgtaaccaaatcccttccatagttctctttgatatctatatgctcttctctatatttgttcctatcgtcagaaaaggtgcgtcacgatgaagtccctccttggtctatgcctgtaagagttcgccatagtatccgatcaactatgacgataatttagtaaaattctgatccgttcatgcttttgttgagtgaatgcctcatcttccacaccttgagcggactgccgtcaatctcgcctgtctcctctggatgaccagaactgctggtcgtactctgtgaaagcatggttgacctggtcagaggctgttttggagaattagtcgagttcgccaagattgacttgagagatggagacggtgatgtctgttgaggatatataggggcagtagcatcaccaggggaagaagaggggggcgcagattgggataaaggaagagaatatcgcttagactgaagagaagcgatcgaagcagatgacccggccaattgtttagtcggtgttgactggagaatgcgggaagagagcgaggtagacagtgcaagggaaggaagagatgatgtagcagtcagaggaacagtgagaggcgagggagcgattgggttaggccgagtctgtttaagggtctcaatataaatttagtcataggaaatggatttcacaatttcggccacccaacaagcagatagacagaagagcacgagtcagtaatcgacttccatcatgtggatgaataacagcttctcgcacctgtttagaaagactctttataggcgtcccacgacctgccgac

SEQ ID NO: 2132 - DNA, 6532 bp, Xanthophyllomyces dendrorhous
gtggccattgatatggatatggccaatagcttgatgacggatcgatggtaaagaagaaactgccaacatcttatcctctgaaattgagactgtatttggatctctcgtcaccatggagaccgacggctcattctttttgacatcatctttcaacgacagacggctgctagaatcaattatctccttatttgcttttctcgacttaaaatatcgtctgtattcatgacgatctgtagatctatatggggtgtgtcttcagatatcaatttcaaccctccaactctcccctcttcaaagcacctttgtcgacttgctcgtcgtcgctctcttccaaatcgtttgtcagacccgcaggcttatctccgtctccgatgcttcttcgacgacgatgcccggcggttcgaacagcagcttccggaattgttcccgtagaacttacggagtggaaaaagcaaggcgtcagacatgtagttaaaggaaggcaaagatacaacggtagtcattacgactcacttcaagtactcaaagtctggaccaataaagttatcaacctattcagacagaaggaaacaagaatcagagataagatcctgtggctagatacactgctttatgagtgtcgagctttttaaaatttactgacgcaggccagccatttagcaaaacttatatgtttataaaaggaggaaattagtacacttgcaactttccactctttatggtaaatagatcgtagatgatgtctatgagcagagtcagactcacgtgtcggtctcttcctcttcttttctcagtgcttcgtatatatatcgcatcttgaaagcgtcgattgtttcccggtactgttcgaaattgacggtctccttagcggctacaaatttctggcctttctctacagtagtgttgtacgagtggaatagcggctgctcaagcaaaagaccaagaggaggagccttcggaatgtggatcttccggggacctacacgtacaagcatacagatttagccaactgaagcgccttagtaatgccaacgaatatcatggtggagcaggacgtaccatagcattcagggattagtgtaggaggagtaccagtacgagtcaccaagattacgagagagatcatctttcgaatctgatgcagcatgaaactttgacctggcaaagaaacataacttctgataagtttcgaatctcagcttataagttcgaaaacggaaaagatctatacttaccatggaatcgaacagaaacccactcggtaccattcacgacaaccggatctttgacctgccagaaagcgcacaagtaagcgttgcaacatgaataggaccatgtcggagtatgtctcatttacctccaacttgatcataaatctctgagctgctctatcttggaaactcctctctacagtaaagttatgaaagttgctgtatgattgaattcaaacacatcttttagcgcagccatagtatcttgaagtgttgatgatgttgaacactgactgtgtaccctcgtagaacttgacagctgctcttgcccgttcgatagtatctgaatcgactctccaagctttccgcttcttgatatcctctacgaacgacagctcctccgttccatattctttccaaaaagggtgttcctccgagttaatgattgttgaggagagttccgttagcggagtcccgtcaggcttagtgaaagatgttcgtttaatggtcttgccgagttccgaacctgggcgaggaggaaggaagatgtgagacgggaggaggtactcatacattcgagaatcgcaagcactgttgagagtgtgtcaaaagaaacgttaggacagacatctgagatttcaaaatgcgagaagacatcttggcgcggacacgatgaagacatacgttctagagttgaaagcgttctgaactctcacgaaaccccacatccgaatctgctcgggtaggtattcattgatcttggccgtgagatcttctactccaggaatgacagtgatcatcttaagggagacgacgtttccagcagcatggacgcccgcgtcggttctggccgcgcgggataacgcgacctgggtatcaaagaaagtgacgagttcagtataaatgacgttgatatcttcgtattcctcaatatttcaccgaccttggtagcatcatctgcattgtcctgagagacagctccggccttcatgacagaaaaaatgaggatacattcagaaaattgtatgacgcattcactaggatgagtaggttgaatctacagaccttgacgaacgcgtcaaataagactccctcgatggttttaacatccttctgactgataagattgattcacgaagaagcgctgatcaactgagtactctagacagtttccgcatcgatgagagaatatgcttacatttgcatgcccttgtaacccgttcccgagaacctaccacaccgaatgtcacagaacagccaacaacgtcagtctaagtatattcagtagaggatatgtccataggcaaaaagagaacaaggaaaggttctcacccgatcagaactgctgtcttcttcttgggcaatctgtctgccttgggttgcccatctttaccttctccattctgggtatcatcaccctccgcgtttcgatctctaccttgatacttgccccttccgcctccaccattctttccaggttttccaccagggccgtttccacctcgtcctttctgtctcttgcctctgttatcttccttcttctcttcaattacttcagaaggagcagaagtcagggcgactgagtctgttggtacagataattcggcaggtgcagatggctcggctgaggatacagattcatctagtttgaccttcttcggtgaggagggagccgttgaggcagctgtcgaagcatttgtcgaggcagacgaagacaggctggactggtttacagggttaatgacaggagaagattcccttgaccgtttgacagaaggctcagactgcgattccatgatgagaatatctggttggagtgtcggatagaaggtgtagctgaacgaatgtatcgaaaagttatattgagctaaataatattggcggtctaaaaactaatctgctttgcacggtaagatgtacgggcaattatctcaatgctctagtttgctcaatacacacagacaatacattcttaagcgagcgtatgacgagggcgtgaggagcgagaagaaggaaaacttagtcaagcataatggacgaagagtggacatgattggaattcaaatttcattcatggtttcgtgcttcgagtgagtacatataagaagtagttgaatcctactccatccccgacgtctcttacttccaagtcccaactgatttacaggtcaacccacacccaatccagatcattccagaacaacgtgtagaggttagttctagcgcaacgtcagatgaaactaggatagataatttcgatggcaggggaagatatgatgcaagcagaatagacttacccttccctcttgagatatctttttctgaaatggggttggccgaacgtcagataaatgaacttcgcggatgtagtatttttgaggattctgtaaaatggtcaagatgaacaaaatgaggttcgctacacagggtatctcaaggggatggctcaaacaaagggagggaggagaacgtaccggatgacctcgtcgacctctgcgttgcagttcttctgaacctcctccgaagggttctggagtgatccaaagcgcttctgatgagcgtatatcctgacagacagaggacattccaaaaactgatagactcacccaaacgtctcctttctcggtgatcatggcgctatgattatttgagttgtgagatgaatatggttagactttgaaacatgatcaaccgaggaagttaggatacccactccatagttcctgggttcagagaagtaagttcaagtcagtcgatactgaaaaactttgaagaaaagaagagagtatcacctttatccagcgcaatatcaaagacaccgtcggggaaatcaagcttccggatatccatttcgagccattccatctctggacgggtctccgagtgaagagctttcatgttctggatcaacgttcctgaatagtcgatgttcacgatattcctccagccctcgtcatacatcttttgaaagcaacataggtaagaagagcttagtgtatacgatatctcgagcaccagaacgtgatattcgttaactatcacctacagcttctcctaatgcgctatttccacagccgagcatgaggattcggctttccttagaaggaatgagatctctcctgtgtaaacgcaaaggaatggaaagtcaacgatgctgcttcaagttgatagagtagaccaaagcgagagccgtacatcaaaggcaagcactgctcgggtctaaatcaagatattgttcacatcagcaatcaatctcctatcacttctgagcatgttggactgcaggaagaatatacgtacttcaaaaaccagtcgaacgctgtttccggagcctcagtaccataccgcttgtcccagtattcttgggttccctaagagaccagatagaatcaaggcgcgacaagtcagtcttgtttcaacaagctgagaacacttcgacgagaacgtcgacctacatatgacgagttctgatctggaaggatatctcggtttgttgaaaactttctatcttctgccgacattgctgggttgtattctgttggttccgattctggatgggtgtgtgcggttctttgatggactagaaaaacacagacaactgactgtaattttttgtagtctcttttttttgtttcctcctcgtcgcgtcctctgctcttctcccttgtccatcaaccttcatcgggatatacttccatcgcaagcgataatctacatctagttgacaagcatggactttcgaaattcaaaggtgatcgttctggattcttcgtccgattttgtcagagtcatttatgggttggatgagcttttgaaacctccgtcgtcggtcagtctctctctttcttccttgtctttcggaacgcgttctttcgtgtttctgcccagaaactgatccagaaagctatcttcgttcttctttcatctacatctacgcatcaatcaacaggaggttcttgctcgtgtaggcaaacggttacaacccgacccagctactagtcaagacgaatacgaccaagcatcgacatcgacaacaccggcacccggatcgaaaccgccggcagtcgtctacctcataggctcggatttagaaaaggctgaggcggctggggaagaactcgaaatcatttggcctttcagagacggctggacggattggaaatctattgaggctctttggtaagtggacatctcttttggtagcacatgatcacaacctgattggctttgccttccgcctctacgttcatgttcttcctctttcttgacttaggaaatacgccctctatcaatctgggccgtatcaccgaagaacgaatgaatccccaataatagtcacccatccatccttgttctcaaacaatcaaatccatctcctcactcaagttttattcgagcgtcttaatgttcctgccatctcgctcttgcctcgaccggtcggtgcgctcttcgctggaaatgcgaccacgggtgtcgtcgttgatattgggctcgaagaaactagcattactcctgtggtggactcgacagtatgtccaaacggatgcttagaaacttctttaggtgtcagacactgcgagctttggatggcatctctgttgacgaaagaagagcagcttatcaagacactccagagcccatcgcctagttctctcgaagaaccagaatcatcccccaaagagcaacctgcctccccgtcagataccactgcaccttcaacaaccgcaccaggcgagtctgaagcatcgaaagaaataaacgctgctccgacgactcctccaactcctcctcttcctccagtatcagatgaagatctacatgatactctcatccggctatccgaacatatgtggaagaacaacctgattcgacctgttctggctggtggagaaccctactcggcagaacaagaggaggaaggtgtgacggatattgctgctgccttagtcgctggtcgagaaaaagcattgatcgaagcccgagctgcgaaatctcacaagtctgcagctaaaaaggaagaggaagccaaaaagcgagcggctcaggcagccgccgctgctcaagctacaggtgatcagagggatgcagacgtcacaatggtcgaatttgaaggaagagagctctggatcggtcatgttcgacaaaggttttgcgagccactgtttgagcccagtcttttgcagggtatcaaagggttagaaggattgaatggaggaaggccggatgagttggtaggcgtacaggagttagttcagatgggaatcgcatgcgtcaacgggcctgagaaggtgttgtgttgggaaggtgtctctgttgttggt

SEQ ID NO: 2133 - DNA, 4786 bp, Xanthophyllomyces dendrorhous
gtgagatggctagagttaagagtaagtgtctgcatctgttggtttctcttttcttccagaactgtgtcttgtgagccttttcgaaactgaatgttcttccgtcttttctttctcggattgatagctttccctgtcacgcttctctcacatctcatgcagtacatcttgaccgatcctgaatcaatttctgaggttcaaccgaagaatactaggttcttgcgtataccaaagtacttccctgaatatgtcgaggaaggtggttggtccgccccattcctgggagcaagcatagtgggcaaggtacgtctgaagcctcgcaaacagtgcatcctctctctccaacttccatgggctcatatctcaaacttccttttgcttctccattaattatcgtcgtggtattcagctggtgtacgcagacttgactggaaagtactttacgaccaaagtcgattataatagacacgtacgtctctctcgtattccttctgtgttgattccctctttagtggatgcgcacaagactaaccacgtgttttcctctacaaccgtttactttctttctttgttactgatggtgtgatgtttcacaaactagggtcccgcacggatgacgagcgctcctgatctttgagaatgtctgtactaagatgtaaatgcatatcgtcgttttgtataacgtacaagtataacctgcattcgatacgaatgacggctgcctgaggatagacaaacagttgaagtgaaagttcgagagtcttgatgcttcgtcacaggcaacagacagaaaagcgatcggggccttagatactgatcctcgacgtgtcatgtcggacgacgaaggatagaatgacgtccaatttggactccaacaacggttatccagagagataacaggccgctgttgaagatgacagggctgaacaagcgacctacaccggagagatagagcaggacgtcagacaggtcgaatgagaggtatgacccaaatcaagaagaacgacgaaatgtctgtctgtctgtctgtccggagcccatttgtagaaatttggcgagaatatcttcttcgtcatcgttctcctattctacagtctttccttccccctcgaggcaatatgattattatggagggacctctcaagcggtcatcttctttctcttagtgggtatgaaaagattgacttcttttcgtttcggcggcctactcggttgacctgcaggtatcacagtggcgctagtggtagacacaggatgaatgacgggcgctgggttagatggaggagatataggaagaatatttgctttggcgggaggagaatagacaggagcgacgggtgaatatcgagctcgagcgaacgagggggatgaagaggcgatcgcaggaggtgactgagcggaaggagagccagatgtcctagagctagctggtgagctgacagtcactttttgtctgatgatgttcttgacgaccgaaccagtacctccttttttgatctctcctgacgaatcctttttgaagaaattgaccactactttttcgcttggtagcttcggttctggctccggagggacatataccggtcttctatcaataacctttggtttcgtcgagtcgatgacgaaccgctgggccggattgataggtctggttgacatgagcattcggccaggctcgcggattacagaagaggccggaacgggaaacgttcgtcgggacgattcgactgtcgatccggacgaattgggccgggtttgagatcgaggtaatcgaaagttttgggcgtaagactttgtatgtgagcgcgctttggacaaaatggatgatgtcgatgtcgatcgcgtgtctgaggagaagtgatcggagatggtcaatacagcgaatgtcaacttgagataagttgatttacttcagaaggcaaaatcaaaaggagacgataaaacatacctgtggctgtggaaaatctggactttttaatcttatcgcccgagagtttgttactaaacacaagctttctttcttgtcgttgactctctagagcagcatagctatctttgagacattgtcgtctctcctgctctttgatctgacgattctcgtgcgcggcctgttgaagaataccgaacgtaagagaccatttaaaattaaagttgacagaactgaaaagaaaggacgcattcagccgttgtaggcgtatgacatacaatataagatcttcgccaattactgggctcttttatctcgcccttctcatacgcgatacgaaactcgaagaaatcttgaagagtgagacgtttccataggactgttttatgttcaatagaggtgtgttggatgtgatcataatccgatcgacatgtatgtcaggtatactggtatgaaatgaaaagacggatagagacgtcacgtacttctggagtcttttttgatgtgcttgagaaagattaatgtgcggtggaccctgtaagcgatagtataccaaagtgagaggtcaaaagctgaggaacataccgggctagctagctcaatctctgccagctgttcggccttgcactgtgatagaaatggctctgccaggctgtaaggcatatctccgatatccgtcaagactattcgattcgatttgtttcattccgttcaaagaagatccaacccagcaaacaaagcctagcatcagcttaagtattttccgtgagaatagtccactaagaagtcttctgttcagactaagagtgagactgataggacaaagtagatactgacgcgcgaggtgggccatgacgactgaccaaggaaagcatgaaatttcgtcagagtgacctacaacgaaattcgacgagaactataatcatgtagacaaaccttgagaagccatctgtctgagcgagagcaccggacctggcaccatttttcttgtggagtgtccgaacggcatcgggagaagtcaggcgtgtcgttcacttgttaggacgtatgttgatatttatcggaaagaagactctaggcgagctaggacgaagaagtgagccagattgatgtgttagggttactgaggttacaacgacgtaatcaacacccactacatcatcactcgtaaccacgccatttgatcaccctttctcgctaatcattctcctactaaagtgtgaacaatcacccaaaaggggacgtactccgacatatgatgacgacaatgttcattgaggatgtctactgacgctggaatcgtacaaaagacgcttccggccacctcgtatgggtctctcaatgttgccttgacggatcagatccagcttactatgtttagtctgttcggacttaatcagcccgaagggctgcttctcacgatcagaactagacagaccccgaccaatgtcgtttatatatcagaagaggaaatacaagatgctcttaagagacatcttttcattgtcattgatcatggcttgctatacatcatctgtgaattcaacaaaaactcaaactgatatcgctctccgcatgtagaaaacctaaacgacgtctgataactagtgtagctcagtttgtgtcagatcaatcaatttagactttgataccccaatttgatctttgatgcaccttctttctgtttttttgttgaagctattcaagaagtcggcttcggtgtcatcaaaacactttccagtgatcctgccaatgtcatttttgccagtgcccgatctccggcgaacgcgaccaatctctatgacctggccaagacgagccagacaaatattcgtatcgtcaagatcatttctgccgaccttaaaggcaacaagaagtccgccgagaaattgaagagaactgccggcaaggttgatattgagaatgcgaatgcaagccaacgagacagactctgcgcaatgaatcctttatcataatgccggcgttcccatattcatcgctccccagaaggagtcctcttctgttctcttagaatgtgcgtccaatgttcatcctcttccatcccttgtgaaacctgttcctgctcaagtgtagtatacactgctatacgggtcatatcagatgtggaacacacactgataaaataatgtttagcatgctcgaaagaaagaaaatatgaaatcgaattcttttcatctcccctcgactaagcattgtatggtagctcggcgcgactccttggccactcttttcaagatgcgatccttacgtttcactgaacaaggctgtcatcagggtgacccacaaatatatggttctggagtttctgcacatgatgcgcgctcaacctatggataccatattccactcggtttatagtttctctttcatagtcaagagaggtctcagacgatgcttcttttattgatgtctagctacaagtctcgctatatcaagattctctatcattctgtgtctagctgagaagtcaaagaggactttggctgaatgtagtggttacagccatcgtaacacattcacacacttcacgatcaagaatcaaggatttgtacttggatttcttcatacatcaccttctgccaccacccgattttcttgtttctctttctgccttttcgctttcttcttatcatatagataatcttcagaaggttcttgccaaccattcgcaaaaacaccttttctaagcttctcgcctccgagcgaaaacaaacgatgtccgggagcacgaccaacaagaaagacatcgtctccggttgggcagcctcgacttcgaccgagtttaacgacgagggagaacctttgaacggatcatcacaggctgcagcagatgatgcagga

SEQ ID NO: 2134 - DNA, 20290 bp, Xanthophyllomyces dendrorhous
caggagaggatatcaatctggatgtgataggaaggagactgattggagggaaacacaaggaccgacgagacgagctagcccggctggaatctctggccaagaaagatggtacatccttctttcttttcattcctttctctatatgatcaagtcatcaacatacggcctgaatgtctggctttttgtttaacctacttatggctaactcgttcttctctaccaacagctatcccgatcgatgggaaagtttcccttgtcgagctcgtgctttctttcgtcttccgaatcccagacttcacgtccaatgaagctatagtctctctcgttactgctctcactatgtctgatccagaaggccagattgtccaaacttgggagagttgggcaaaacaggagctccaaagagtgttaccatcggctggaacgtacgtgtctttctctttcatatcctcgctcttccttcggccatcatcttctagcatctgctggtttgcttcgcttgacgtctcaacttacttactttcggatacccttctcaaccctaaattcagcccatccactactcctatctctgtttacttggtccatcttcatctgctcgctctcttagataggcttgcttcccaaccgactaagtcttccagcttatcgtctctgacgctcgcgatggcccagacattggacgtgcttgtctccgatgccagcccactgaaggcttccatccaaaaagcggctatcacgcgaacgagacgagttcttcgaaacgtacgattattttacttcgtttttgtccagctgtcgaacaataacagtgctgacgtgagactggctgttttcgtcttcgtcagaaccctacggtcattccgtctttattatcgagccttgttaacaagcctgccgataatactgtgccgacagccttcgctgccgtcagactcccccttgttggccttattgtcgatgtgtgtcttcatcttcgagccaaatctgagacggagaagggagctattggagggactggtcatacttatgttgagcaggccaaagaagacatcatcgagctgtggaaggccgccgtcctcgctggaggtcagggtcgaagtggacaaactgctttgaattcgttcttctcacgtttcgtcactgaatccgaatttgggactcttattccccaagtagagaagggtttcgttcgaaacccaaacacaacgtttgaagcgcttggcgcatttgtttcttccatcaatcagttctcgttagctccttacgctcaatcaaagctccttcctctcgtgctggtcaacgccaaatcggcaaagccggaagttcgattggcttcggtcgagttcttctatgtgctctctcagaagatcaatggcgagagcaaagaggaccaggaggctcgatcgggtgtagcagatgaaatcctagctgtcctcaagtctggcaagaccgtttctcctgaacatcgactggcattgtactctcttgtcagcacgctccctgcggattcaacaatctctccgaaggtctcagccgttctaccgcctctcatcgcaaaggagacgacttccgaaccggcactcaattcactactccaaactctgtctccccacctggctgctacgctcatctcaaacatccctgttccggctccatctgcaacggtcatcctgaaagagttggcctctcctaaagctatcactaggaaggcggtggtcgcctgtgtaggtgacgtgctatggaggatcgggcaagttggagatggccaaggatggacggccgaggcggacaagttcgcggaaggtacaagtaaagtcttggcggacgtcagcttaaagaacgtcgcaacagccgctctgacggctgtaggcggagtaggcgaaggatttatggccgctgctgtgatgcttggtcctttaacgaagtcgaagagcaaagccgttggtacgtacccatctttcttcgtatcctctctgtgcaaaattcaagttcactaacctttgcatgtctggaactaaattctacagcaactttactcagtaccaaccctatcttgcaaaagatcaccgatgtttctcctaaaccctctttcgttctctgggacaaagcacagagaaaggtttcttccaaagaagatgagatttggctacttagagctttggaagctttcatagcgaaattcgaggaaaaattagctaaggatgaggctatgagaatccaagtcggacttgccttcattcacttgatccttgctagttctaaccaccaaatccgacaagacgctatcgttgctctcagatccggtgccaacaggcgattcaagatctacaatcgaatcgtccgtgactctcttaaagcatacttcttgagcaaggaatctactccttcgaaagtggtcgctgaagagacggaggtgaactcggagacgagggctaagcagcttttgcaaatcctgcacaccgctgtgtcattccctgaggagacttttgaggaagtcaaggaggatgctttggtcgaattggtcattttggctcaccatcccgagcttgggtccatcgccgatcatgctttcgtggatttggccgtctcccattccatcagtcttgcgaggcttgttgaccgaactcagacccggcttctcaagctgctttctgacaatgcatccgtcccgaagaaaagcatttcatttgccactgcctcataccgggccgctaagtctctggcattcatatctccggaaatctttgtacctgagctcatggctaaggtccgatccgatctagatcctcagcatcttgactttatcggtaccgtggagcaaggtatttgggctaccccacccggctctctcttcgtggacgttcttgccaacaagaaggtcgctcccgctgccggatcccgggctaccgctgctatggacaagtgggagcaggaggttcgagagtctgctgctaagaagaaggctgctgctggaaacggtgttctttctaaacaagatcaagagctcatcaagaagcagacggcagtcgaggacgacgtccgagcgaagatttcaaagtctcaacagcgaatggaacgcggacttgctctaattcgaagcttgatcgaggccgatgtccttgagttcaaggcccttcttacggagacccttcagattcttttagatggacctttggacaagggttccttcttggtcggagacgatgctttccaaaccttcctgcgtctcggagactgctgttcttctcgacttggtttgcttcgctctttcatcggagtggctatccttcggaactatggtgtaggcgcggtacccaaggagatgcaacaggagcctctgccaagtttggtcctccgagttctttatcgactccgtaccctcagcgaacactctccgttcgactctacatcgtatgcgtatatcactcctttgctgacaaccgtcattgccaagggtggcttgggaggagcttcatccgactcggaagaagctatggaacagcttgctttagttctggagatcatcaatttccattgcggagaattctctgatactgttttccctcgtctctcgaccattggcgacttgattcaacttattggtagccaacctgcgcttcgaaagtctgctgcctctgcactcatcgagcttggtgatgccatcaaagacaacgcggttgaaggtgaaatcgctgctctcatcaagggcaccttatctcaggagatatctgttcgaaacgcttctctgcaagctatccagcctttggatatcactgagttggactattctagcgagctctggatcgcgtgtcacgatgatgatgctcagaacgcccgactagctcgtcacctttgggaggacaacggattggacgttccggatacattccttccttccttactccctttcattgagcatgacaatgcctatgttcgaaccagctgcgctatctcatttggagaggctatcgccctgcaccctggactcattagtgaagtcgtcgtcgctttagaggagctttatgttgaacgggctaagttgcttcttcctgaatttgatgagtttggaatgatcaaggaggaatctctaaaccgagctgatccttgggtcatccgattggccatcgctgaaaccttcaagcacctatctcctctatacactccggagcagattgtacccctcttcgagttcctcatccagactgaagctttaggagaccgaagtcccgaagttcgacgaggtctccttgatgctgggattgttttgattgatgcacatggtcatgtctctcttggagagctcatcaaagtgttcgagacctacctcagccagccgtcttccggaactgaggcaggcgaccacatttccgaggctgtcgtcatccttttcggccggctcgctagtcatcttgatgccacggatcctcgaatccctaaggttgtcgaccgtctagtggaagctctaaagacgccttccgaggttgtccaggccgccgtgtctgactgtatccctgctctcgtcaagcgcatgaagtctgagcttccctctctagtgtcgcgactctacgatctcctcattcatggcgagaagtacgcagagaggcgtggtgctgcctacggtgtggcaggtgttgtcaagggacgtggtctttccgctctcaaagagtttagccttattgaccagcttaccgaggctgccaaggataaagaggactttaaagttcgacaaggagccttgttggctttcgagacactctcggccactctgggacgacttttcgagccttacgtcgtgaacatcctacccctccttttgaacgccttcggagatacctctgccgatgttcgagaagccacccaggatgcgtccaaggtcatcatgtctcgactctctgggcactgtgttaacatcatccttccctcgcttcttgaaggtctcgaggagaagcagtggagaaccaaaaagggatctattgaactcttaggatccatggctttctgtgctcctcggcagcttgccttgtctcttccgaccattattcctgagttgaccgccgttctgaccgactctcagtaagtctttcctcttgggcattaaccgtcttatcagatactcaatagtttcggatttatattctattctatctattcttctgttaatctagcgctcaagttcgacaggccgctaatgctagtctaaaacggttcggtgaagtcatccacaaccccgagatcaaggctctcgtcccaactcttctcaaagctctagtcgatcctacgagcaaaaccaacttggcgcttacctcccttctcaacacgtcctttgcgcacttcatcgattctccttctctggcccttgtaagtcttcaaattccatggacatcaagcctgacgaactaaccatgtctttcacgaataggtggctcctatcattgagcgaggacttcgagaacgaagtgctacaagtaaacgaaaggccgtacaaatccttggaaacttgtaagattcctcactgacttcgtttcgagtcctctcttctgatcatgttttgtacatttgaatggcagatcgtctctcacggatcctaacgatttcaccccttactgtacgtagtttcttcagaatctttgtcgaaacaaaatttactaacaggatatgtacatgttgtatacagtggctactttccttcccttggtccatattgtcttggttgacccggttcccgaggctcgagccactgccgctaaggctttgggtactcttgtggaaaggttgggagaagagagcttccccgatctcgtggagaaccttcttcaaacccttcgaaccgacacctcaggagtcgatcgacaagttagtctagcacatacatctatcaaccaattacccgccatttcagagttttttgacaccttgattatcatctttcagggagctgctcaaggtcttagtgaagtgctgtccggtttgggtatggaacgactggagggtcttcttcccgaagttatcactaatgctagcagtcctcgatcttacgttcgagaaggtttcatctctctcctggtatatcttccaactaccttcggacatcggttcgctccccatttgggtcgaattatttcgcctattttaggaggtttggccgacgagtccgagtatgttcgagaggcttcgatgcgtgccggtaagatgattatcagcaattactcgaccaaggctgttgatcttttgctgcccgagttagagaagggtctcgcagacgaaaagtggcgaatccgacagtcctccgtcaaccttatcggagaactcttgttcaggcttactggtatcagtggaaaggccgagattgaggaggaggaaggcgtcgatactggtgttgctgattcttcccgaaaggttctcctcgaagttcttgggcaagagaagcgagaccgcgtgctttccgctctctacgtcgtacgacaagatgctgtcggagctgttcgtaccggatccgttcatatctggaaggccttggttcagaatacccccaagactttacgagagattttgccatctgttatcaacatggttatctctctcctatctagccctggagatgaacagaaggagactgcttcgcgaaccttggctgagctctgcaaaaaaaacggagagagaatcatggccgaaatggttcctatcctccgttctagtgtgtcttcacccgattcaaacatccgtgttggagcctgtttggccttcagtgaaattttgtacgtttctcgaattcgcatgcgtttacaagaattttagcctaaccagatgattcgttgatcttgatagggagaatgccgtacctgctcagcttgaggagcatgagggtgctatcattgcaggtatccgaaccgctctcgttgatgagaatgccgctgttcgagctgccgcggctcagaccttcgatgctctcctccagggagagtttggaaataaggctattgaccaaacgatcccaacccttctcgaggctctccgacaacctggggcttcgtccgagaccgcattacgagcattgagagagatcatgactgtccgtgccaactcgatcttcccggtcgtcatcccaacccttatcactgtcccgatctccgcattcaatgcccgagctttgggttccttggtttctgtcgccggaaacgcgctcagtagacgactcacaccgattcttaccgctctcgtcaagtctttagagactgagaaggatgaagacatcaaggctgaggtccaggagacaaccaagacattattgaagtctgtagaggatttggagggaatcaactctctcatgatgacccttcttggttgggccaagggagaatctcccgagcgacgagtcagcgctcttcagtgcttccgaacattctgtcaagttactgaagaggactacgaggactatcgaatcgattggatcagacagctcatctccttgtttgccgaccgacagtctactgtggtcgacgccgcttgggaggctctcgaggccatggttaaggctgtaccaaaagacgaattagaagatttggtcatccctcttcgaagcagtattgagtcgacctcggctcccggttatgaagtgcccggattttctcgcccgaagggtgctcagtctatcgtgcctatccttttggcaggagtactcggaggtacccacgatcagcgagaacaggctgctggcggtattggagatctcgtacttcgaacgtcggaggctggtatcaagccttacattgtccaacttactggtcctcttatccgagttatctctagtcaaaccttcccccctgccgtcaagaacgctatcctggctactcttacagtcctcctccaaaaggttccccatctcgtccgacctttccagcctcagctgcagaggacatttgtcaagtcggtggccgatcctgcttcggtctctatccggaaccacgctgccgagggtcttggtgtgttgatgatctctcaaactcgagtagatcctttgatcaccgaactcgttgctgggtgccgtacttcggagcctgagattgcctctagcatggcacatgctcttgcgtcggtatgtatgactgctggtaagaacttgggcgcaggctcaaaatccgcgattgaggagctgatcggagagactttcgaaacgcctggacatggtacgttatcttttgcattagttaatcagcatgtttgtagccaaactagggtccattgtctaaatacacatttccttatctcaacaatatagatgctttcaacgaggcaatcgctcgagttgtggccggtttgacgttgtacgataacgagagtgcccagccagtgtttgagtaagtatttgcattcatttgacttgaccttactttggttctgatgatggaaacaatgaatcactaatctaatctatccaacttttttttgcgatcagatccctcatcttcccatctccaccatcaccggtttcttctcaggtgattctcgcgctcgccaacactgtgcccacaatctttgagactttggatgttagggagcaagtcgtcaagaagcttttgtcgagtattgcggtgttcgataacccgagcatagctcgaccagccagagaagcaagggatgttctcaaggggcttggggacgaagtgatcaactcggctcttgcagtttagattgttagacgggatatttgtgtgtaaaagaaggaagacagaaaggaagaaaaaggagcagagaaagttccgcgtagatgatgatatacatgttgttctctatcacccagtctatgagtttgacacagctttgtggcaagccgtgacgtcagtgccacaagcaccctcatatcatgagccctgcccccgcttgcaactttccttttctgttctcctttagccatcaaccatcatgtccatccccaatgtatgttctgatatagcactttgggagtgttcgagcgcataggcatactgctgatgtttcgtcgttgtttcatgttgcaataaactcaactttgaagtattacgctatcctttcggttcctagaacggcttcattgtgagtgtatgtgtttctagccatccatcttctggagaggtgtattgacccaaccacatatcatcgactttagtgaggagattaaatcggcctacaagaaggagtctctcaaatcccatcccgatagattagcccctaccgcttccgatggttcgttcattttgtcttgacgccctctttattagtccactcagttatataggttgacacgccgcgggttgattatcatcagctgagaggaaacgggcgactgctagattccagcaggtagccgatgtacgtatactgtttcctattgtgtttcatattgaagatatagacttgctcttgactcacccttttctccataggcctactttaccctgtctgacccagctcgtcgaagagaatatgaccttcatactccttcgtcctactcgttcccctcttcagacccattcgatggtactgaagaatcggcatactcttcatcgtctaatgtgcctcctaaagaaagcacttcgtccttcttttccaacctcttcaactcggcgactggtggtccggcaggtcactctaacgccgacgaaacattcacgagtgtgttcgccgatctacttgagccggaggttggaagagagcgcgcaggaagaatgtggagcttggtgggaggagcaggaggtgcggctgtaggatttgtgattggaaacataccaggagccatggccgggtacgagttgtcctttattctaaatcaccttgttctcacgttctgtggattcgagagtaaactatcatcgccgtgcatatagaacaaagagcgctgacttgattagaattcttcttttctttcttttcaattcagaggatttgctggaaatcgtctaggtgccgtccgggatgctaaaggaaaggccgttggtgaggtcttcatggtacgttttctatgttcctttatatgcttctttcttctttctccagggggaaactgaccaaagcacaatcgttcttataataccacttttactggaaaaacaaagagtctcggctcggaccgaaaggcagaggtaaagaagtttcgctcgttgatcctgcccatccttatcctgctcacttttatctctcgatttccattggttctcttcagattctccgagcgctcgccgcaaagtttttctccagcatcggccagaaagcattctgattcttctgttctccagctatattgcacccgtcgagttgttcatcttttctctattgagtttgcagacactctctttcttttctcatcctggtttccgccgatcttgtatcaatttctatcactcgtatagctcgacgcaacatattcaatgtcctttctgttattgtcgtctgtgtttagttcacgaccaacggaagaatgcgctcttctccattgcttataccaagataaaactccgaggaaattcaaaaagaggaaaagtcgatagacaagatagatgagaccctgcgaagagggatggcaaaatgactgtacatcaccctgcacacgtatgacatgcttggcacgtgttgacatgagaccctagagagattaaatgacaagttgaccgagagaagatgaaaaaaaaaagtgaagagaaaacgagacagagagacggaaggcgaataaagaagagacaggagagcaaaaaagaaaaagaaaccgatcaatgagaaggaaatcaaagagggaactggaaggaggaatcacattgcgagaagacgaagactttgagatatgaatatgattaattatagttgaagttcaacaagtcacgagatttcttcgaaaagaagaagacacgatgattaatgttatgtcgaacaaattaaacacaagatgaacaagagaatgcgaatgggcatgcacggtagagaaaaaagtcgaagtgaaaaagatgaacgggcaatagagcacatcaagtccaatcatctgacaaacccttaggaataaagagacaacttataaaaccctgatagaaacggacagacgagagagagaatatgttctttcacagagggatatcggctagctttttcaggatcgcttccaatttgacgttcttccccgttcttccttccgaatctacgtctccaagatccatccttgagttagcttctgcgaactctccttgaagccttcctagttctctctcgagtgcacctgacaaggtgttgaggacttcctgagtatattcgaatgagtgggtttctgtgcgcatgtagtttacacagtggtgaaggatctcaggagaggtcgatttcttctgcaacgtatctatagcgcgccgaaagagaaagaggaatgacaagctcaacatctacaaatagagtatgaaccatggtgagaaatgaagagaagaaactgactgatgacgagtctcgatgaggggttggcatgaatcgagtggatagtgggaaaactgaatttcccttctgtgaggtcctctgcaaaattcttattatgggcatactgataaaagtttgcagtcaaagcaccaggagacattagaatagattgtttcgactgtgatacttagagaaacgataagtacctcagaagactgaaggttcatatagtcatccctgatctggaagtatattgagatcaagttgacaagctggacaaagtctctacacaatgatatgtgcccagtacgattaagggttcccagaagaaacggatgagttgagcacgttatgctctacaagaaaacatagacggatgtagttattattgagcacatacatgtcacattctgactttgccatcatcaatctgaccgctatacggaacaaacctcccgtctctagatggacgttcatcccgaacatggtcagcaatagacaacaatgatttcagccaggacaaaagaccattcgctcacttccaagaaccattttcacatattcctcttcgctaggacacgtcagactatctctccagaatagctccaggccttgccctctatggagggaaagtatctcgtctatttaaccgaagaatcgaatgctggtcagatgaatacatacaatccaaagactagagtacaagtgaagcttacctgtgatcactttatcaagatacgtatctttcgagaacggaatctgcgaattaggagttgacgtgcccccgttttcagacgaggccgaggaggaggaggatgcagaggagacggatgattgaagcgaagcagatgaaggaggaattacaggcatgggtatcggtgttgggcgaagcttgaagatctcttgataagccagaaagtagacgtagtttgcactataatccatagtagttatccggtcagaataggcaagtcaggactttcggaacacacacagagatgggatggaacgagcaaatgaacgaacgtgtttattgtctgcggaatcccgtaaattagatgggccacaggcgacccacgcctgaggaccgatgaatcctccacatcgtccattctaatgggaaaaaaatgaacagaagggacgtttacacaaatgacggagcgaacgcacaagagaaagatgtcagtttaccgtcgcatcttgaggactgttgtaactagacgaccagtggtccagcatgatgggagatgtgtagaaaggcaagaggatgaggaaaagactcacaataagctagcggtatgtagcatgctgtttatagcagaccaagcaagtcgaatcggattaccaacgagaacaagaacgagaaagaacgaaataacgaccgtcagtgctgcattgttccgtgccgagggttgaagttgttcaggcatgaaccccatctggcgtttgacctgctcggtctactaactccgttctgctccaagcaacaaccccaaccgacaagctaagagagatgacatacccaacaacgttctggatgacctcgagatcctccttcttgacatccaaccaatagttgaaagcctcgatgagttgtgatcgaatttcttttccagggttctttcctaggtagtgatacggttcaaggagcacgatatcatcctgaggagtaaactcgagtggaattgctgtgaggatgttcgcgtaatccatcctatgtgttccggatgagtgtatgtatgtgtagttctgtgtgttagctatggctgagtgcactttaaattgggtgtatgctacgtgtgcgatgaacgagtggggtatatgctggtcgagtatccttctggttcatcgtatcttccgaaccagatgaaaaacgatcgagcgagatggagaaaccaggagaacacgcaaggccgtgccgatcggccaagtcgccggccatcgaaccaggtcgaaccacctccgaaccgggcgggctcgggcaaagagatttcgaccgccggattgagcgcaattacgtaagtcaaatcgccggcaagagtcattaaaaagggattctatatatcgacacgatggacatgtatgaacagtctggtacagaaacagataattatagagataggagaataaagaaacaatggatacaatgacaggccaacaagatatctatttgagcccgaaaccctggctcatcgtgagcgcctcttcaagctttttctgaagcactgtctttgatctatacctaggcaagcagagcgtattgaaacatgtgtgcgaagctttcgaggagggaagtgatcatagttgaacaacaaatggtcaggatgcgatatctaggtcggttcagagttcaagctcaagacacgtacagggaagataagtctcgggcactctggtagcttgaattcggaagctcatgttgatcagcccggtcgcaggcactctgtcgctccccgtctgatgtcataagcgaagacaaccgatttcaaatcgtcaaagatgcattcgtcgataaagctaaaataaacatcatacgtacaacgaacgccagaagcttttgttgttgttcggtcgaccaagcagagacgagctcccagaacgatctacactcacagatcgttgaagacagccaacaggagatgagctacttccggtgaaagaaggcaaggtcgaagaggaaaattaagcccttactcaatcaactcatcttctgccgagcagccttcgtatacagtaacccctcggagctgccatgaggcacaaaaccctctctaggtcagtatacagagcgagaaaaagaaggaaaatgtgttattcaattgtagaaatattattcactcacctgagctacatctaacgaatctggcgatccgcagaccagtagactaatttcttccgcgtggaacaacgagagcgcattacctgggtttacatccagaaacccaacaccccgggaaaagacacaactctcgtcaacacaatgtcttgtaaggaaggaaaaaatgtatcacacacaacgaaccttcacacacggatagccatcctttctggaacgcccggaattggcgagaaaccgaagtaaccaacatgaactgctcgatagatgtcaggcaaacaaaatcaattccatcagatcggtcaaagccaagacgcaagaagaaataaaaacccatacctcaaccaaccgttcaacatattctatataacaaaaccacatgagggatgtcagtcaatagacttagcagtcagtgatagtgcatgatgaagaacaagatacacaccttctcgattttcagatgttaccggggtgttttctccattggggatcaatggaactggaatgatctcgccaaatgcctcatactattcaccctccccgcacaagaagagtaggtcatatcagcatagtcctgtataggcggggatcaaatgatgatagagacaaacctctccgacaaaagtccgacagaatacttcttccacatctccttcaaactctaatagaactctcagccctttgactaatgaaggttgccattcttccaaatcggtcagagtgaccggttcgtcaagaagtcttttaaacgccgccactggcaagcgaatatctaatgtagacgcgtgatagacagctagaccgataacaacctgtaactcataattccaggcggtttgtgatgatcagtaggtgagaatttttcttcaagagggaggaggtccttttattgtagaagagaagattgaagaaatgaacatacgcccactaaggtgtactgctcttctgactctagggaagctaaaagggtcacgcaaagtccattcgggtcaataacatcatacattgtttgaaacagcaaataagaaggggagcagacttgcctgggttgaaccaacacagatttgtctcttcatcccagacccacataccataccgaggatcaaatagctctctgaccaacagcaagaaccactctttcttcaaacctcccgcatccacaccctatattcgaggtcaatgttcaaatagagagatagagaacacttgtcaacatcaaaccacgcgcgagtggatggaataggtgtgtaaatgggccgacctcttcaccagcaaattcaattcggagagcccgcttaagataatgtattgagacagaaatctgagctaatgagtcctccattaatcgttctcgacggactcgaatggtgatgtatggttggattagtcgtcggccgtcaaggtcgatatacgaagtgttataagatgccgattgttggactctacaaaaaatcgtggaatcaatcgttaatttacaagagaacacgagaaacaaatcaaagagactcacttggagtcatgcagaagaatcttcaatttcgatcctagagacattaagaatggatattgagacacaaagaaacattgttttgagctcgtcgaggctgttcggacccaggcatcgtaatccaccaccgcattcaactggtcgatcagtgtaatatagaaagcagaaatcggcaccctgggtacagccatgttcgaagcaaacatcaaggagagtactctcgcggtcgaacgaaatcgccagtcgtataggtacggcaacgttttggatcgactggcgggaggaagagctgaagcggggatatgtttgacaatccgaggaaccactctgtgagagagagtacaagagtcagctctgatgtattttttcttgtttggagaggggtctaggacgtacacggtactgatcaactccagcttgtgttggaattcatctttgtcataaagttgattgaaccaattgaccaactgaactcaaagaccaaacacagtttgatcaaaacgagaaccttagatgcgcctgatcttataaggaactcaaacgtacaatgtgatgctgatcgttggacagattagacacgataccgaggaaccgttttataatagttccagctttgagatccctacttttgaacaaactgtcgttctatcaaattcagatcaaatggaaatcgatgagcacacacacgtagatgaggcggctacattcgtccaactcacctcgagtaggatgatgacccaagtcaatcctttcgggccttgcttttcatgaaaccttctcctcggtctcctgaacaatccttgaagagcttcgaagatactctcgtggagttccgatggaagggtgttcagaattgcgtagaacgctcggagtttgcttaaatcaatcccaggattgaaagcactaggctccgatgtctgagatacatagaagatggatgagtccgagtagtgttcttcgagttatcgaagggaaaaaaactcttttcttacagagaaagagttggagagcgaggaccagtgcgagcttttaggatacaaaaggagaaatcaaaaccgtttcagtccagaggatagatgtccaaggaatgagaatgattcaacgggtaactaaagcttacaaaactagatgtaattcttcttctaaaccttgccaccgactctccttctgttctgatctttccgacctgacttcgattccccgaacctcatcctgctcgttctcactgtcgccttcgagtgtctttgcttcggcgacgtctgtttctacaaatggcatcctgaaagaagacgctgtaggtgataaaagaccggctgacgaccgagcttgacggataagatattgaaaccgggcaagggtaagaggttcaggatcggagtctcgagcaagtcctagggaaagtgtggttgcaggcggtgataaatagttcgatctgatgagtatttcgtatacaagacggaaaacgaaaagacgaaagaaccaactaaccagcggctcgtcgttcgcttagtccgacatcagttattgttccacaaacagtacatctgaacgagtctaacggacgaggatattgcagtgtagctgttcattgaaaatgcaagacggtgaagaagtctctcgtgagaaacaagagcattgatctagagaaagcaacataatggcaaatcttacctgcgcagcaaacacaaggtgaagtagcctatatatcattcacaagatgtaaaccaacctcagagagcgattaaagctgctcgacacacactctgcattcgtaagaactagatgagtcaaggaaacagtaaaaacgaaccatcgagactgccatcccttttctcaagtttttcggaccttccggcgccttgacaaacccagtgattcctatggagttggtcttcctctccgtctccttttgttttaagcctatacctgttaacccagtaggtgaaggaagcgtcaaacttgctgtactcgcaatcgtccgagagattgacccgtctggaggtagaggtacgttggatagtgttattgggataggcggaggagaagccgttttgatgggtgctgtagaggagatgtgatttgaaagaggaggcagatctgaaatactgagtggaggaggcaattctgatggaggagcgatcgaaggaggggatccacgatgaacagggggtaaagatgtctgagaagtaacagcagcactgttggaagacgatcctctagatttaaacagggatgcgactcttgatgctgagcttccaccgctcccaccgttagagacagccgcctgattggaaggagagcttgctgcatttgcacgagccagaagggcatcccaagtcgaggtagatgatgacgttggcggcggagaaggggcagtggccatcacagccgtcgagggagcatgtggtgatggagaagcggacgacgacgatgacggtggtagcggttggcccgacgtttcattcgtcaaactagttgatgaaaggatgggcgaggatgatgcgcgggccagaagagcgtcccaggaagaaccttgacctgctgatcgagtaggagtttcagccatgactgaggaaaatttgctgatgtttggtcctcggggttgaacagtggatccaacggtcgtcgacggggatgatacaaacgagggatcgaactccggagacatgggaggagtccggaaagggggaatttctggtgaccgagcaggcgatgccgatgcggacgttgtagcccgtgggggtggcacagatgggagttgaacagacgaggaagcaagcataggggtcgatcttggtatggtctttgaacccgatggttgtgtttgctggtgacgtgaaatgataggggcctcgaacgatggagctccaaagagcgtattgacgggctgcttgcactgttcaacatagcctaggagttggtcccaggatgctgcagaggaagaacctgaaggaaccgaactaggtaccacgttagagaaagaagctacacgttgggatgttgaaggagcatttgcctgattcggctttggtcgtagttgagattgagattgagaatgagatttagattgatagtgaagttgaggttgaggttgaggttcgtttgaagcaaaagtcaagtttgattggggaggtggaggctgaagatgaggagggacagatgaggataggagtcgtaaagacggaaacgatgaagagccagatagaaggtttcgatcggacatggattcgttgcccaggctgcgaaaaaaaggtaagaggataaatgatagtcaacgacattacgtctcatcgattcgttatatgagcagacacacacacaggcgcgctcttgaagagtaagccaagagtcgagccaacaagagaggatacgtacgatccagtttgccgatgtcctgacgatgccaagtttgctctgagctcggacaaaatctctctctctctgtcgacctggaagccgttatcattgccagtgttggcatgcataggggactcaattctatcaaaagcgacttgaccttgagagacagatctgttttgaagaactggacgatggccaggtccgcgtgagctagagtcgtaccgttgaggagggagtgatcttggcggtcgaagagtcccagcttttgacttctgttttgaattcgagttggaagctgtggagggaggaaggaaggaaggtaggttggacgtcagtggtgttgtgagcggagactcagtccctagcaaacgatattggccaaaaaggaacagagaagaaacaagcgagcttacagttggcagaagaagaactagcggaggaaaatatgctggtaaatatcgaacttgtagatgaggaattctgatgagggcctgttgatgaattcgatccattagggttgaatggtccatgcttgttgctctccccgctgagctttgagaacatgactgtttttcgagcgtgggtagccgaaggagtgaatgactgagtgtgaatagagtgtgagagtttgcggttgtgtacgtgtgattgtgtatgtgtgactgtttgtgaaatatgcgatgagccaagaaagacgatgcttggatcgatgtgatcagaagtctaattcggagaattccaggtaggtgcagacgatggcggaccgagcgcaaagaagctgaagaacaacgagacagaagaaggcaacggtcgagggtcttcagtctatctctttcctgcccttcctgaacgaggtgtgctgatatcagagagctcggagagaagaagatcaaggccaagatggacaagcaagatgttgaaagtacaggaaggcacaagagaaataagctcagtccaagaaccggttagtcacccgaccgcgcttttggatgacacgctcactgccaccgtcggctgtccttcgcagcgactgcacgatctgtagcagagtatattgatctagtggatggcgcctcgggatgattcagtatctagtctatacagagcaacacttcctcggagcgaaaggagtgtgtgtgtgtgtgtgtgtgtgtgtgtgtgtg

SEQ ID NO: 2135 - DNA, 42998 bp, Xanthophyllomyces dendrorhous
tgtgtgtgtgtgtgtgtgtgcgtgtgtgcgtgtgcgtgtgcgtgcgcgctgtatatatgagccaaggatatatctcttttttgattcaacccatattcaaatatctaaataagcccaccttagacaaccattcggacgtgtcaactacggtagccatctcgtataatcgctttcacggaattcatatccaacctcatcaagtctgcacaccatgggacggtaggtctctggatatgttgcttctctgtctttgtttgactaggataatggaaatgctgaatcgtgtttttgccccattgctttttcagaaataccggtctcttcggagccatgacatcgatagatgccttcggcaaggtaaagcatagatcaacctgcctttttaatcagtcaaacatcgtctttttcctgctcatttgtgtatctcgtcgcttgttcttttcttcatgaacctgttctttagactatggaggatgtcaagatacgaaccagaacaggagctttccgtctgttctcgtttacttcctatgggttttgattgatagtcccgagtggaaaaatcactgaattcaggctcttctccttccttctcatctgaatagtcaccatgctctctttggcgatcatcgtgacatgtacattcatcgagtttgtcgattaccgcaaaatacatatcgaaccgtccattctagtcgacaagagccgaggagaaaagctcacggttgatatggacattaccttcccaagagtaccttgttaccgtaggtctattcgccgtccttctctccctctttgaccctcttacacagccgaccgttctctcttccttgctcgatctgtgtatcggctacagtcctatcgatcgatatcatggacatttccggagagcaccaaaatgatttaacgcacaatatcaacaagaccagattgaacgataaaggagaggtcatcgatttgcacggaaccggtaagcgagtttttttttcagatgaccaattgtgttcgcgctgtgatcacaacactgacaaactccttttgccgccttgatatggggtttgttctcgatgtgtttctaccaggactgactggagatttggagaaaatggccgctaccgttgggagtaactactgtggagactgctatggaggcactcctccatcaagcgggtgcgttctcacatctcatagtgatatcatctgcatggagtgctagtcgaaacaaaatcactgatctcacggattcatctcgcgtatctataacatcttatccggccaactacagatgctgtaacagctgcgaagacgttcgggaatcctacgttcgcaaaggatggagtttcaccaacccagatggaatcgagcagtgcgtgaaggagcactggtcggagaaaattgaggctcagaacaaggagggttgcaacgtcgctggccgagttagagttaacaaggtcgttggaaatttccacatgtcggtcagtccaaaatctcagcctgtaccaatttagaaaagctcttgttccgttggatctaaaaacagtgtctcttatgtctttttatcatctaaagcctggacgatcgtatcagctcaactcacatcatacccatgatctcgtaagtctttctcttctcttttcctttgatcagcagttctttcccagaccttcctctgcggctaaactgaactttctccctcttcgcttcccataggttccctaccttcgatccggcaaccatcacgactttggacatgtgatccacaagttttcttttggcgcagatgatgcgccgctggttcccactcagcgaatgctcgaagttagaaagaagctcaaggtggttaacccattggagggagttaacgcacacaccgaagagtctaactacatgttccagtatgttaaacctcgtattcatcagaccacgaaattcgaacagctagacaggtgccctgaatcctaacgtgataaccggccatgtgccgatcgatcgaacaggtatttccttaaagtggtctccacaaaattcgagtctcttaagggagaaattactcctgcccatcaggtacagatgttctttctccattattctcctcacgcgcttctcgggactcacaatcatgtttcgtccgtccttgtttctcgacacagtactctgtgacctcttatgagcgagacatgtccggtgggggaggtgccgccaaggactcgactggtcacatgaccgcgcatggaatggccggcgtgcccggagtattcttcaactatgagatcagtccgatgcttgtagtacaccaagagactagacagagctttgcccatttcctcacttcgttagtcacttgatcttctcgatgcgtcttgatcagaatggtcgtctgtgctgacagaacttgtgtgtttgtcaacttggatgtgttggacgatgacatttatcacctgtaggacgatggctatcatcggtggagttctcaccttgttccagatcgtcgattccttgatcttcacgggcaagaagaagctcaaaggcgagaaggattcggatggctatggcggtcttggtgggaaacttatctgattctgttctcggtcacctggttcgactaggtttgatcggtcaagtcagatcattcaaaggggagagcagaacgaaggaagaattggacatttttcttatcaggttgctcgaaataacattttttcttcttctttaatatccttctattcatgtcggtgtctctacgttacctacaagcaaaggtaccttttcttctgtacacggcaagtgcaaagtgggtcattgtcgatgtccaagccagatgaggttacaaagaagggcggatgctgtgcaggctcgcacgacgcacgcaccgtggcttaaagcatacaaacacctacgaagttcagtctagttctcacacaccatcttgcactcaaacgctcagccctacatcataacatcatgtcgttcttcaaacgtaagaaagacaagtcagagatccctttgcctcctgatgaacgtccccagtcaaaccacaacatctcgcgtcaggatcccaatcaagcacgtcaacaactgttcgcttcctcttcctccggggctcccagacagaatggcagtgcctacgaccaaacctcttcttcaggtcggacaccttcgattgccccttcctatgcctcgacagatccctatgcccgagcagcaagttcatcagcctcgggctcggtatcaaattataataaaccggtgatggacaagaagattgagaccgatccagcaagggccgctctattttcgggttacaaccctgccgccattccccgagaggtcaaacggcaggtcggcggaagggatttcggggatgataacaatcagggcggtgacgaagagcaagacagctccagaggtgagagctcggggggtattgatcaggcagcagaagatgaggaggtagagatgatcaaacgagatcttcgaggagtcaagcaagaaacattaggatccagtaggaacgctctccggatcgctcaagaagcagaagagaccgccagacggacgttgggtcaactaggtgaacagtctgaaaagattgccaataccgaacgaaatttagatatggccaaggctgcttcgtcaagagcgaacgacaagacaaacgagctgaataaactcaacagaagtatttttgtacccgtcgtcgtcttcaacaaggacagaaagagaagggaggcagaacagaggatcagcgaccggcatatcgaagagaccgcagagagacagactgccaagctggatgtcctgcaaagtcaacaacggctcaacgatgggtcctttgcggagaggaacgctgcgaggagaaggttcgaggatccggaaaagaggaaggaagccaggtcgagatatcagttcgaggctacagagtcggatgatgaacttgaggatgagttggatgataatctgacggaaacgcttgatgttaccaaaaggttgaaagcgttggcgttggcttctgggttcgttttgagtgcctttcgttgctaccattcgttcattgatcataacacactgacatattggggtctggaaatctttagagatgagatcaagagccacaacgagcgacttactagaatcaataacaaggctgaaggacttgacttaaagatcattcagaacgtcgaacgactcaaaaacgtaagtggttctttgccgtcatcgtttcatcttccttgtctttgggagctcctgagctgatcacgaatcatcctaactggtttcatccaacggtttaataggtgaaatgagcatactttctgcctcgcgtgtttgacaaatgtccgctcttcttctcttcttctttattgtgaatacagcttccgcttttctctgtcttgttcagtgatactctttctgtcttactctggactcatataattctctgatctcttgcataaatcctcttactcgtcctcttgtatcattcccatgtctctgattcagttttgctaactcgtacatgatatcacatcacgaccacgtctctttcttttaatgatgttaaatcatgggtatatgaatttagtccgaaagaaagacagaagaatagtggactgatacaacatgcagaagaagacttctagaacgaacagggcgactgtttctcatctctccaacgcttcgaccctcctcaacacgttcccaaccctttcaccgatagctctaaagtttccctcgactctagtttcgttctctttcagacttccctccatctgatcgacgatcgccttcaaatcaaccgagctctctttcaatctaactgcttcagattcgagtcgagtgagagtagatccgaatgatgaagatgcagaatgtatgtcggataaggaatgaagtctagcgagtaggggagggagaataggaaggataggttggattttgggcaacatagaggacaagctatctatcttttgaatctgtgcgactgtcaaggaagacgatgtatggtccgaagaatagagatgggtagccgagcgacggttgtgagggtcagatagtaaggtagtatcagttaaggaaggatttgaattgtttgttgaagaggaagtggcttgagctcggtcaagatcggtgaggagaagtttgattctcctagagattgcatcgagatggcgaggttgagtgagcagtgtaagaaggtggtccagtttctgaacggtgggtagcagaggtgctggtagagtttgagtctagtttgatcaaaagagcatgcaagtcaacgaaagatgatctcagaagcatgaaacagtcagcaaagaaaacgcatgactggattgtaaagcaacttacgtcgtccaaacctgttctgccaacaccaatagcgctttctagctctgccagccgtctgtcaatctctcctactttccgacttttctcctcctcgctgatggaccgaactgtctctgaagactttttggcttcttgggaggcgggcgtggaatctgacaaacctcgcgcgttctcgaggttttgtccaagcactctgattctatcctcccaagacttgccgttctgatcgacagccagccgagctccatcagcatctagcttgttgagaccgcccacaagacctttcaattccctcagcatatctttcacattattctccttcttgtcctccgacgaacggtcatccccattcgtaagaatagacgattcagcagtgagttgctcctccagttcgctcatttcaaaacgtaatcgacgaagcctggcgcggggaggttcatcatcgattggaagtaaagcggaatgttcgagacccgaaggaagtgagggaccagcgagcgtagggttccgacaagtctgcacaggagtaggatacaacgagtaggtttcttgaggcatcaacggtgggaataacagtagagtaattttgggattaacttttcacatgaagccgataatacagagcaagctctaactaactggctgctagggcaccaaacttcgctcctgccaaattgaaatcgggtagcggtgattcatccggatattctctgtcctgagcatccttggctttctggatggcccgggcagacgtggggttgattatatcgtcatcagagtcctcagcatactgcaaacatgtgacaccaaggtattgtacttgtgagcaagatgcgatgatgagatctaggaataacaacggtttgtctgacctgaatacgttcaggaggaacatcctcggtttcatagacgtctggcgcggtatcctgtcggtgatttcgaaaagcaaaggtgaacatgaaagcctatcgaaatctataactggccgttgactcacaatatctggtaaatctgcatatttagaggacatgctgaacggctatgaagaattcaaacgaccacagacgagatggaggttgatagatgatcaaggcggtcaagggaagtgggaacgtccatgttgaaactttgctgactaagcgaaatccataaacatcatccaaccaacggagccagacgatgatctccatccatcataccgactaccactcccaacatgggttcgacagttcttcctctacatgcgagggatcggataaagccagactttcatcaggtcaaccttcatatagagtcttttataaagaacgaccttcagatcaaattggatactggtgagtgattcatgatcgcgttcaccttctctctttcactcaggtttctttttcgaactcatcgacgcttgtctttctttgaatcctctcaatacagatgatcagatctgccgtctctctcttactccgacaggctgtccacttgggccacaattatgcccacttcgtcacactcagccttcaccattgaactttgtacctcctccgccggtccccgtacatccgagagacagagagagactgaatacagtatgtaagcattggcttcgtggtctctgcaagaaggtatgtagttcttcattacttctcttgtaaattcctgtcaagctatctgaactgatatcgagaatttattcggtagggagaccaatgtgaattcttgcacgagtataaccttcaaaagatgcccgagtgctactggctttccaaatatggatattgctcggccggagacgaatgtctgtattaccatcctaaagtcaagaaacgaatatgtatggactatgatagaggattctgctttctaggttcgtctctctatcttgtttttaaatgtttccgtatcgttatttactaacgcaagtcctgtttggaaaacccatttccataggcccggcctgtcctcgccgtcacataccccgccggctgtgcccactctacgtcgccgggttctgccctctcggccccaaatgcacagaaggcgcccatccgaaattaacattgcctcccgtggaagcctatcgaccgccaacgcctcctgtcgagaaatcaccgggaccaccaccgccaggttacggtaggtatgccgagtgggaaccaggaagtatgacaggcatgggtggcggaggtggtttccaccgaggtggttggaacaacggaggcgaaggaggtagtggaggcggcggtggaggtggtggaggtggaagactcgatctgagtacgatattgtgctgtgagtcctgtcaatttctccttccttgtctctccttcaaaaatgaaatatccaattgaaaccaatgaacgccaatctgaccattttacccattccatctgatgtctttcctccctcccatcattcaactgtttgcttaacctttatagacaaatgcggtcaacacggtcatttcgcgaatcaatgtgtgagtctctcctctctctcttttcttctctcttgatctttataattatttccatactgtaacttcaggcaggaaattttcgagataaacagttctctaactctgcacatcatcattgaactttccgtaatcgttctctgtagccgaaccggaacgtcccaggaaacagaggaggtcaagatcggacatactaaacccattctcctctcctttcaaattccactctcctcctacaaccgtttcacattttctttagcgtctgaagaggaacaaacgagaaccaacgacaaaaagatgaaacgttccatctattgaagatattcggtttcacgtatatatgtaacgtaatatattgattcatttgagtcaaattataccgcataagaatagcgataccaaggtttctgttgataaagctgaggcttttgctaagagaagaaaaaaagaaagagtagaggaggtaaaagagtggcgcatggttatcaaaagagacaaaagagaggggaagagaaacaacagatgaagagatgggtgcaattaatgagagtgatatccatgggtcaaggaaacgacagtgaaatgacacaaagcagagaaaggaagatacagtcgaaactggacgacatggaaagacaaatacagtggaaaaaaagaatggaagattgttgagatatggctaggtgactatgtaggaacaaaataatgaaatcttagatataggttggaatgaagggtggaaatcttcatgagattggttgatttggtagagagattccgattagaaagagaggcgaaaagcagaaagaaggtggatggtaaatcacctcagctttgggatcacattcgaaggcattaaaccactgtccaagatcacgaaatttcaagaagtcagtctcgccgtacacactattcggcatcagacacaagattgtgtaagtataaacgcacagttgtcttaacagattgtttccgctttgagaacctctgatggacacaatatggttgcgacacgcgtccttgattttgttcttctctgcatccgtaagctgtatacccaacgaaatgaaaacactctaagttggagaacgacatgctcagatgtgcgcgagtcttcgatagacgagagaaacaaaccattgtccaaaggaaggagatgtgtcctctgagcagcgatttaatcagaccaagtcaacgaatgacctcaagccaaggatgcagatatgaagaaagagacccacgggcccaccaccgttccggctatttctacgatctgcggtgcatgtctacatcatgagacggatcatggtcattactgatacacaaggaacaagacacggatgaaggacgatcgaactaaccctcctttctttactgtgcaaagattatcaacataagcctctactccgggtcttcctaattcaagtagcgccgtacgaaggaatgatattccatgatgaccaacagcgacaggtgagggagactctaacagtgccatgaggatgatcgatcgaagatttgtagatggatttgccaaaatcttagatatcaggaagctacaatgagtggatggcagaacaagacatcaaacgtttggtaagcataaggcactgtaaggatcggacaaatttttgcaagaccgtactggccccatcctccgttggcaatccgtgagatattttccatgatttcgacgaagacaggctcctatttaaggtcaggggcatggtcagtacgatatttgacagattgagcgtttcagctaaactcttttttacgcaccatgtatgtcggtgctggccaagtctcgaacacttgttgaacggatatagttccattttcggtacttgtagcgcattctgtccaattgcctctcatttccgtaatgatgctaagtcctcctcaaaggattgttactataatgcgctcgggccgagacactcaagcgatgcgtaaatcatactaacgtgtcgaaaacggccatttcgttggctcttgagcttcctttgaagatctgccaatgacagaacaagacagatcagcactatgaatcgaatattcggagatagaaaagtcactgactgctttccataatcgtcgtgctccagtctggaaagtttctgctactccaatcttgatcaggtctggaattagaacagcctgtgaaggaaggatgacagtcaatctatttgaagagaaacttttcttgacaacgcaaggaaaattatacaaaattgaacaaactcgaatctctgaatactctgcaatcttgcagacgacatgagtcccgtacttgtcgtttgacaacttaagcaagttatccctgtagtttaagaagttgtatatgtagttcaagccaaaactcgattaactaggaggaagttgtcgacgcttcagaatgcagggatgactaaccgaacagcttcatacacatccatcctagtcgatgctccaccacattcaataagttgttgaactagatagttgccgtttctattgagaaaagttagttcgacttgtcagtcactacatacgagcgcgcaagagtagacaaaatgacctacgctgtttgtgccaaacccatcagctcgcttaggatagcctgatggacgacgttctccataggttgaccccggagttggtgtactctggactttatgagatttatactcaaaatgttttgtcagttacatagagagtctgataccatggtcgattgggaactcacgatcaagaaattaactgcaaatttcagggcatgaccttcctgcgcagagcgctgggttcggttggccaaggtccatgtaagcgctcggtactcggatggaagaacctgacgagtaacggattcatatattgccttagtctgttgtttttattctgagagatggacagatatactaaccagggaatatgagcaagattgagagagaatctttgccactacctctggatctggttcatacatgcgtgtcgagaactagtataccaatgaacattctttcaatgagctccaacagacagaagattgaagcggaaactcatttaaaccctcacatcgttttctccaatgactcctatagcgcacttgacagcggtatcaactggagtacctggttctgtccggcagtctctcctcgattcaaacccaaaactttgagccgagtgaacagaatacggaggctgaattaaattcgctaatgcacatcagctgaggcaaaaacttggccggactgtagaattcgcgtacatacagaaagactgcggctaacatcgtccctgacgttgttatcatatcgctctttgagaacgacattctcgtcgcgaagctgaagcatcatcgccgtttgattgttcaattttgcctccatcttttcaagcggattcaggttagagaagcagcaccggttatgaaattcatagagtcttagtcagtacatacctgctgtattttccgagacatgagctccagagccatgtctttactgggtgccatcaagtctttctctgggcgggataatagtccgctctggaattgaaaatcggtgaggaacaattttctcagatcaactcgatatgtagggcaacgatcaagttccttggaagggaacagacatacattgtacgaaaaagcatgaggtaaggaaggccttcgatctagatggaacacatcgtgatgactgatgatatcgtcggcgggatcatagattgaatcgtgcatggcaaacattagtggggaggaaaatgaggagttgatgtgaagagacaagagagtgagggtggatctggaggatggtggcgatgagtgtagatcgaagaaataggaggagtcgctgaaagccaatgaaaaggaaggttttgcagagagaagtaagactttcgagaggtcaggcaagcaagttgactatggggagcagacgaagtagaattatggcctgaacctttggatcggatcgttagcaagacggagagagtgagtgggaggtgccgagagcgttataaaaggtgggaggggatgagtcaagatacgagaagagagaaagagggtcaacatccaaaggcttcttataccgaatgagagacaagtgaagaggaaaagcaaacaagctagggaggcgatgaggaacggaaactgatccatagtgcctgttgaagcaaacacagatatacgcgtgtatcagatgtggaggaaacagaacctgcagatcgcaacatgagtatatgacgcccctgggacatggagtgtttggattagatctgatgaactctacagagagattcgttcgagtagggtgaatcgcgtttgtttgtttgttgcttcgaagaagcatggatgagtagactcggcgctgagaagaaaattgaaggatgttgtgcaaccccgttcctgtcctgagcaagtcaagtgcagttgttaaagacagatgatagagcaagaagagtatacgacgaagggccaggagaccgaggacagtccagaaagaaatcatcagatatgatcttgagcaaatcagcattcaaatccatcgctttctctccatagatagatacaacgtcgacaggatatacaactcgagataagagaaaattcaattcttagttcttcttgtcccaaccgggaccggccttctcgtaagcctcgatctcctcatcaagccattcggggaagtcattctgaactacttcaagctgttctttctgtcggaaattcttgccggaggtggtgacgatgacgattcctttggtcttgacccaatccaaagtagcctgactgacagtgatatcgacgtcccccttaacggtagagattctatgggctacctgctcggcgatcgcatcggcgggtccacctgggtaacgaatgtgaaataccaggcggagttggttcataaagggaaggggtcatatgtaggagtgaatcacgtacctggaaacttggtgattggactcagagaagagtaggcctcgatcttgatatcgttcagggcggcaaacgcaagcagaggagcgttctcgagcgcattgtatgcatggtatcgaatctaacgtgataaacttcgatgaacgacgacactattggaagatatcggaaataacaaaagacgagaaagtaggaagaaacgaacttgattgacggctggcttggtctttgcgatcagaagcagctcggtgagctccttcactccaaagttagagacgccgatctaagacggaaagaaacaaggtaagtttaactaggcgaaagaccataatttgtaagaccggatactctttttcaaaaacaaaccgatttgacgagtccctccgccttgagaagctcgaactccttccagactttagcaatccctccggccgattcggcagcagatgggaaatgaatgagataaaggtctggatatgattggaatgaaactgtagcattcaactgctgaacgcgatgatgttagttgtttggaagataatcaacgaaccaaggtaatctacgccaagctgtgggcccaatcaaataggtgattaacaaaatcgagaaactctgtcgcccaatatccaatttactacagatatcgcaatcaactactgaccttggccaaactcttattgaattcggttcgaacgtcatctccatcaatattggcgaactttgaggtgaggtacaactcttttcgatggagtccggattgacgaatctgcaagattgtacatagatgagtcttgatgtttgggagtagatcgaatttcaagccattattgaactaacagcatctcctacggattcctcgttcttgtagatcgcagcattatcaagatgtcgatatttgtttttgagctaacatttttgatgccggatggtcaagattactgtgtcagcaaaataaaaatacgctcgatctggcgagatgacaatagttgtgcgaaggatgagcaattgatagaacgaataaactcacagcgagaagaacgtcttcagttgcgttcttctgatacagagcgctaccaactccaaaagcaggactggtcgacaagtcatttgtttcagtcagtcagatcacatacaacaccaacaaactaacgtcgattgcccacctggggatgactgatccgtcattgagtgggtacacaatgtgctttggataaagtccatcggaggttgccgaagtagggttcggatggaacaggccagacatcttggaagccagcaagggaagaactgagccgaatgggatgatcattattttatatgattcaagaagaaaactcaactgaaatagatgtgaatcaaagaagcagagtggtggttggaagtaaagatcgagagaaggaaaagatacccagggaaacggatgtgtgctgaagtttgggttcgtcacgtgcacccgattaatttcccgcttgaacatttgccctccacacttgtggcttcttcaacccgatacgatacgatacgatacgttgaccttcttctcacaagagaaatactcacagaggcatagatatgcagccatcgtcagatacagattcttcgtccgtctgtttggataatagctcggctccgacctcgttcgaatcagcttgggtcatgcctcccatgtcggacgacatcagtttgtatacattcgtcatctttgaaacccctttgtcgtttcagttcaactgaccaagattcctcgtgcagctcctttcaactcgccccgtataatggcaaatctttctttgaacggagatgacaaagaggtcgatgatttcaagcttgtcaccgatgaggaccgagcggaagcgcttagaatcaagggagaggctaacaaagcgtttgccggtatgtccattcatcttgggatccgtgaagcatacgaccacgtattggaaagttgagctttagcgttttcatgatctaatctcctatagccaaggactttaaaaaagccatccaactctatggagatgctatcactcttaaccccaaggacccgatctttgtaagtccttcttcacgtttaacatcatcaacgacttgtactaatccaagcaatatacggatatcattatacccacaaccgtagtggtccaatcgagcttttgcaaagatgaaacttgaggagtttggaggagccgtctcggatgctagtgagtccccattcatcactatgctttcttttagggttccattcattgcagtctttgaacagtgaggcccgagttttgctcatctctacatctttgcgcaatgacttctctcctttttttttcgccttatcctttcagccaaggctattgagatcgatcctaaggctgttaaagcatactaccgacgtgctctttcccagcttgctgttttacacccaaaaccggccgtggctgatctaaaggaggttctcaaacttgagccctcaaacatagaggctaggaagcaacttgtatgtatcacgatgctttgtaaatatctcgatttacaccatgctgaccttgtctactcttttggtctgcttcttcttcttttaggaagcaacccagaagctggtttgtccctcttgctttgaaaacggtattggactactagtttgccctcttggcttcagtccgagaactttttctcctaacagctcatccttttcttctatattgcctctgtcgattcgaatagatgcaccgcattgcttttgagaaggctatctctgcaggcgacaccgagtctgcctctcaccgatctcgtagaatgatcaacgatggatcttgtccgatggatgcgaagtatactggtccgcttcctcaaccgccgagtgagagcgagggcgagaatggtcgatggaaaccgacaaaggaatttgtagagggtatgattgagtggttcagagagggaaaaggtcatttgcctaagagattggtctgggagatcgtactcggttgtgaggaggtgcttaggaaggaaaagacattagtagagatcgacatcgaggaagactgcactgttgatgtcattggagatacccatggtacgtctcaatgcgctttccattgttccactcttagttccttaactcgtgtctgaactcatatgcattcgttctctctaggtcaattctacgacctgcttcatctgttcactctgacgggccccccgtcgcccaaccatatcctgcttttcaacggagacttcgttgatagaggaagttggtccgttgaagttgcccttaccttgttcgcatacaaatggctttatccgaaccgaatataccttaaccgaggaaatcacgaaaccgcgtatgtctcgctcttctgttatcgttctgagtctattcatctgatcctggactgatggtcagctggtgtggctctttgttctccgtctctttctcaaagggatatgaacaaggtttatggattcgaaggggaagttaaacacaagcatggagagcctacatgtgggtactcttctttggacgataaagtctctctcattctcgtctgtgacagataactgaaactttcttcttggttctcgcacaccactcaacagacaaactcttctcggacgtcttcactgctttgccgttggcgaccttgctttcacccactcgttcgcctcgaactctttcctcgctctcactttctcgagaccctcccaaagcgttcctttcgccggaaggtcgaaaacggttctttgtcgttcatggcggcttgttctccaaagacggcgtcacgttagatgatatccggaaaatcgataggttcggtcgtcaacccggtcaggaaggactcatgatggaacttctctggacggatcctcaagaagctgaaggtagagggcctagtaaacgaggtgtaggcgtcggtttcggaccggatgtcaccaaaacttggtgtgaggcaaacggagtgaccgctgtgtttaggtcacatgaggttagacaggctggttattcggtagaacatgacggactctgcgttaccgttttctctgccccgaattactgtgattcaaccggcaacaagggagccttcatcagagttgatgctgagggtgaagtcaagtacacttcgttcaactcggtctcgcatccacctatgaggtgagttgtcctttgtttctttcctttttggccttccgtcgtgtcgtttgagacttatcatatatccatatactaatcggtgttttctgtactgaaacgaaactcttcgctattgtcactaccaaacacaagaccaatggcgtactcccagggattcaacggattgatgtagtgattgtaaaaagaacgccaaaagaaaagagtaccccgaatggcatgttgttatctttggtgaatcggatacgagaaataaatctggcaagacgaatgcagccaggatacaactgctcgagatttcaagtcaattagttgattagagactcaatttcgagacacaccaacatcaaagttttcactagacggcaattgactcattggcgatctttttcaagacccctttgttgtctttctcatgtgcacatattctcaaggacagatgagtctggtgagaccatatacataggccaaaaatgtgctgttgtgttgaagagtaagagacagagaatgagagaaagagatctcgtttgggagacaaaaagcagcatatgatccccaaaaaaaaggtagtcgggagcgaccaagtctgaaaaaacaaaaggccaccgatagagacgtcccagtgatggaaacgtttatcggtatcggggaagggagagggtgttgttcctcttccaggtctttcgccagttggacttgttgaatcggtgacccttgccgagtcctcggttctgcttgccgatggaggtaagacctcgggactctcggtgcttgtggacagggttggcgatccagttgattcgagcgtctcgtcggatagccttgtgggaggggctgatgagatagattgatgatgatcagctgatgatccgaagaaaatgatcatcaaaacaaaacgaagactcactcgacaaggatgacctcgtagtacttgtagacaccgtcctggttgatccagtaggagttaaggactcgcaagttaccacatcgctttccaactcgctcctcagcggtagctcggagacccttctggaacttaaggtggttgactccgtgtcgaacgggcttaccgaaggtagctctgaaggtgtaggaagggttggtaaagacttccatgtcagatgttgtcgtttcctgaaacttgtttgcgaggggaaaactcaccccttcttcacgggcttctttcggttacctcgtcggactcggactcggtagatgaggtagccctgcttggccttgtaccccaatcgtcgagccttgtcaggtcgggagggtcgggaagctcggtggacgacagcgagctgtcggtactcccagcacctaatggatagaaatgaattttatttgagatagtcatggaacgaggtccagggtcgatatttggaagagaaatttaagcagacgaggaagaagattcggtttccagtataaaggtcggtcgaagaaaagatttaggtgtttgaatggtatcccggatagacgacaaaggtgaaatgataggagttcaagaatgtcgaacaaagcagtcagacaagtcgaccagtgggtatgcagcacacgagtataaaaggacaaggattttttcgttggcatggtcagttcaaagtttttttttctcccgcttcatactcttccatcgtcctcttacgcaaacaccacgaaagaacagaaacacaaagactaacctgactcgcatcaagaacctcataacatcgctctgcttcttcttgtagagctcagcaacgtacttgtaggctcccatcttgaattgtcttgacgttagaagtgcaacgagtaagagaaagcgttagggtctgagtttgtcccagagaccaatttttcccaacccacccttgtgtacagatagctcatgcatttgaggaggctgcttcgacctttttgatcgcataattatattcaaagcctgaactcagcctgacgatatcctagattagattagatcaaatacatttgtcgttcccatgtacatcctgcgtcgaaggatcgtctttggtggccgtctctgtgattcgtacctaaacttgtggctgactacatgatgttagatgccgtgattttttgactggtagcatatgtactttcaaaaatgaccgagtgaggcgacgtttctcctgactgttgagttggcttgctaacctcgacctcagcttgtctcagtgtattgtctctcttcagctccttacattatattccttctcagtacctcttcttatgatgttttataaggtgggcatcccttgagtcgacccatgaagacaacctctccaggcgggcccaaaccgcctatgcctgttctttaggcttcttatctcgactggatgagcatctgcattgctcatcgtggcgacagcgatcatcgacaagagctgtaatatgtcttttcaagatgggttcttatggcaagtttattgatattatacaatcaaagtcaacgctaggctcttgatctgtccagtcggtcaatataggtgtgaccagaaagtacacaaattcctgagctagtgcttacctaatatcggatgatcttacgtcacccacaagtcgtgaaaagacctacattcgattcgtcgcctttggattaagactataccaagaacagcgaataaccatcagccactaacgatcctttgccatcccaacatggaccacatctctctgctcgaggacgggtcggatcacctgacatgtaagtttcatctgtgacatttgaaaagatgggaatgtatagtgaagaaaccctgacatttgaccttttcacattcagactttaacgtcgcgctcggtttcagtttcatctgctttgatgctattctatcacttacccttggcctgggtgtaggtactagtctggttgtctctgccatcagatgcgtacttcagttgtctgtgatgagtttagtgagtctcaatatgcatgcttgtcgtgatgaatttgtcgctcaaggactttgttcgtcatgtatctattattctagatcctcgacaaggtctttgcggccaacaacttttggggagttgttgggatttcgctcgtattaaacatcctaggtgcttttgaagcaggtatgtctcaatcctgttccttgtaggtttcctcttgttacttaccaatcaactatgctcacctctactaccaatcagtgtacaataaatcaaagcgtcgattcgcaaacatgtttcctctcatcttgctttcctttatcgtggccactattcctatttctcttgctggaagcgccgttatgagacggcatcctgtctggaagcctgagaagtacatccctgtgcttgggatgatccttggaaatgctgttagtgactatcagttgttctcgaatttcgaaatcatcgatcggatatgaagttgacgaatcaatctgttcctctttcgcttctgataggtcacggctatcggcgtaggggtacgtatatttgtcacaacagcttctgaacactttttgtagctaggctgatctgaagttgaacgacgacgaacaccctcttttaggtgtcttccatattggtcagtttgattccgtctctctcttgttggagattgtcaaactgagactgaagcgattgtgaacatatcctgactttgacataaacagaaagagtttactgagaacaaggacaagatagagacatacctgggcatgggagccacccggttcgaggcttgtaagcccatcgcgagggaagctctcaagcttgccttgttacctaccatcaaccagatgaggttcgttctccctactagtctatcattctttggcttgttttctaaggttctcttctaatgcttttttattttgaatttgtcgttagtgtcatcggattgatctctatcccaggcctgatgacaggagcgatcatcggtggttcttccgtcgaacaagccgcgaaattacaaagtacatctcgaaatttcgatactttgaactttgcctttaaaacttttagatcgactgatatactcttcgtttcctttaccaaaagtgatcttgatgtttatgatcagcgcttcttctgcactatccggttagtccttcttcctcctatcgatcgcctagtcccaatcagaactcctttgaattgactcctgatcctttgttttccatcttcaactctcgccaatagtgctggcagccatgatattcacattctcggtcgtattcgaccctcaacatcgaatcagagacgacaggatatattcgtccgagagcgtgctttctggtgggatcagaagtgttgggaagatcggcgtgttgggttggaaatcgatcaaaaatctaggaggaaaggagcgaaggccatgagagtaagaacggaaacagagcaaggggggacgtatcatccggtgtctcgcttcaaagaattctcttgtaatttttgctggcttgcgtgcgtgcttccttccttcctccacttgagcatatcaaaagtaaaatgatgagggggcaaatgaaatgataataaacgaatcaaagagggaagaaagcaaatcgaagagatagcgccggctcggtaactatgaagagaactagagtatatacaagaaagtaagaacgactagaaggccgaattataatctggactcaggcaagaaagaagacaaggaaggaacaaagaaggaggttggtccgtgatgtaaaaagtgggagctttatgcaaatataacgttttgtgatacagaaaataaggtcaaacaaggcaagaagacgagagttcacagtgatacaatgttatgggatcgtctctctacaaattagggtcccaaagagaagaggaaaagaattgagggaaatctgttgaggaaatacaaaaaactgatatgaagaggaaggatgattattaaaaataaaaaaataaagataaaaaagagtatcaaacaaagacaatacagaaagaggaatttagaaacaccttcagtcgaacaattctccggggtcaagatcctcgtcggaaaagcttggtttcggcagatgtgcccgtttcatcatcattgatcttttttttacgtatcacatccaagacagctcagcaattagtctaaccggccaggtgcagaaaagcagagataataagaacctacagctcatccatgagctcaaccttgccgaaacaaccttcaagcccgaatgattcatcgagcacaatcagatcgtcctcgtcctcttcgtccggctcggtcggctcagttccgccctcaagctctgcccaggatgaggaatgtgtggaagatgatgagaccgagagattgggtagatccaggtcgagatccatgacgtcactcttgtctatatccgaacatgcaccagacagattggtcgtctgctgaaaagaaaacaggtagtctgacggtgtgagtactgttgatgattctgtcgaagtcgagaagaacgaggcagttgagttggctgtaccaggcgcggtcggaacagtatctttttcgactcgcggcgaacgatcggatggaaagagcgttggtttgttggatctctcgagagacatcggttggagagtgaggaacgaattgaggaacatcgtctcttgggtcgctactcgttcgttcagtgtctggagcgaggcagtcgagagagaaagtagaggagtagaagacgatctgtgaaggaagaaatttggtctgattggatgtcctttcgtagaacttgacgagcacccgtcaaagtcatgatcagagtcgtggttgagttgaaagtcataatgttccgaacgacggctcaagttgttgttagcagtcgagagaggtggggatgacgaatgggtctgaagcgacttgcatatctgagtgagtagaacgaagacgaggacgaaggaagaaagaaggaaggaagaaagaaagcaaaggagattataacatgagttaaaggtctttgatgaagcaagagagaaagggagtcctactctgttggcagtggatccttcggacctcttcatgcattttcgccctttggcccaaacggcacctccagaactactggacagagattcattctcgttgttgtctgagatagaggttttgaaggatcgtttggtcagaagttttcttggtcgtgctccaaagtcgactctccttttgatggtggaagggtgatcttcgaggtgtgaatgaggagcagcgttagacattgttgcgtgagagaaagaagagacaccagcgtataaccgatacgtttgcctgcgttgtgtggctatgacgttgaacgatccaccttagatagtacgtcaaaaaggaaagaaaggatgatcgactgttttgtatgttggtgaacaaaagggaaagataccacagacgaaatctctcgaagagagataaacagacaaaaagcagccagcgcagtcaagaggtaggaagctggcagtcggttcgtccgaggttgtgccgatgtatgcttcaggatgtacacgagaatcagagatagaggaagagcaagggaaactatgtttctcgctcagtatgtgtgtgtgcgtgtgtgtgtccatgtgttatcaacccttcctttgctcaactatctagaagacacgtcaggtaaaagatcaccatgagggtgagtggtgtgaacagattcagccaccaaacccgtccatcatacaaggtctttcttgatgcctaccactttctttcaacccacattgctctttctcatacatcaaacttctccctctctgtccttgtgttctcatgatacatatcgtcgtgttcccagctcggctctccttgcgcttcttccgttctcgctcttatctgatctgtgactgttctagggggactaatgacggcgatctagtcacgtgctgatagctgtgcgaccgcaattcccaaagtgttttccccgccacacactctggaaagatttgggaatttctaaatcctttcggctcaacgctcgctctcacccataaaccctcctatagacatatccttccaatggctacccggtgagttcttcctgtgctttgagaccgctaggttatacacttacgctttttctcgccatctgatcgtcgacttacctcactcgcctagggttcctcctccgaaacgagtcaagctctctgggccaaacgtccccaagccagcgcctcctcccacacaggcgccctcggtggtcgtccagtttagatcctcagtcgatggatcagccctaggaccggctatcaacttgcctgcagatactgccagggatgggatggagatgcttgttaacaagttgaagggaggagaggacgtacgtctatgagcattttgctccttctctacaccctttgcctgattagctgatccacggtttcctctttgtgtttggatttttccacgaccatacaaacatgctcgtcaaacctcacttatgcttctctccattaggatgatcctacaccgttcgcgttctctctcttgattcctaacccagatccgaatgcacaatcgacggacccaatcaagattcctgtcccaaactctttgcaatcggacgttctcgcgcctacaccagcctcgctcgccctgctgaagacctcgatcggactcggcaatgactttgccctcccgacattcacatcggaagacatctttaccgttctgtgtgagccacaggcggtctggcgagtccgaccggtttcccgttgttcgtccaccctcaccggtcattcgtcccccattctctccggcgcgatctctcctagcggaaaccttgcggtgaccggcgcgggtgacgcgacggctaggatctgggacttgactacagaattgccaaagtgtactctcgtcggtcatcggggttgggtactatgtgtcgcttgggatccgctggagaggtttatcgccaccggtggacatgacggcctggtcagaatctgggatgtcaagaccggaaagccggtgggtgatgccatgtctggtcattcaaagtggattatgagtctcgcctgggagccttctcatctgtaggttccctccctcctcttcttcttccaaacttaatctcacgtctgtgtatcctggactcatccgtctctggcatcatctgcgcctttgcttctcttgtacttttgcctgtcactagcgcctcaacgacggcccctcggctagcgtcgtcctccaaggatggaaccgtccgagtttggtctctggcgacgagaagaactcagtacacacttggtggacataccgcttgtgtgaatgtcgtcaggtggggaggtgacggtcttctttacaccgccagtagtgaccgaagtgtccgagtctggaactctgctgatgtaggatcagtttcttgcgtctctcttcttattcagccaaagtcttgaatgaaagctgataagcgtttcggttctttgcacgtacaactcttgtagggaaagttggtaagaatcctctcagatcacgcccattgggtaactaccatggctctcagctcggatcatattcttcgaaccggaccttatgggcacgaaggcaaacgaccaaaggacgacgaagaagccaaagctgtcgctctgtcgagataccaggcccatgtagccaccatgccagagaccatcatcaccggctcggacgaccataccctcttcctctggcctgctcaacatgcttcagccgcggcagcgacgccaaagaagccattagccaggttgacgggtcatcagaaaccggtgtcccacgtcgccttctccccggacggtaggttcattgctagtgccggtttggacaatagcgttaaagtctgggacggtaagaccggaaggttcgctgccagtctcagaggtcacgttggtgctgtctacagactcgcttggagctcagattctagaatgattatcagtgccagtaaggataccactctcaaggttagtcatggggttatccgagattttcttctttccttcatcccgtttgcctatctaccttttttaccgacgtatccgatttctttctcttttcttcctacgacgcattccagatttgggacctcaagacacacaagatcaaaatcgatcttccgggccacacggacgaagtatactttgtcgattgggtagccgataaagtcatcagtggtggccgtgacaaatccgtcaagatgttcgtcatgtttctttcttctttacttctttctagcccttgagcgtttttcttccttttttcttttccccaaaatatatatactgatttgacatcttgctctcttgacacggtttgggacaaatgaaaacagatggaagcactagattatattcctgtttatttcttattctatcggttcaaccgatcattactagatgtactctgatgtaataccaccaaaagatgagaatgaaaagacatacgctgtcactctccctttattcttgcgctcactcgtcttgccgtccgaataaacccatagcagtcaatgaggtgtactcatagcaagatatccaagtcttaactcgatagaaaaactatcaatcaggaagtttgtgtggttagggttatgtatatgtatatcacgtgatgtagtctcagaaagctgtgaaaaactttgagagtcttgtcttctaccattcagcttcacacctaacctagcagctttataacaacgattcggtcttgaccatccctcctgtttctctgctctttcttcttctatctagctcagtaggagtaatctagaaatccagttcttgcactcttacaggaaacaaaacctcatcccgatagtcgactcttcagaaaagaaaacaatgtccgccaacgtaggttccttccaacgactggcagacattctcgatagaaagccagaggtattggctcttccgcaaggggatcatgagattgctcaaatctccgaagtcgccctcagagatatcttccaactaggtgagtctttccatcttgcatctcgctctcggtcaggaaggtcttcttgcctctctggttgaaaggaacgcggttcgttcattaggggaatgtttccccaaaaacaaggaagaaaggaagcagtgaaacacattccgtcttctataggaaactatcacactgactctttgttcttcttctgcttcaacctaaaagctttgaaatctgaattaacccatctggagcctatccacaaattcctcgcctcacttaatgaatcctccgcccccgtggagcctgtcccacccacaccactcgatggactctataccgaagggatggaccccgatcaaatttgggagcagcttgaactcagaaacgtcaagctggtggaactcttggaggatgttggcgcagttcagtcaggtagggagcctggggagagtgatgatgagggtagtctgagtcttgaggaaaagatcgagcggggcatcattgatgaggacgatgaggatgatgagcttggttttgatgaaatagatgatatggaagacagtggagatagcgaggaaggaagtgacgatgatgaggaggatgaggatagtgaggaagtagaggaagacggcgaggaacaaggagaggaggatatgttcgacgaagaagatatggaagggcttgaggacgacgacgaagaggaagaagaggatgaggatgacgatactcacaagcggatccaagacctcgatgaacctggatatgctcgagcttctcgaaagaggtaagagtctcgttctctagcacccatttctgtcttagcctccttggtctgtccgttataagccgtggctcaaagtattgacaattcttctgattatcttctttccgttcccaatttaggcaacatccttctctcgacgatgagttcttcagcattgatgacttcaaccgagaaacagaggagcttgaagcatttgaagtctcggcgggaaagctcggcggagatgatgatgatgatgaagacgaggaggatgatgatgacgatctgatgggtttgagcggaggaaagtccggaaaagccgatctttggggaacgatagaggctgacgaagagaacggaacggatggtaagagctttgtcctttgttcctgccccttgtgtcaatactgaacgtaagcgaacgaaatcatgcgatatcgtggctttgtttgccgtttgtagaggtcctctattccgatttcttcggccctcctcccaagatatactctaaaaagccaacatcggcccccaaaaagccgtcattgctaaagggaaagggcaaggcatcctctttcgatgatatggatgatgaagatatgatgatggaagatcaggatcaggaagacgaagatggtgatatggacgaagacaacgaggaaaactttgaagaggaggacgagggagagttctctgaagaagaagaagacgatgatgacgcaagagatgttaccactcgagcgaagggtgatctgtttgccgatgattctgaagatgaggaagacgatggtacgtttcgagtcacctttcgtttttccattgtcctcttgaatctgaaatctaatttggactctcgtcacgtctacaatgaagcccccatgtccacccatgccaaacgacttgctgcactatcgcagcagatcgctgctctcgaatctgagaatgctgcccccaaaccttgggctttggctggtgaggccagttctaagtcgagaccgatcaatgccatcctggaggaagatctggactttgagactgtcggcaagcaggtccctatcgtcacggaggagaaggttaaaggtcttgaggacaagattaagcaaaggattttagacgtaagcatctgccccttaacctgtcttcctcttcacgtcggttcttcgctaattttctgtttcttttctttaaaaataacaacgtacaaaaagaatgacttcaatgacgtgacccgtctcagagcaatggattccaagccgttcttgccctcgcgcgtgtttgagctcaatgacgaaaagtccgccaagtccctcgctcagatatacgaagatgactacacggcttcgaacgaaaaggctgcaggtcgaacacctgtgatgaatgagaaagactcaaaacttcagcagcagcataacgagattgagactttgtgggaggagatttgctataagcttgatgctctcagcaacgccaactttactcctaaacaggttcgttctttcctctcctctgtccggctgtgctgttctctgctgacttgggctttacgtctggatatcatctctactgtatagcccaaagcgcaaatcaagactatttccaacgttgcttctctttctctcgaatctgctctgccaccaacacaacgtgcttctcatctgcttgcacccgaagaggttttccaacctccttcagcttccgacctacgtgcaaagtccgaaatgactccggcagagaaacaagctgcccgagaaaaggacaagaagcggaagcgaaagcagagagaaatgcttgttggaaaggcagattctttcgagaaattcaagcatgctggaaagagaattggaggaaagggcggggataagaaatcaaaggacgaggctctcagaacgctggttaaggaaggcagaggagtgcgtatcgtttccacgtcaaaccataatctctgtctcacatctcatatactgatgaacacgccgctcaaacggctacttccctttcttcttaatgcttctagattaccgttattggcaaggatgccaagaagtttgacaagaagggtcgtcgagaaggtcaacctggaggggagaacgcaaggcaagatggctcgttcctcaaattatgatagattccatgcatttagatctttatgagcaggcacaatcaatttccgaaagaaacttatacgttcatcttgaacatcctgaagcccttcaaacattttggtataggagtggaaagcagttctctaggtcgtatacctcgagaatgtagagagtcaacatgcatatagttacgagagcagaatgatgataagaatagcaagcggtagcaagagcacgtaaagaaggtcatgatgcgaagcaagtcgtgatgaggaagataaatagaagaggccaaacagatgaagcagagagagcggacgatgtatcccccaaagcatctgagaaaggaacgagtcgatcattcaagggaatgcatcaacctatctagcttggtgtccatcgaggtgagagatgaagtctgagaaggtgtgaaagacggcgcatctgacacccgagccgccaaaaattgacggttgatcgaagtcgatcgtttaggaatgctaaggggagcgtgcggcgcaacggaaaggaaaatgggagtggtcggcgaaactactggagatggagtgaactgaagaactccttgatcatgttctgacggttgacgcattcgaagattgttctgtaagcgaaactagaacatgtattgtgatgtcgagcaagggtttacttacctctggcaatttcatcaataagttctgccatttgtcgagaactagaatagaagatctgtaacacacatgatatcgatcagcacttcaaaacttgtaggtgttcatacgtatgtatttgatgataattccgaaccttagtttccggacgcggtgcacgggatttgtgagtacttcgccgcggatcgatcgacgagtctcgatccttgaaagtaaactgtacaggttcgtcaatgctcatacgagatgggtcagaggctgagatctcagaatgcatatcccaatcgatgtcgtcgatatcctgtacatcgcggaggttttgaagtacgttgtacaaactgttgttatcgacaaggaaaagtaatctatgaatatactgatcacaacaatcaaagcaagacaagaaagactacttacacatctccatttgacatctcaagtacttcgatcgcatccgaaggagctgtcaaacttgactgtcgtttgtcatgatgatccgatctgacatctccttcaccatcgtagagatcatacctgcatatacgtaatttgacaatttgagttggcgcgttcaacaaacacatgttcgtacaggttgatagtaatcaagtttgactaagaatacgcacaaggaatcatctgtagatgacaaacttttctggagaggaggtcgagagtccgaggatcgattcgtctgtgagttcatagagggacttcgtccatgcccttgcgaactcgagaaagacttgcgttcattatcaagattatacacattaagctgcgatttggccggacttctatgaagaagagaagagccactgtgctgagaccgatgaatatctttatcgctggatcgattcaatccccaagaagaacgagtatcatccggcatgatgatggtccgccgaaggacggagttagaccgaccgactccgctttgttgagaactcagcgtgcgaagatgggtcgtcgaagagagatttgaggtctccatgggatcctcgactactgtctcgatcatcgttgggcttcttcgggtggaaggtactcgactgattgaagagagaccctctttatgatcatccgatctgttactgtagtgagactttctagagctcatctgagaatttgacctctggagcatctgagatacatccgcagaatcgatctccaatttctgagcggcatcaaagagaatctccatagctcgcgcagattcatcatctgaagtctttttgttgttatttttgttgatatcgtttgaccggttagatgaaaaagatgactctctattcaattcggttgatggtccagagacatgaccatagagcacttccttcgggtgaagcggtgcatgttgagaaagagaagcagatggaccttcaggaggtatagacggtgtctgagggacgatgggagaagagaaggggttatcgataggagttggaattgatggacttgatggacttgatcggggctctgaagattttcgaggtcggagaagatttcgcaagctcttctttggttttggtgctttttctgctgaaagatgaggctgagggagggctgtgctatacatcaatggagggaagaagagagtatgtggattgtcgggcgaagttgggttgttcagcaacggagaagatggtagagggggaacagcaggaggtgaggtgggcaaagaatcttgtccccatggatatccgggctgtcgtgggctagagtccatagacttgaggtcctcgccagactttttcctcctgatcttggaaccaaaccttattccgaggccactcccatttttgaaggttcctgggctcggaagaaccggagagtccgctggagaaggaggtatagagggcgtcggagaggcgctaactataggctttgagatgacattggcagtcgtagatacaaactgtgggctggatatcggaagtttgccctttcctttcaaagatttgcttcgtgccggcttgtttgatgttgagttgtcttcaattatcaacattcagcatacacgagacaagatcagctttgggtactcaaagagaaagtgaatagaagggaagatcgattctacttactcttgagcgagtgtgtagcagcttcaactttagctctaaaattatctgcaaaaccaggctcatgcatgttcacgaaacaatcgggttgaggcgataaacccgaaccggagggaccaaaagaatgatcctgctcgataggggtaatctgggaagtagcttcctcggaaacagtaccttttcccggcttaacaagatccgactgagcatggtatttagcgatgatttcctccgaagcactaggaatagagggttcgagcgatgatgcctggtcaataaatgaagccgggagaggcggagtcgcatgcagcttgtctggttgttcggtcacacgatgtgtggttgaatcggttttggaaagcgagcgaactgattcatgagcgctctgttcgttgtgaccaagtaagccaacctccttttcgctcttctctgtttcagataccttaagaacggcttgttgatataacggaacgattggttgcattagtctttgatgaataatctggatatcttccttcgtgagaggtgatagcgtctccattaaagcggtttgatcgatctcgttctgagaaacgagtggctgtagatcctcaagggctaatgaccgccgattgatattccgaaggccctccttttccatcattgcttcctccaatacatccccaagatcatccgatcccttcgatgttggatgctggtagcttgatcgattcgaaggaaggctgagctcgtggataggttcagaaggggaatcaagtgcaaggagctgatgttccgatgcatggtgttgctcgggggcgtccgaggtgggatagttccagccgacctgaaaaggagctctggagtaccgtgactcgacaatcccgtcttctgcaggcaggatcgccgaaaatcgttcatgtccatgaaatgctgtggcggaagagacagatcgatcgttggtgtgtgatactcctcgaggagcattctttgagtttctagaagagacgactgtagcaggttccaagaacaaggatctgcctggaccaccaaactgaaaatcagagggttgtctactactcgaagaagtagaaagagtgggctcgtgtagaccgctgatcgagctagctcggctatttacgctcatgttgttattctgtcgcctaggagcatccatgaacctgtcggtgtcatcatcttcatcatctgataatagatgttcagctgtgttcccgctgagatgcttgattgatgatttgggaaaagatggcggtaccaggtaggtgctgtcctcataggacgaggcataagatctagctgaatgaaagagctcattctctcgatccacgggtttatgttcagagtctaaaaattgatctgattcggacgaacgcagagtgttgaactcgtcgaggtcttctgtcaatgaaggtatgatgaaggaggaggagagctgagatggggtaagggaagattttcgtacatgcccaaaagtggacgggtatggctgagcgccaggtaagggagaggagtctcgagaaagattgttggtctcctgagatgaattaaaggaggtaccgaatcttgaggaggctgtcgaaggcgacctactacccactggtcgaggcatcccaggactgttgaaatgtacactttagtacagcatcctctcacaaacacgccagcaatatttgatgagacgacaagaggaataatgatagaacgtacatgtacccctgcacccgatctgcagtcacttgagatgctgatcttttgtgtttccgttcgtccctcttaggcaagccggactcttcattatgtatgttctcatttgaaggagatagcatcctgactgacggctgagatccaggtttgatattgctgaaggttgacataacgacaggctcttcttcatgtctagaagcctgaaagctattgctctcatcaattcgagcaagagtatttgatattcggttgagctggtcgtgggacaactggtcgagaagtgactttcgtttccaagagcgggacacgagcggtggtgaggaaacaggcggagagaagtcttcgaaccgggaactaatttccgaggtaagactggacaacgaagcagagttaacgatgccagcactgctgtaagatgggccagaagtcggttcgagaggagaagtactcgtcaaatcgaaatcagatggtcgtcttgagtgagttgaccttccggcagtatccccgctgtcttgcgaggccagactcctactactttcgctcttcctggctcgtcggatcttttcatgatcaccattgtggcctccgaagaagctcgagctgggatgatcagcttcgctgagcctagatcgaagaggatggccagagtgcgggttataattgaaggatgatggcggagtaggcttaggacgtttccgtaacctagcttctcgaagctgacgaagctcttctagcacgatttcttcctcctcgacagttaagctatcttttgcttcaccctcccgaagtcgatccagttgcttcttgagagcgtcgggtgactcagtacgagccaagaagctgaactgtctgcttagactgataaaaacggggaacaaggtgatgacggcggtgaccaatgaaatcagccgtacaaaacgcgtcagggaagaatgacattgagacttactctggaaggatgactgaactcctgaaatcttctccgggggaggctatcgaaatgttattgagtgaaggggcagagactagctttgattggagaccgctgtcttctgaatcatgagtcggcgacttgggagaattctttgaattctttgagccgaacgtagctttcaacctgaacgaatcataagaaagtctatcaggtttcttatacatgaagcagcagacatgttagatgtgatttgaatgaatcaactgacttcagccggttcctcatcttcacttcaaaacgtcagagacagccaagcttgattggttaacgcccagattgatgggacgagattgatactttgaaagaagaaatatgaacagaaaccacagacacacccaacgccttgcaagatagtcactctgctctttaagaacggacgatggtgttgttcagacagatatattgtctgtcgttgaagttactgttgtcgacactatctgatgaagagggcggtggctgaaagagggagcaaagttggaaagggtggccggtgaaagtaaattcgcttaaatgttcttatatttactgcatactcaatcgctccattcttcggaaccgtgcattctaatcctccagacgctcaaaagagaataaatgctagataacatgtatacatatatattaattgaccatctagaagggtgacagacccttttagggcgcactaaacaaataaggccatgacggctaacaccggacggtgatcggagtaaccctggagctgctgcatctcctcatcgttctatgtgtacatatagggaaatggcagttaggatcaattgcattgtaggtttcgatatagagaggaaaagtctcagacgtaccagtgttccatagtgaagaggaagaacctcgaatcgacgtctgtggacaacattcctttccggtctcgcttgagcggctgcgggctcggacgtctggttcgtgttatgatgggaagaaggaaatagtcgggtgaaccaagaggttttttcttgacttggcttggtcgggtgaaggtgcccagctgatataaaccgtgacatgtgcggaggagaagatgttccgaagccagaatgtgtcaaacttgctgagctctgtaaggaagcccgaggaggggttgtcgtcagattattcggatcacttgaacttggatgcaagctcatgggctgaggttcatatgtgaatgaagagggtgggtgaaccgatggatgagatcgcgttcgtgggccatgggctgatcttgggtgacctttcatagtgtatccttcgccagggagcaagattggtgaggaaggatcgtgagagtcaatggatccggctttgagcgatgagccgcttcccccgctaacatgagaacttcgaggttttgaggagactgaaccaggtccgagaggttccccaaaatcgaacaacgaatccgaaggactgtttagcatagacgtccgtggagactcgcttgtgctatgaatgctgtttcgttcatttgagtgtgtagagtagaaagaggccgtctgtcgtatatcgactcgctttcgtaagtgtagcgcggtagcaaacttctcgagtttagaagaagaaggcaagccatcctcgtgctctttccatggactcggaggaggatctggatattcttcttcaaacgatttccagagtaatcgatcgcaccaactcgggacctttcatagacagaaagaacgacatgagctgctatttgacccatcatctgtgaatttcggataaagaaaggggagagagggtagatatgaaaacatactctgcgcttagtagacgtgtcataaatgccctggctttgaatgctgtgttttcctagagatgatccaccctcatcttcgtcctcatcttcactgtcatctgaattcaatgttcgattgtcatttctcacactgagcgaccgacggattcgagatgacaggttccgagtcagtgccggtctcggcggagatgcactatcaatcgacgagcgattggtaaatggcgggtttggagggatcgagaccggatcaactggaggtgtagatggattagtggttgagggtgaagactcggtagattttccagaagccgaccgagcagatactgaaactattctttgaattgaaccggatgctggagaatttgtaggcgacttgatgaatttcataagctttcacttggcctttatagccgaactaggcaggaagatcttttgggcgtctttgagtttctcagtgaacgcgtgggtgtgttgtgctaaggtaggctcgacatcggacatgtcgctcagttcttcatctgttacacccgacgggtttccagaagctataaacaattttgttaaattcaactgaactcggctataaaagaaacaagaggagaaacgtgagatcctcaacaggaccaaccgggagagtacttactccaattagatgacacaatagaactccgttcagcgcattcatcgttctcagtttcgtcctcgttttcaggaacattctcaacaccagacacattcctgtgccggcgaattgtcccgcgtttctttattggcttgttgtaattggcgaggtcatatttataccttttcgaagaattaacgggtttgatcagaatcatcacaagaccaaagaactgataaaaagattgaaaggccagacgtgtgtactaacgttggagggaaatgtatttcggcttccttgaacccgacaaagcctcgcgcttcactcattatcctccgtagctgatcaaactgtaacgcctgatcgtactctagattgcccacaacaaaatcgaagttcagtattatgaaaaaggaaacaaatatgttaacgggtcgtctacgtaccttttcgggatacaagccagtctgcatgtaatctggaaacgtcgagtcgaaagttgaggtctgacaatatccaaagccaaggatacatatcgttctttatagtcagagagatgaagcgaatgaatatttggggtatgtactcacctcccatccagaacgtgcaatcatatctgtcggtcggatctacattcacagtcaaaccatcgagggcgttagctctgtcaaagcttactcagtatcaagggagtgaatgtctctaccttccagtagcagtcttttgtcaccctgatccaaaaaagcatcaatgttgagctccgccttgatctttgctgcgttgagtagccgaacatctgcccgagaagcatgtgcagcctgaaacgcgcataagaagagcagtcagtaagcaaatatcactatcgttcgtataaaagatgtatcactaaccaaatgagagttgacgaagaggagtctagtcgaagccatgtgaacagatatcgcaacacctcctttattctaaaaaccatgaagaattggatatgagatcagtcaaatctgatctgtatctctcactttccattatgctgttggtccagaactcactccaaatcgaccctagaacgacggttatattttacaagtcagctttctgctcttcctcctcttcgtatacatgagttcagagcgcgaggattgtactgactccgatcagacccgtggtaacataactcgttgatgtatctaggatgttgataatgagtaccagaacagacaatagaacctcttgatagattcgtattactcactcttcaccagatgtttgcaacctttccaaacatatacggctattgttgagagatcacgaaacacagaacgacagacacaattggttgtgtaaacagatgcgcaagtacaatgatcgcatggccgagcgcatatgagatggactgacacatatagatccctagaagtctttctttgactaaaaattgataagcgcctctaccttcctccacaacccgaacatggtccatcatatctggcgccattgatggcaatttttccgatgtattctgttgacttggctgcggttgttgctgtcccaactggtgcaattgttctttgatgccgaagctagacacctcatcgtccaatggttcgtccgagtgggtcacttgggatgttgatgtgctggacgaatatgtctgattatttaacgtagcaagcgatgcagacggaggtaaatcgggttggacgatctgatcggatgagggagggctttcgcccgctcgattagcaaaccagtcctctagaagatcactccatcctttggcctcgtgacgcatgtgaagcgtattggatttgtccttctccttctctttgagtttcgatttctctttctcggcctgcttcgagcgttctatagtgataacatctctggtcgttctgtctttctccttcttttctgatccatcctcctcattctcgttcacgtctatctcgatgctccggagaggtgagcgagctgctggtacgtcgtgttttgcatgattcccttttggtgggttaggtacggacaggtagtcttggtgctgtagcgttgaaggggttgtaggtgaagtgatctgtcggagagacacagaagagggagagattgacctggggatttgtaaactgagattagggggctggagtcttgctgatgttgcagagggattaggagatccattggtaatcgcaggtgtggatggtgcagaagaaggggtgatgaccatatgagcggaggaaggagatatagaagatggtagaggagtatcagaggagatagatccagtcgatgattggggggtagctaggacaggcttcggaatgtctaatacgggtgtagatatcggtccactagacgatgagggagaatgagctgacatgttgggctcgactggagtcaaggatgatttggaggcctgttttgctgcagcagataaaccgcctccccacttcacacctgccgctagacccattgggatcccactcggcgtagggcattcctgtccggcaatgacaattagatggtatggactgtgcacaaaagttgttggtttgagattctttggtgagaagaggtatccaaatgcaagaaaacctggttgtacgtactgctcatcgttcaacggaagcttcggtagctttccatctgcggtatcttctgagcctatatgggaataaggcggaacgcgaccaagtaatggagccaggtcgccctgtatatgatatgtgatgtagtccaaccatcagatgaagcctttcatggtggcttgaaccgaacaaaagaacagaccttgggtattgaatcgtgcatgttccaggtcaagaatctaatcttcaaaaagtctcttccacctgcttgaatctcctgttcttccaaaatatcctctcctgtctcgggcaccttgtcgttcgacagagtcgcggactttgaggtatgcgtagttgcattctttgacgaaacagcagtgtccgagttagatcgaggtaaagaatgctccatgctgaggtgatgacgatggaggagatcatgaagcttcgacatcataggctgatgggtctctgtagcttgttcatgatgaggactgactggcgaagtagaccctgctctccgagccagcaaacgaacaaacgatcaacaatcaaaccaagcgttgatgaagaagtggataagcatcagctagctcgtggtctgatgtctccttacctgacatttctgagcctaactccgaaagcagccttgactcggacatgacgagatgagggagaacgttgggatggctgcaactcagagaacggtgtatgcgctttggagagaaacgcgtgtgcgtagttgccgcccacttagttcatctaacctttcggtcgatcctaccgcatacatctgttgacctcctcaagctttctatgtcgctcaagtctgtatgctctgataggtattctctcatcaagtacttcaacatgggaataggaaactataacatgcaatgatcattttaattgtacaacaaatgagcaagttagaatctccagtatgctcttcttttccagagacgcccctctataaacttctatttactcgatgtaggctccgagttaggtgacagcagagggttctcttccctagcttgagttagaagaggcatgagatctttgtccttaaccgctttctgtaagttcaaagatgatcaagagtgcatccgaaggaaagagagtttgtcaaccaaacaagaactacggattcacccccgaaaggtttctctgactcacccaaacgcaatctttatagaccctccaactctctccacaaagtttctcgtattcctcggctttagcctttgctctcactgccggatcaacggttgatttagtaccaggaagtgtcgtttctcccgtgagaggctcaaggtatccttcaacccatttgataaaacacgcgtcgtatgtatgtttataagggttgcatgccgggttaacttttatgccgaaaggaagaaggaagttggggaagagaaaggagtatatgattagcaaagctttgagtggtctcaacccccagagcgctcttctaagagaagacagaaaggatggcatgatctgtactaactggaactgaaagacaagggaataagctcttaacaaacagtccatgaagatcggggaggggaacaatctaagaaagactggacgtactccatcttaaatgactattgatgatgtctagacgatcacagaagagaagcgttccgaaaagaagaactgatgagaaacctctggatactttggtcggtctacggagaactgattgggggataggctgatgggtatatgaaactgagatagctggtgattaagatgactgtctgcgtgttgactgtgtgaggcaagtgtgtgcgtgtgtggtaaagagacggatggaacaaattgagagaaggtaaaaacaaactatcagtccagcaagggccacgtggatcgactgccgccgagaagatgacggacatgcagattcaaccatagcttcaacctccaccacaccgaaacaacaggtcagaagctatgaagacatggatatatcagaagatcaaattagcgagggtatataagaagtgaagaatggaactctatgcaaagccttaagagatgtattggtcaaccgatagagtgattggagtgcagtaaaaatatatagaacagactgtgaatggcgtatcagcaaaagacatggtaccaatgactagatcgaataggcggtaggagaaagcatatgcatatgtggagaaagagaatgaagatagaggcagctgggcagggttcttgctcaaggatcacatggaactcgagtgagtcgaaagaacgacggaataattgagcaaggagttcgaagggtgcgaaaggagacgaaatctcaacgggacgtcctaaattacgaaagtgggtgagaaaccgaatgaaacctacagttcattctgcagataaagcgtactgagagcggtaccggaaattgcagaagaaagagaagaacgcgctcgttgtttttttcattttttttttaatttgaaggaagggattagtttatgagacgtggttggggtctaacagatgaagcacttgatgccgaagaatgcgatcagccgacaatgggtgtcacagcccgttttgtagtcaaaccagcaacgctcgttgcgccattcgaccgagctctacttcctggtcgagcggatccaggatgaagctccggcgaccgaagtctcgagccaaacttatcctgagcggaggatgacgaacgacgagtctgagcagaagagctccttgctctggatgcgaccgttgactgagatgaagccaatgtccgtcgactggcggaagaatttggtcgaggtcctggaccaggagtcggctcgacggtgtcaccgccacttttgtttcaagagtacaaccagcgcgtagaaaatacgaacgaaggaggaaacaatgttgagaaggcgttaggaccatgctcaaacaacaccagtaaacggagaaaacttaccgataagtgaatgacatctgactcttcgtatccgac

SEQ ID NO: 2136 - DNA, 1183 bp, Xanthophyllomyces dendrorhous
tcgtatccgacgaatcgtcactttcctcgcctctatccccctcgatctttaaatcgcgattgttttcattgtgtgctttaagagcgcttcctgttagaggccgggtagtcaaagatcgacccttaacaaggctgatatactcgaagaaagatcgacctcgatgtcagtcgcatcacatgataagagccgagaagattcactgacgttccagtggaggtcggcctatgcttggatggtatagcagtagacgttgtccaaccctccaactttataaacttttaaattcaacatggaacaccagacagaaaggatgacgacggcatttaggtgaatagaatggtcggatatcagcgtgaagcgtagcacatgcttgttatcgatataaagtaggagcagagcgcttactcgataaatatttcgaggtctgatctgatggggtcttcttccagtagctgtcactctgttgggcgcattcagttccgggagggaaggagaccgagaagtggccgaggccagaggtaaggaggttgttcccgtcctttggcacaacaagctgacatcgttgaatcggctgcgatagagatgacagtgtgtatgcaagatttatcagaaagaaatctggtgagtccaagtaagacgacgagacataaggacgaaaggacgtacacgatccatagatcatttggcgtcccagaaccagacccgtgactgggtctcagcatttcgcctatccttcgaatgttcgttttgtccttatccttgccctttgtctgagcaggagtcgatcgacgggagatagcggcggtagtagtagcattggtggttgtagtggttgtagaaatcttagagccatctgggccgcaggggtattcttcaaggatcagtcggctaggattaggaatcatgagcatctgttcgacgatggatacgacgataatgacaagcaaaccacagaacaagggaagtcagaactatcaaggttctacgtgatgaatataccctctcacaaacactcaccttctctcgctccaacccttcaattcgagcgaacacatccctcgtcttaactcgttcttcgactgccgtcttcttatcctcgatcgaccgaatgatcaattcaacctgatcgaccatagacagtgttgcttcgtattcctttgttgaagggtcggtgttctatttg

SEQ ID NO: 2137 - DNA, 55649 bp, Xanthophyllomyces dendrorhous
ggtcggtgttctatttgttattttcgtagagttgtcgtaagaaaaaggttgaacaaatacattgagattgatcctctcgacgtcaacaagaggatcacaagcaagggagaaagtcttacgtagagaaggttctggaggagtagaggatattttacgagtctgtttccaggaatgaatattcagatagcgagatcagacatcagcgcgtgtacattcacgaccggtgctgagtttcaataaaaggctcaagtacctttgaaaaggtttcgagagggagatcgccaggccactttgtcctcgatcagctgcgagttcgtccagttcctgttacacgcgcatagatgtatggtcagtgatataagacgaagcatgttaggacatgatcgaccgaggtcttgacttgtctgactgcttgtaacgaaagatattcgaagaaaccctacctgaaagatccctttcaggcgctcaagctcctcgtcttccgccgactttttatccttcttcttctttccgtcactcgaagaggacgacattaaggcctggtcgatagttctaagggcgtcagaaaggtgaagaacatatgtggtgtatgctttgagaacgtatgactttttgtatttccgattatcgacacagattagagaagaacagagtatcagcctggctgaactccagctcaatctgaaacaagcagagggcagaaatagaggccttacatgctgagtgaatacatctgccaatgatcttactagaggaaattgctcctcgtgtcttcttttcaatgctctacacaacgcccgatgacctggcaagatgccgtccctcaggacttcaagaatgatcttgagatcttcgggaagaccaaaaatgtctgtgttcgagaattcattcacagatttaggggcaggcgtggttgttatggggtatggctgagcgtgaaggtggacgtgagacaacacacgctgaagttttcggccggtcgtttgagagattgaagaggaggatagagacgagaccggtcggtcgactgaagaccgtttcacaggcggaagggagtgcctcactcgagcaggggccgatgtcggagggctcctgtctttatttctgatagaagaagggcgcgcagatggatcagaactcgcgccatcagagagattgcctgccgttctaccagttgagattccggatgatccttcttgatcttttccagtcagagacatcagaggtagtccgactggttgagttgtaaactttgcagcgataggcagacgatcaaccgaagtaagggaacgaggctcttctggtaagggtagtggtacggtgggaggtgagctagatgacactggcgaagatggaagaagcgcgttgatgaatgtggacagcagattctccaagtcagtcacgtatctagcccggcgattttccccaagaaagacaagatgaacgagttagcaatcccacactatcagcatgcaacaaaaatggaggtcaagtattttgggttcgagcgtacctatcttcggatctgacaatctcccagaggacctcctgtctcgttcgttccctaggtccaagattcatcaacagatcctcatccgcccactgactccagttttccggcgcgctcacaaaactcctctctgcgtctgtcgtctcgttatgttcttctatcttgtgaaaactgccactcattctagaggagcgccctgcgatagactgagcatgcaatcgactgtccgttgacatgatgctttttggtctcggcttcaggtatcctgcactggccgtaggcgtgataactgaggatgatcttatccgagatgagctagttgcaggagcaggaacggtggctgggctagcgcggaaagaggagttgggtcgatcggaggtaggagttggatccgagcctgaagcgatggaagcatttgtgactttagttttacttgtacttggagccacagatacatggggagaattagcggccggttctttgttggtttgagagaaactggttgaaggcgtagatgatgaaggggaagagggtctatgatgtgtttcttgatcgagagctagttcgagagtaggctgcacaggagtgtatgttgtctctgactttgccgtcttcgtttcggtgggattgggtgctattgaaaaggaagaaacagacagtggagtgaatgtggttggtaattccaaagccggagctaaactagtaagaggcggagcgagtgccgtagagacgatcttcttctctctctctggacaatccgatggcttggcttgagcgcagcgtattgaaactggaacaggaggaggaggtcctatcctaactgtgctaggagcttttcctcttcctattggtttcactggcgacggcgagacagcatacgatggcgagaccgaacggagtggaacgacagcagtgacctgggatacatggaacgtctgttccgactcaaaggacgtcgaaacagtcggaattgggcctaaggatggtggatcggatggaagagtttgtgttttattctccttgttttgctcatatctctctgatgccttcaacttgggtatgactgccggactgtgtgagtcggctggaatagacgggtggtgatcgttgttgggaactgttccattactcagccgagcgaggaaagctcgcatcaggggctgtcggagcaagagagatctatctgcaggcaagaaaagagcagcgttctaagcaacaaaacagacaaacaaacccccaagagcgatgtgaacgagtagtccgaagggacagtgaagtagagcagacgatcaaaccggtagaaggtgaaaggctgcttgtacctctgttgtttacgcacaagatattttgattatgtaatcgtcataactacctaccgcctagggttccattccaccgaaacatccatctactagacgccttccttcgtttgccatccactttccatcgaccaagcatcgtgttgtacaagccaacatacagagacatttacattcacgcccacgctcacgttcacctgcaccacatcaactgatacataccctgcattcactcgactctcagatgggtgttacattctcttcgttgttctcgagcctaacatccctatcgttatggggcaaagacaaggaggtacgctcaacatgtctatccttgttaaacttgtatcatcttgttctttaccttggtggctctcgtcatctggagagtttcatatgactgttccaaatacaaacctgagccgacgtggtcttaacgccgtgttcaattttcttcacaggttcggattcttatggttggactagactctgcagggaagacaacgatcctctatcggttacaggtcagttcttaccatggttctgccgggcattgcatcaagcctggttgtgtctttccttcttgtccgtattgtccccatggtgtatacaaattgggacgagcgtgagcgagtctggatgcactgtatatcaagtcgttttccctaacggacaaagcatattcgacgcacagacacctatcggacgtcccttgcatctggtgattaatcaatagagtaactaacatgaagtgttttgcctccgtccgtataccgataaaccagatcggagaggttgtttcaactattccgagtgagttcaggtcattcgttctttgagcttcgcagatatcatccgatttcacttaactctttcccggggtttcttaatagcaattggatttaatgttgaaagtgtacagtataagaacatcaagttccaggtatgggatctcggaggtaagctcccttcgttgaacggattgcatcagaaacatatgcttttctcatcttggaatacaagatagatctgacgctgctgaaacatatctcatcaatctcatcacaggtcaatctagcataaggttagtcgtaatcaacgtctacatctgaactagaagcacgccgtatggcgtcgcgaatcgaactaaagcatgatgctgacctgatttcgctcccgtgtaaaacaaatagaccgtattggcgctgttactatgcaaacactcaagtgagtttcgttacatagcctttcgaacggagaccacgcgttcttacggaccatcctcttctcaggctatcatctatgtgatagatgcttcggatgccgcccgacttcccacctcacggactgagctcttaacgatgctaagtgaggaagagctcaagggcgtaccagtacttgtgtttgccaataaacaagtccgtttatttattcaaatctccttccgagttctttatcgcgttggtcggccttgcgacaagtctaaacgcgttctgttcttcatttttacattgttcgatatataggatgtttctggtgctctctcctcgggtgaaatttcagataagcttggactggcaggaggagaaaagtcgagggaatggagtgtaagaggcagttgcgccacaaagggtgaaggcttagaagaggtcggccccatctcttgcttctcgtcttctatcttgcaacgttcagacattgttgtttcaatagtgctgacgaacctgaaaattgatacagggcttggactggctggtcaacatcatacaaggaaaatagacagtcccatcctcaatggacaggatgtctgtctgctgcgcgttgtaaattctttcatgaactttctcatcattgtatctatcgttcacctctttgccgaaactaaccaaaggggagaagggtatgacacacagagtaaaaagatgtctcacatgccctctttctgattcatcttggctgcaacactcaatgcttttgcaccattcacatttccatctcccgtctttgcctgattttgtaacaaagaggctagcacctacctaaatgatattgaacgaacgcaaaatgggagagatatctttgtacgacccttatcgagcacgtgccctcactcacgatcgaatttggtccttccttgcttgttcccgagccaaaaatccagcaattctagatccttctctctggccgctgataacagccccagctacacttcctcgatgattcagatctgtgtgttcgcccgcaaaaccgagttgacctccccatatcggttttccaagctcgttcaaatccaatggagtctgaccggtgttatagggggtaggagtggatgttgctccgaacgagaacttgtcggtcgtccaggtggtatgaaccgatcctacaggcaagggaacaggtccagatccatcatgaggaattcgagtggacaagatcgaatgaacggcatccttgatctcggactgggaaaatgattcaaacgcagaagagataggcgctgggatgtacatcaccaagccggcttgagtagggcccgcttgttcagatgaagctgaagacggagcaccagtcgggggaagggtgttgatgacaagtgtgacagtgtccaacagttctttcgctgtcgttgggttgacggtcgaggagtccgaggtggacgtaggcaagagaataaagctcccgatctcttccgaatcttggatccaccaagaggtcggatacctgatatacactttgtcaagcatcccgacctttgtccggttgatagaagcagatagtcgaacgctcaagggggggttgaaaaacttggataggtcgagagattgaaggatgcctagaggaagggtggacagacatgtagaagcggtgtatgttgctgcgttcttgatctcggatgaactaccagtgatgctaggagtggtggtgacggtgataccggaaggcgtgtcgagcctgatagagtccacagtctcactcaaacgaatcaacccacctagccggacgaggtcgtctcgcaaggcgttcgtcacagattcataacctcctttaggtgcggctgtgaacggaagagcaagaaccatcaaggaggttgtttaagaacgagaacctgaagcaggaagtagacgcagatgagtgtatacataccatcagttccagcgtagttgtcttgatggtaagcaaaagaaaggtcagaaagactgaagtacatgatcttctttgttcgactctgagtcatgacgcgcataccttcgtagctgtgccacttcagactagcttcctctagtgtgattcccatcccaacctgcatcgtccgcgccagcccgatcgccaaatttctctcttcatccgactcaagtcccttgaataaatccgacgaagcatcaaacaggtgcttcgagataggctgatcttcatagctcagactagaagcaacttgtttcatcacttgagttgctctctgaaagttggcaaacagctttacagacagagcttgtggaacgggacctatgtagcgtaatgtcaagagtcaagagtgtgagaggtgtgctgtataaacactgtgtacatatctgagtatcctcaccagatggtcctagcaggatagaccgctttggtttgttgatggcagccgtcttgaaagggatgacaacgcacttatcagctctgatacaaaaaggagcatatacagacggtcatataacttacaatacccaactcctcgactaaggctctgacaggcgttccctcggcatagccgtgaatccacgagcaacccaaatcgactggaggacattcagctgtactgtatgttgacgctcggccacccgttcggtctcgcgcctgcatcaattcatttcagtcagcctcggagatggaaaaaatcagaaaaaagaaacgtcgaataaaggcagcctggacttgatgtttacctcgatgacaagaacgttaaacccactctgagcgagcttccgagctgccactagaccggagaatccagcgccaatgataatactgtcgaatgcgttgcttgccatgtttctgtccgatggtattagatgactgataggtggtggaaagtatgggtttcattctctatccgctttatcggaccggctgccgtcttgtctaaagttggctgcgcaatcatgtggacttacctagatataaatgaatatacatataaatcgaaaaacgtcttgatctgtacgcgcatctgtcactcgttttgcccgttctctcaacatcttcctattccgtcttccatccctactcgcctttctctcttcataccaacacgcacgcgtccatcactgcaactcagtcatgtctgttgagaatgacaaatccacagatccttctccaaagaagagggagcttttgaagaagaagactaccatcgtcagtatccgtttcttacccgtttagcaagacgaatccaagtatctactcccttgatcaaggaggcaagcatagagtcgacctaacgcgtcttgtcttctgttctcgttggatttcgaaaccttctcgaacggatgcattcacaggatgtagctgaagtccctgacattcagaactggaatgattgtacgtgatgtcttcaccttgcttcctcttaactttcttcctcgcgttgctggtgttctcgctgacatattcacgcgacttactattcttcgtccgtccatatctaaagataaaacataccgagcctgccagcgtatgtgcttctgttaaatcgtctcgagtgaaacacaagtgcaaactattttctttctttctcttcttatctcatgcctggaacaaacgcgtccgttttcagtccccgatcaagagaagaccaagcttcacgtcggagatagcatctacatccgacctggaattccttatgaagctcctaaacgagggaagaaggtgaagggctctaagaaacagacagtaaccatccctgatgatgtgggtgacttagaaaaatggattggacggattgagcaaatcgtaagcagcatagattccttctttgtcttccctcatcctttagcactcgacacgagagacgcgtagatacatcctggaaatgaatgctaactgaaataatcacatctgaatacgtacagagagccgtcaataaggtggatgtctacatgtaagtcatctttggccacgaacacgtgtcatcttgtttcgcgatctatcaaacttacatgggctctgttttattctaattctacagcaagattacttggtagtgagtatcacgatcccgttcggatagtttctccagtccagaagtcgcgtttgatcaatgctgattcagattgataactctctgtttatgtctgtagttacacacaagaccagctgcaatcctctgggttcaaatacgcgtatgtctcgttcaacctcaatccgactgaaagcgtctctgtatgctgaagtcactgcctctttgtttcctcaattctatcagcaaacagcttcagttggagggaggagaggtagttcattcggatcactttgaaatcatcccggtttccacatgcgagggttagcttgctctttctcatcgaatcttcattcgatgatcgagatatatagaattcatcggactaatttccttgttggttgcttcttcctttatctggctaaaagacaaggcgacggtaatcaactacgacgagtgcgcagaagaccagatccagatcgcccctgacgattggtttgtaaggtaagcctgaatggggactttttcttgtcgaccaaattagctctgcaaagtatcttcgggatttggctgaccttgttctggtacctctattgatccagatatcgaactgtggagctcatgggtgccgatcagtcttctgaaaagagcaaagatttcaagtcgaggaaaaagccgcatgttcagaaacctgtaggtcgagccgcagaatatgaacggtgttgaactgagatctcactttctatcttcttgatttgtcttttcccttcttcttttttctcttttttgttgttataaataggccgaactgaactacaagcctggatgcatctgtggaaagatgtactacccactgccctttgcaaaagagagccgaatgcattactgtcctagagagaagtgcaagacttggtgaggggcttgttattcttggctatcaacggaactcgaactgcctgctaatggacaaagtgcgtgttctgatatgtctttatttcctttccatgggtggttttgtaggtaccactctacatgccttgcctcgagcggacgagaccgagtcgccgaggatgccgttcatttcgagacgaaccatgcccaacctaccgaagatggcgaggccggagacgcctcggcagatgagaccgaggttgagccaagcagtagtaaccatcccagtaagaaactgaaatcaaacggggatggaacgtctgccgagtcttcatctgctgtcggtggaggtgacggttcctctaagtcgcatccggtctatccggccactctggtctcgatgcttcctcctgctcttctccgaatcgctagacaaccgatcgtccgtggaacatctacttccggcatcgtcggtacctgtgtctttgtcctcgctgctagacggattctgagagacgtttgtgagtttgaaggaacgttacctgaggattggaaggttgtttgtggcttgcccgaggtcgaaggtgaggagggaggcttaaagctcaagacagctgaagaattggctgatgaagccgaggagagagaggaggagagggagaaggctttgaagaactctcaagagggtaagaacggggtagaacagtcaaagaagaggaagaacggggaggacgccgtgaccgacgaggacggtctactgggtggacccgacggagaattcgtctttgcttgccctagatgtgagaacttgatttgagtgtcgtgtatctaccggaaaccgccatcacgtcttgtaaaacttcttttagcagatctccccgtttactatctttctatcttctgcgcctctccgttttcttcgcttgtcttttgtatgtcgatatcctcaggatgagttcttctctatctttctttcttcttataatctctccttcaagttcttcgatcctgtggttctgttgtgtttagtacctctcgattgtctgcttgttagttcttcttctagtggtttccagtgatgacaatgaaatacaacttgagtgatcacgtcgactcgtcttgttagggttactgaactctttctctgttaaacgtacgaccaaacgcggcagtaatttgttccaccagcttcttttccagtccataggacttggaatcataattgttatctcgaaaatttgtgtcttcatatctcggtagatcgctcttcaagtctctattcatgatatgatagtctgacagtcgacggtaattatacatcatattatgttctattcgaacctacgatacacagtatatgggttttgactagtcgatttaaagcttggcgagcaaggcctcagcggtcgaggtctcgaggtccccaggggagttttccacaagaagagcctcaatctttccatcgttggcatacagagcgaatcgctgtaggataagaaaaggattgtcttatcgtcagcacgaaagaacaaggtgtatatactgtccatcttctttgggggaaaaatccgatgaaacgcaccttgcttcgaattcctccgaagatggcggaagcgtcaaagacgagaccaagggcagaaacgaaggcacccgtgtcgtcggcgatgaatctgggaagagagatcagaaaaatagaataagcaaatcgaagagacgaacaagctaaagatgaagaacgaggagctaaccgaatcttggtgccatcaggagcaagcttctttccccatgccttcatgacgaaggcatcattgatagagacagcgctgtagaacagaagagaaactggataagccgagtgtctttcacacatggtcaaagttgacttacaagatatcgttgacgcccttggcgacaaacttgtcgtacgactcgatgaacccagggacctgctcagagcaagtaggagagaacgctccgggaactccaataatgacaatctttccctgctgggggagggagatggtgctcatcgggtcatcctccttgacaggaatgtcgggaagaaccccaccgacctctactcaagcagcaaacaaaactcgcgatcaacaaatgcggcaagttggagggagaatgagatggacgaactagcagtgccgatggtctgggagatggcagcggaggcggcagaggcagcgctggtggcagaagcaacgatggaagtcatgtctgttatgagatgaggagatgtgtgtttggaagcgacaggtatgatagatggaatgggagtgagggagaagaagtcaaaagaaagaaaagatgaaagttgccggcttatatcggagagaattctctcttctgttttcttcctgaacctagatacaaaagccggcgatttgctgatcagggcgacaaacgtcacaggcacccggcagggttcggtcgccgagttccacctagagtgaggctgatatctgaacactgataaatttgaatatagtctattcaaatatctgacatgacgtaagacacgtgcaggtcactccgcctatcttcgttcgttgatagaacaatacattttcaacatttccatgctctatgaccagcccaaaccaatcccaacctaatcgcctcatgacaaccatcagttaatatacacactcacacccgaacgtgattacatacctacttcagtttctcagatggatcgtctggcgtcaattctgtctcctatacaagactccccatcccatggttcgtcagacgagttcgtcgatccggcctcgcaagccatagaaccgtccaaggagagcgagtccaaacccagcagcacatcggggcgtatacgagcaatcctccagaagacggcaaagtctgctcctcttgtatcagctgtcatcgcaccagtgatcaccttactcgatatccccgctttaagtcagagatggtatttctttcaaggtgttcccgctaaagatcctccggcttccataggcatgagtgttgtttctctaggtgagccttctcttcatgtactgtatcacatcattgatctatatccagcgcaaagggctaaacaaaactctctgatttctaatcatcaatttgaccagtcttctgcgctctaggaaacatcttgttggtcatacggttctctgccaatcagaaaaagcttgagcgctggattattcccgtatccacatttgcattctgtatcaagaccgtcgttgagattgtcaacatcgcagtctacggtgcttcgagcgaaaagccagcaggctacgtacatgccgaggggttctggagcgcgtgagtattgaattctctatatccgcaacagtcccataggaaagttcatatctgactggctgctcgaattgattcccattcggacgggaatacacagagtatattcatgcggcctgtcgggagtggtagctgtgctgctaatgttccatctcgttgctcagaaaggaaaagactggaaagactccatacgggttagggtcgacggacgtcgtacgtttctggcctggtcttaatgatatagcatctgtttcaacttctatgacgccaagactgacgactattgacttcgatccgtaattcaagactttatggagtccatgatggcttttgtgctatcagtcggtatgtgtttttcttggccgaacaatcgttcatatatctccacgcccccctcagaactcttctcacaaaaaaggcctcaacaggcatacaagcactcatcttctccaagctagaaggatggtactattttgatggtctgttcttttcgattgttgcaacgttaaccgtaagtctgttgagaatttactcgtcaaacaaagtctcctttctctgtatgctcacgttgttctatgttcatgttcaggtgggatacggtgatttggcgcctacaaaagcatccacaaaagtacttttgtttccttgcgcactgatcagtgagtaattctctttctcttatgacagattgcgagctgatgtcaatgcatccaataataatactccatctgtagctatatctctcctcgcaaatcaggtaagattagaaatgtacctcttcttcaatcggcgttaaatactaaattatatttaccgctacctgattcaaaaaaggtctcgatcatcttaaactatctcgccgatcgaactcagactcgaaagctgaaatggagagcgtgagtctggccagttgttaagggggatctaagtttaatttactgatcccgtgaccgaggttgcctcaagccccctttagtcaaaagacgttgctgaaaacccaaagtcaagcctcgaagaggtcctccgaccactgggacttgcacgatgagattctggtagatccaacctttcctgctcatctaaagtcagtcagtcagtacattgcgaagagtttaaccttggtcgacctctatccctacgacagtacctcgaggatgttcatagcctagaagaagccctatctcagtcttacgatctgatcgtctccttcctgagtttcctgagtttttgtaagtgtagcaaacctcttcatgtcctttcaattgaagctcgccaatgtgtttccttaaaaaaaagaaaaaagttgactaacaatttcctgagcctgtttttctctctcttcatacagggttgttaggctcagtcgtatttaaatacacagaaggatggtcttacggcaacgcagtatacttttcatatgtgacgtgttcgtgtggcttctcttcttctcaagcctcacgggtttgtctcgattttgacagataggctgacactagtgtgcgatttcttgggcttagtcttgaccatggggtttggagactacagtaagctctttccgttctgcgctgaagttggattcctgttttatttttactttactttttgaagtcagacggagaaaatatctgaggctcaagttttgtgtatcaataggtccggcttcggccgcaggaagagtgttcttcatcgtgtatggtctcgttgcggttcccttggtcgcatcctttgccgtccaaacagtcgctaccgttctatcctccgctgccgataaacgatggcagcgatcacgagaggccagagaacgaatctcgcgtgatccatccacaaaacctggagagatatctctgaggccgtacatatcccgaacctcatcctgcgctcccgctcctgattccttcgagcagcgatttgttccccattcaacgtttgtcaaacaaaatcttgagacagcagccaagataaggaaggatctgagagaaaaagcggtagaggaaagtgttgtgagggaagagctggcaaagcgtaccttgagactggcttgtatgctggaagctaacgcacggtcgcttcttatagctacattacctgcgtgagttcccgacgttggtgtcttgttcttcgagtctctatatctctgttcactgattttaccatgatacatcacattccgcatcaaatatttgatcaaaatctcaggggatcaaaagctcaaatgttactcaaagccgatcgaaacatccagcgacgtgatatggagactatgctgtccggagagtccagtatacacgatatttgggattatgaggatgcgtgagtgtttcaatttctcctgttctttgaatttctgactttcatccgtgctaaggtatagacgtgtttcgatcgacttgtagcaactctcctctgacagacgaaacacagctagaatctgtacgtgtcctctatttagcttccctctctataccattccaggctgatttgaatcttgcgcctccacccacgactcgggaacagataaagagatatagagaaaatttcgcaaagtttctcgtcgcaggtagtctcatacgtcagctagaagagcctgaactgtctgccttccttcgaacacccagcgcaccaagcgcaccgaccatcgaacagcgcgcaaaaacgataggatagtcaattgttgttattgttgatattatttttgtccgtacacgtacacattcaagtaaaattatttgtgggactcaacccgctgttcggatgttcaatttgagaggacgtgaagtagacttcaggcttctagtctcgatacaacgagtaaccaatcttctcaacaagcctatgaatacgaagttgactagggattgagagatcaacgtgataaacatattacacctcgtcttgttgggtctcgcccgctctatcttggccttttctgttggcgcgcggatgcaccgtgggctgaacaaccatttacagtcagactaagcatctatggtgtaaaaacctctcattccgttcctcttctattcttctctttctatctgtctcaacccatatcggtctgtcgacgcaacagtggccaacactctactgggtactgacaaaagaatgaaccatctactattgaggtcacgtgactttggcgtgacgcgtgactggaagttttggcgggctcaggctataaatctcttgacgattgggcatccaaagtgtaattcccaacgccgacctctcctacgggagaggtctcactctaggcataagtaagtggtctatgctgtacctaccacgttgaaatgttttctttttcactaaccgtgattctttgctctttgtctcgattgatctttttagaagcaccgtcgcaaagtttgcactctttctacggatggatgagcgaacgatgcagcagccggccgtaagtccaagaggagaggaaaattcagagcagattgggtgaggagtctgaaggggccaaaacccaaaacttcggggttctcaaaatcttagttctacagttcttgatttttgtcatttcatttttattcgtatctatattttgtatttatgtcgataacttgactttatgatacaatctgcgaacgtatcgtgtaaattgtctgagagcgagggaaaccatcaacccgaaagtttgttctcaagaggactagctacatttgattgatcaaacgagaacaatttgaacaagaggcaaacatcaagaggaagaagtttccatcgttaaaccaccaaccaacatcgccgtgtgctcctcctagtttttctaatcatcagataactctccatccttagatatataacgagaacacacgaacgacgttcatctgaacttcgatctcaaaagagacaacgccgaaaaggacttgctcctcgacccacgtcctaccctttcaccttcactcctcacccttctccagtctctccgaatgaactcgcttaactctttaataccgttcactacgtcaggaagcttagtggattgtgtcgacagtgagtctctctcccatcacggcctctcattttggctaactgtccagtaaggaagagagacaagatgaaagaagagaatgagaatggaaattgagagggttaaccgagagcgacgactcttcctgtctacttcgtgttgatctgatcaatcagaaaagatgctggtggtcctccgtgacgggagaaaatacatcggtgtgcttcggtcgtatgatcaatttggtacgttcatctttgtgtgatatttcaccttctttcagattagaacgcgttgaaagaagtagttttgctgaacgacaaagaaacgttcctcttatgtagccaacctcgtcctttctggctcgtttgaacgactgtttcatcctccgacatcgacgtatgctgatattcctcgaggggtattcctaatccggggagagaacgtggtgttgataggcgagatcgtaagtttcgggaatgtcctcgactgctgagatgtccaaaaaaaagaaagaaaggtgcgagtgggctgaacagcgatcatggcgttcatttcttgaacgtgttacaggatctggatgttgaagacgagccaccggtgcaactcatccctgccccgatacctgatgtgctgagagctcagaagattgactcggtcagtggtatcccttttcgcctctccacgaatctagctggcacgacggactgaacgtttgtctctttgttcattgaaacatttaggatcgcaaagccgctcaagacgcgatcaagaccagagttctccacggacagggtttctcgacggacaatgctgaaggagatgcctactagaccaggtctttctttctgctctcagccttcctttcttccactctctttcgactcctgttcaactgtgctgttttgtaggaccgagactggtttgcaaccgtcgccatgtctcgtgtgattttcttataatgtctgttggtgataagatgccttcaccctttatttgtatccattcgttcactatccccaaagcccgatctgctttagtctgttgaacacaaggacatacaatcctgttcatgtctaccattgagatggatatagaatgaaagcaaaaaattgacgcatatactcatgtcttcgccccccaagggaaaaaatagaaaaaaagaaaagaaaaaaagatggccgtctggccggggcctcgcacgggctaccccaattttcctcttgtgcccccatctctttgaaacctcccgtttgttcttattccttcagtcgttctcttttctttctgaccgcatctcttgttttcgttctccccacttgattcttgtctgattgtagatagtttctctatcctcttcttttcccatcccttgtcaacgttgtctttgtctctttattccaatcttagttcatcaccatggcacccatcgcacgtgaacccggacagaagggcgttaactggagtaacatcgcagttggaggtatcatgaacatggttcgtctctttcatctcttcctcagagtcttggttctctttcctggtctggtactcacacatcgtctcacgtcgtaaacatcagttcgaggtcaccacgctcggtcaaccgcttgaggttctcaagactcagatggccgccaatcggaagcagacgattggacaagccgtcaagacggtttggtccagaggtggtgtctttgggttctaccagggccttatcccctgggtaagtctgctaccgccttctgctccccgttaaaatgagccatcaggctaactgtcttatcgaacggtcaatcgatgtttgatgatctctgccctccaggcttggattgaggcctcgacaaagggagccgtgttgctcttcaccgctaccgagatcgagtcagcaacttcaggaatgggtcttaaccctgctgtcagcggtctcctcggaggaatgggtggtggaatcgcgcaggcgtatgtcaccatgggtacgtgtggactctctgcctcaccatcgcgtcgttgatgtactcttgcaactagtttgtccaattgacatcctctcttgttgccttactgctttgttgtcttttggcctcgttgctttgttttgctccttctttcactttcctctcactctctcgcctcttctcctgaacactcaacggtgtaggtttctgcacctgcatgaagaccgcagagatcacccggcacaagcaggctgcgacgggtgtcaagcctccatcgacatttgccgtttttatggatatctaccgaaaggagggacttgccggtatcaacaagggtgtcaacgctgttgccatccgacagtgcaccaactggggatctcggttcgtttcatcaacggccaactccgaatatatgcgacagtagccgatactcatttgttttattttggttgtggaacctctatttccgattattttagaatcggtttggctcgattggctgaaactcagatccgatcgctccgaggtatcggcaaggacgagaagctcggcgccctcgataagattctgtcttctactatcggaggagctctggccacttggaaccagcctatcgaggttagttcacatcccacatacttgcgtggtgtcttcttcctgtccttctgttactcacgactgtcaaatttccaaatgaatcttccacccaggtcgttcgagtcgagatgcagtccatggcaaagtcaaccgatcctgcagtcttggccggaacgaagaagaagactgtggtcggaacgctctctcatatctacaaggagaccggtcttaaaggtctctaccgaggtgttacccctcgaatcggacttggaatctggcagacggtaggtcttgagcttgctcgcgtgaccacgagtcaagcggacgtactcacaatgggacatataaagacaaaaccaactgatcaacgatccgatgctttcttccttcttcccatttcaggtttgcatggtgtctttcgccgattacggttcgtcccgcgcctttttgaatgtcgtgtagatcaaactgtgtggacatacagtaaactgactaagcctgcgtcgtttttgttctctttcgttttaataagtgaaagcctgggttgccgagcgataagtcccgtagtccggggcttctatctattctttttgttattcgttgtacaaaggtttttctcactgtcatctagctttgttccgaagggggacacaacgtttcgcggcttccgattgggttttattagtcataccttagcttctcgattgaaagattttttagactatgatcatcttcgttcgactacgaatcccgtcaaatccagcttgagtcgtttcgttgcaagataaagagagagagaatcagccgattttggtcaccgagatctagtcttgattcaacagacacagcgaataggagggtataaaatgcacatgatgttatatgaccacgtccgtcgggacaaagcacaaggggaacgagaactattttcgatatatgatgagactaaattatgtaaagaggaaaaccctccaagcttcgtgattcattctaacaacagactgagactcgactacctgcccccccggtcgtgtccccgccttctccacaactcgataaatctccaagccctcctatatgtcgtctgccactccatcagctttcctctcggatcttctttcccgctagcccttctcaacaaagcgtccgtctccaagtcgacagcacgggcttcaaactccttgacgatggaggaaagagcagaaagaatacttcgatggggtaaccaaagacctggtgctaggctctttggatcaaacccttgagccgtcaggagcgatctctgcccggccgtcggagacatcgtcaaggttgctgacgtcggaccgtcagacgagagcgaaagatcggattccgtcaggaagatcaggtccccgtcgtcggatcgagtggtcgacgcgccatgtgaaccggattggaggtcaaacgagcgtcgctgatccggggaccaaggtaaccttaaccggttcatgtcgttgatctccttgatccttcggagaactttgtccggagtaaacatccggtacgatgtcaacgtcatctctttgaactctggggtatgtctctctatcgacggacataaaaagtctcctttaaagagctgacgtttgtcgagcaatctagctctcgattctctcagtgtctcaccctctagcgtccgacctgtccaggcttcgtactgtctacggatatgctcatgcttgaacaagatgacgtcgttcaggacgaagaacgcttcatcgagcaagccagcttcaacataagcgagcgcgaggtaactccaacaggtcgaatccagcccaaagccaagcttggtgatcccgagacattgctcggttatataccgcaactggtaagttcccggtcgagagggcactgaaagaagacttcggatataggctgttaacggtctcgaaaggagagatgatgggggcttgtaggagccagtcggaagggcgatcggcgttctggtcgtcgtgtttgcgacattaggaggcgatgccggtgttctgggcgcaagcgccgatgggtcgatcaaactgtctgtcaaggaagaggatgagttggcgaaaggtgctctcacacccgctgctgttatcgaaggatcctcctttacaggaagaccaccgttgtccaactggcgtttgagtcgacgcctctcgacggatgaacttgactcgacttcctcctgagcgagcacgaccgccgacctccataacaactcctgctctttgatacttatagtgcttcccactctgtccagcaaggttccaacaatcttgagagaaacctcccacgctttctttcctttgagttgttcgtacgtctccagtaccaagcctggttgagtctgagcggcgtaagcattgacaagctcggtaaatatcccagtgacgggatcaggcgagttgattgaccaccgtttggcccatttgttctcagtcgaccaaccttcgcctgggccaggaagcgtactgatcaaccggcggcataattcgatcgcttttggcttagtcgacacgtcggaggacagataccggataatgttgatgtacaccgggtattctagagacagatgtctggcttgcatctctccgataagcgcaaagatctctcgggacaactgtcgagcagttcgcttcacgcgctgagacccactcagcggcttctcgacagccgactttgtcagaggcaaagcggcgaccgctttcgacgctccgggctgcggtggaaggttcgggttgatcaactctacgatgagtgtggtgaaatgtctgctgtccggggcgatcccagctctgtcctccatgatcttcatgatttgccgagcgtcatcgaggaacccactcttgcaggctgccctcattagcgacagattgagagaaccatccgggatcacagctctatccgccaaaaactccctggccagctctctgagctcctcccaagaccctcccatccttcggtgagcgtctaggtaggttgtgaggaacctagtgtaatccactctttcctttatgggtgaatctttcgagatcggagcagtctctcgagcaagcctccaaacagattggacgtggtccaactcggaggcatacgcgtgcgcacggaggatgatagtccactcttcgaacccgataggaatctccttggcctgcatttctcgaagccaataccaactgatcgaactatccttctctgccggcccggcacgcatgagaaaccgcatcactgtcctagcgaacgtcttgtcttctagcgggttcgaacgaagcgccatcatccggttgtaaagctcatgagcggcagcatggtctctactccaggtgaacaatcggaaaagggccaagtaggtttctgtactgtactcggcgccctgcttagaagtggtcagagacatccagccttgagccaaagcatgttgattggttcgaataagggcgttgatgatgaataggtagaggttgatcgacggctgctgactactgctaggttgagaagaggcaagggagtaagaagaggacatggaggggctatgaccaggataaactttttcaaacagacggatggcttctgctgtcttatcctccaggcagtattgtcggatagcctttccagccgaagaggatgaatgagactgatcgacaggtgctttattttctgcggaagctggaagaatgtactgaaggtcggcaagcgatgcggttgtaggcggaagagatatgtgagaaagcttttttctaagtggcggtcggattcgttggttaaagtaatgtttcgtgtcagaaatatgtgtggatcgtggcgggacaggtggtgtgggtgaagtcgcgccactaagagcaatcctgaacaggtcactctgtggactcgtcagatctgaacgacagataccagccaaggttttataaaggcgtgagcttgagtattgttgaaactagcagtagcgatcgatggaagaagaaacgagcttaccgttagcaggactctttcttgtactccgctttgttcttgtcgaacgacccacggaagatgtatgagtaagtggatcaggagtggaaggaagagtggtttggagatgtggtaaacttttggaagagcgtgttgtagtgtgagatgccaattctggtaaaacatcgggaatatgcgaaggtgatagagatgatgttgatgatgatgcttgtattgatgggatggcgtcaggggtcgatgcaggtgagagagagtctattgatgcagttgggggttgacgagcaggtatatctaatgaagaggaaatggggatggaaggtggatgtggctcgacggatgaatgtaacggatggtttgaggacaaaggctgatatcttgacggacttgtcccgggcaaatcagatatggctagttgacacaagtaaaattgcaccgaatcagcaccaacagaagacagtgaagtaattactgaaatagcagatgcagatcaactcacaagaagacgcagtgaaggtagacaccgactgggctttaaggtctctgacctcacgttcagttcgtttgccggttctcgcaccttgggatgtcatcgggtggttggttgttaaaggcttgaccgattctgaacggatcggaggtggtaacggaggggctgttgacagagctttccgtcctaataaatcccatacctcaatgccttcatgggcaaaatgggcagcgtggaagtctttgtccaggccatacttccgagctctgacgtcaagcatgcgaggatcgggacccgtttggagccatgcctggttttcgaacgctagagaggtcggagggagtaatgggttcgatagtggggatgccagatgagaggtagatgtgcagaagaggtgatcatcatatgatggtgctgacttgaactaaaatccaacaattcgtgaggaaacactggtcagatattgctcaatcggagggaggtagcagagtggagcatattgcgcataggcgagagacgaataggatggatgtaatttcgcccgagggatcctcgcgacagaggattctaaatttgatcttcattgtccagagtgtggcatcgatcgatcgaacaaacgagatccagacagaagcacatacagatcaaaagaagatatacagtagaaagagcgaactcacgttgctaaaagacaaccctgcgagctttctcttactctgagtgagccaacctggaggtggtggtcctggccgacgggagagactcgatttgggtgtagtgactacggatctcttcatttcggagcgagagtcaatcaagatctaggctgactggcagccaggatgcatgcagtagcgattggagctagcgaaccaggtagagcgagtagagcaaacaaggtatcgtcgtttggaggtggataagaaagaagaaggaagagacgtaagacggcttgaacgaaagattcgatccgttggtggttacgatcggaaccggatcgaaccgccgttatcagtaccggttcgagccggtttactcaaatcacgtgatcgattacacttctctttctcttgctccctctccgttctttctctcatctttctttcttttgacgtcgaccgaccgcaacagtttccttctcgactcactcttcggacactcgtccttctctctcacttcccagctatgctgaaagccagtcgggcttgcttggtgcaggccgcttccgtcacaggaagaaccgtccgtcctcacaaaccgtccgtatctcggcccgctcctagagcgcctgctgctcgtcctcaggtatcaaacatcatctttggaaccaagtctactgccgttctcgatccagtcatacccgcagacgaagacattcagcaaggggaagtagatgacgtcaaagagctgctggaaaaggtgacagtcgacgacaaggactggataaatagtggtttgtcctgtgtttttgctgtgtcccctttttcaatagtatcaccagccagccaatgaagaagattagccttctgatctcttccttctcttcactgtctttctcctcctcttctctctctctctctgcctttctcttgcgtccttcgtgccggagtagctgcagcgttcgccttgccagtcttgccgacgacccggacaccctttgcaactcccgaatcacactctgatacatcgtctacaataaaaaacgcccacccggctctcaaatctcttcttgaacacctcaaatctcccagagcgcactcccggatagttttctccctggctgaagtaaaccgttcaaacggagcatgggacttgtataaagatattcctaacaaggccgacatacctcctgctgtctggtcggatatccttcggtcggtcgtccctcctaagtcgacagcttcccatttctactcccgaaaacaccgccggcatcttaccggttacctccgaacaggatatgaagaacgtcttcatcaagttctcaaagatcaaatccagatcggaatcgtccccaacaggaaggattaccatttcatcatgcgtcactttgcaaatgctggctatgtcaagtcgaccgaggcagtctatcgctcaatggtcgccagagacatccctccgtcttctgattcattcactatccgacttaaagcgatcgtcgaatggatgaccagataccagcaggttgagggcaagattcttcgacaggaagagatgattgcctcttttgataccgcgctagcctctgtcccgccacttgtgtcggagatcatgcgagagcttcaggagaattccccggccgtcacactatcaaagcccactatcgactacgcctgccagttgttctccatcgctggcgactgggatgccttcaatgtgctcgccagatatggctatggtgttgacctggacaccccggatgccgtgccagaggaatggctcaagcgagtcgagtccgatgacggatcacttcaacgagggctcactaagcggggaatgaacagtctgattcatctcctcaacatgcgaggcgaatactggaaggcgttgagcatgtgggagactttcaactacagattacctgctcctgagaaccctgatttcagaggcctggactgggaatcttctcaacactatagaccccggtacattaaaaaagacgacctcattttcatgcctgctttacccccaacgacagcgagagcttatatgaacaaccttccacagtcgctcaccacgataaaccaaacgcgtccccaaacctctttcccagacccgagtataaacttgactgagcgagcagtgtcggcccttctccaaggaccgatcaacgatccaaaccgatcggcctacatccccttgatcaaacatcatctcttaaatgcgctggcctctcactacactgaccgacagagtcagatggctacactcgtgaaattggccactcttcctgtcgaaaaagctcagagtagacaacaccttcttcgaacgctaaagcctcatcagggaagagccaggatgaagtggttcttttggctgacgtatctccgaaaagacctcaagaacggcggacggaacgctagagaaatttgggatattttggcctgggcggatgaagaggccaggttatataggatttcgttagaggccgatcagcggatcgtcgagttggcaatcgaggcacttcaaatagatgaggaccttgccacccgaaagcctaagctccaagatggtacgtacttgctttgcatctttatttccttcactttcttcgattccctcatcaacgtgtcacgtcggtgataattctcaagttcaatttctaacgcctttgttatctcctccgttcaccttgaacagacgccaagccaaggaaggaggccgatgtttcgctcgagcggttactcgaggcgatcaaacacgagatcatgatctacaaacgagacgtccgagctttcatcccacttgctcaaatcgagaccgcccgtgccgacctgatgaaccttcgaaatctgtacaacactcctgggaactcgatcgataccccgctttcgtcaatcctccctatgatcaatgacccggccggaccgacgattggttccagagtcaacgactacgccgtgttcttggccgaacgactgacgtacgagctcgagccgacgttggagcccgtaggcgaatccttcgatccggaaactctcttgaacgaaagattcgccacacttgatagattggagaccgtgtcaaggagacagataaagagacgatcgtcgttgaatttgttcccatccagagaaagaggaactttgtacgatttgaaggatcccgatatcgaggttgggtttccgatggcggtgaaggagataaaagaaaaagcatctgcatcggaagcgtgatatatgacgaattccagataaaatgaacgacggaaccagtgattgagtttatgtgtcaaaggattggcaggaatgatactccatcgagtccaagaccatttacaagttgagattttttaaaagaaagcatgctatctgttcaccaaaagtacgtatgtatttcctgcttgtttcgttcttcctctgtgtcgttcattttcgaacagcgtactagatgtgcgaagagagcgcaagcaaccagcgcaaaaggaagagcacgtcagttcattccagataaaagagagcggtgtgtaaggacggttaccttttgtacatatgctctggcatttgcgtcaaattctttccgattcgtcttgtaaagctcagccacctgatagtccaaaaaagagagacaccataagcgctttcgtcggatattgaaagctctcaaaagggcagtcaaagagaaggatgattttgacgtacgctggcgactaacggatcatcaggattgggttccgagagaaggttatatatacttagaaggactgtagaaagaggtagggattgataaaaccaaactcaggtgaataatgacgaaggctgagaaacaagcggagagaatatcaaacgatatagcttaccggtggccatcttggtcgctggtttccaagcgtcttgtttcaagagaccaacgcaaatgttgccctcatcgtcaacattaggatggtagattcttgtcgtgaacttgatctatatctcagccgacgagagaataaggagagaacgtataatttcagcaaaataattcatgtctagacaaggaggcctgtcgatagatgtgaaactgacaagcggagctagatgtatgcaacacacagacgcacaccgcaaagacgagatttcagatcaacatttgttttgaatactaagacttcggagactgatcaggcgaggtcatacctttgaaaggatagtccgggggaaaagagacgtttaggtcaaagaccccgctttggtaaggtcccgagtcctgagatgaatgaacatgatcccaccgaatcacatcatattaatggtccttagatctatctcatctctcatgatctgaaaagatagagaagaacgcttactggtccttgtatagatgctttccaaaaaaggacgttctcgtcgtcagtttctacccggattgcttgtaggcctgtcgagttgtgaacctcggcgagttcctatgcgcaaagtcataaaccaagatggagagtttcgcacatcagtttcaagacctgcactactctggactcgactttagttcaccttctgaatccttcgtatgttaccagagctcattgtggaatgaatgcgatgtgtgttgatggcgtgttctttttcgtcgtcgtcggatgctgaaagatctctcttcctttttgggcgtagtaagaaaaagaagccaacaggattaactgatgatgctgatgaccgtttttaaccatcaaaccatcatcccatccgtcaatttcggtctttcttcccagattgatgagctcgcagacgccaatcaacccaccggataagaacgcgacaggacttccctccatgaggattggtttcatccatccagaccttggaatcggtgcgtcgttgtctgtttctgcctttccttcttccgtctccatccatcaagttcacttatcgtgttctttctttctggtaaattcatatcaggaggggccgaaagactggtggttgatgccgccacctctttgcaagatagaggtcactctgtcgagatctttacatccagacatgatccaacgagatgtttcgacgagaccagagacggtaagtccgatatctctgtgtgtctatgaaacatcgaaaccaacgcacaactcctcatcctcgctacaggtactcttaaagtccacgtcttgggaaatacactccctcgctcaatcttcaactctctccacataatcttcgctatacttcgccagcttcaccttacccttctgctcctattatccctacttcctattccggtatctctccagcctatacctgagcttcgcgcgttcgacgttttctttgtcgaccaactatccatctgcgtacctttgttgagatattttctgcgtacaagagtcgtgttttactgtcactttcccgacaagttgctcagcggcgaatgggacctgactcctggcgaggaaggtcctcgaaagaaggagtcgactggcctgagaagtttgattaaaagctgctaccggttgcctttggacttgttggaggagttcactacttgtaagcatcaactgttttatttctgatgcacttgatttggaagctcgttcaacgtgcccttctctacaacaggccaagccgatgtcattcttgcgaactcgatctatacgtccaaggtgtgcctcaaggcgttctcctcattgaagcaacttcctcgagtcgtatatcctactatcgatacctccgctttcacacctctgacccctaaacaagaaaattcatccgacgcgcagatggttctatcgtgagcaagattcctatgctgacctgatccgactcatcttgagtcagattattgattgcgtcctcgttttggttttgatagtgatcggcccacgctagtttctttgaaccgatttgaggggaagaagaacgctgcgttagcaatcgaggccttcgcgcgattgacaaaagaaggattagtggacgaccaaacattctcgaatttgcggctagtcttagcaggtaagtcttcaagtcatgtctcaagatgagcgtcttccgcagatgcctggagagctgacccaaacccatgcttttgttgaaaaaggtggatatgacactagtgtccaggataacgtccagacactcaacaacctcaaagcgctttgcgtatcctactcgcttacctatcatgtcgtttccgagttgacgttgaagcctcctcctgtggagactcaggtgttgtttgtgctgaacttcagcaatatccaacggacagctctcctgctgtcgccttccacccgcgctttcctctacacaccttcgaacgaacattttggaatcggcccgattgaggcaatggcatgcaagcttcccgtccttgccgtcaacagtggcggaccaacagagaccgtagtcgacctagctgatgcttcccagggggagaccggcacaggcctcctgcgaccagcggaaggcgctcaatgggcgaaagcactggcgaagcttgttttgatgaagcctgctgagagaaaactgttgggagaaagcggatcgaaaaggacgaaggagctgtttgatatcaaaggaatgggtttccggctagaggaggcttgcaggcaggctgaagagatgggtccagttagtaatttggcttggattggagcggccagtctgggagtcctgttcgcagcatgggctttatcatgagtagttctatagaagtcagcgttcatgtctttgttcttttgataccataagctcattcagacgatcatctcggaggtactttgtatacgtgttcgcaaccatgaggggtacatgtactcgttttactataaaatacctcagtggccacataggaggcatcaatatgatcagactaaccatccatagtcttcatgctgctcattttgctgccgacgctgatgacgccgtcactgacacctattcacatgatcgagaacacagtttctagcccatgtctaatttctgcttaatttggatgatgttcatattcagtactcatcttccaaaagaaaaaatcatatcgatacatcaatacatgaatcggtcgtatgtaagaagagttcaacactacaaggatgtctcctcaagaatatcaacccgacaatcatgatttaatcctgttttggttgaagcgcagacgcttccacctcttcaaattttaggctctttttcaccaacttgattatcctccttcagcgatgacgatggttcttcaatcggagaagtgagatgggagttcaaactctcggaaggcggaatatcggagagcgtttgtgcttcctcagaagtttctgctggaacctctggagagatcacttcagatagttcccgattggcggatgactcctcagttcctatttccgaatcgggatctacaacctgtgttaactccgtctggctgcttagagaagaaaccggtgacacaatatcggttgcagttgtctcgttctccttcgtcgtcgattccgtgggcggatccggcaagcttgacggttcacctgcaagagtagagatttctcctgagttcgatccatcaccagactcaagtgaaaccttatctggttggttgccctcggttatcacaggagctaagaccccttcaggggtactatctaccaatagttgttctttcggcaaaggcgttactgcaggcgacggtgttcctagaatgttggagactgaatccgaacgaacaaggtccctgcctagtatccttgtatcgagatccttccgaattttatcttcacctccaagaggactatcttcgtcgtcattttcgttttcattctcgttatccttgtctttcgactcgtcatcctgagcggatgcctcgtccgcagatgcgggaccgtttcggttactgctcacccggcgcataagattcttcatgcttgctcccacaggtcgacgaggaacagatttatctttgacaagatttggtaagatcggaaggatcggattgactttgttgagagccgaaagtttggcgactaggtagttggcatcttgaagcattctgccctcaatcattggaagagataagcagattaacaaatgagattttggggagaaacatgttgtgatgaaaacgcacctgctcttggcttcatcactcttgagtatcacatcagcataagcactggaaagctcatgattgatggaagcaaacacttgggacaagacgctctgttcaagagaaagaaaacacacatgcgcgtcagttgccggattcgattcaagaattaaaaaaaaacataagacagaaggaaagaaatccggacctctactgtctgatcgggcaagtatctcgaaagaattttgtgaagctgagatgtctccttaaccaaaagttctgcatactcgttaggactagaggggcgtttcgatgcaacctcccaatcaatttcctatgcagcagtagaccaaatttgacgaagaccgttagtgaacatgattgggacgaatcattctgaagtgacacttagataggacatacacggaaggtttttatatgaattgcgagacgatcgcccataatggctaccagcttggcgtgtatctcatactgatgctcttggaaatccttcaaaaataaaggttacagcgttgtcaggcgatgtaaagattgatcatgagtcaactgagacgaggagagaaagtatgttgatgatgtactgacccgtttcaacttgtcgaactcaatgagcatcaccgcctgctttgcgcttaaatgacgtcgaatcgtttctcgaatgtatggaatcagggcgaccatgacggagagggattgtgaggcaagagctaagataaacagggatgagtaaaatggattggagtaagtattatctgatgactatgtaggaacaaaacaacaatggactgacccaagtgttttgcagtaatattcttcaatccggctgatcgcatcgcaccagctcccagcacaacttgacaagttcgagaattgaaagactttttcgatagagagcaaagtcgatcaaaacagatgaggatgagcgaaatacgcccctaatgagcggggtttagaagagtaaaaaaggagacgtactttaaggtactcggtcactttggacatcacatccgtcgtgataagctcgatgttgacaattaacttcagatagtccaccaacaattcaattgatcccaacgtagcgcctactaagatgaaggtcctgtcttcgatctgcagatgctttaccgtttgaccttcggttacagtggccgatggagcaacatccgagccgatacgattcttgaggatgagctcgggtggatctgatacggcagatgcaacgatgatctcgacggcacgctgttgagcaggcgagacctcttcaggagaccataattcgttttcaaccatcttggccgacttagataatcgctgggagtgatagttttgaagaaacatcttcgcctgggatcgaacgagtatacgtcgaatactgatcagaccacataatctcgatatctaattgcggccacattgacgggagccttacctgaacaaccatagtccctcgaagcccgacaatcatctttcggcaaatgacttcacagctcagtacaaagttccaagcctcatcgaatgtctcgatgaagttgtccagctcgagagatgcatgttgctcattccggacccccattatcttggacgcacgcgagtttgccagctctgcagcttgggatagaacatcggaaagttccgtcttgattgtaagcgactggcctgaaagagaggatgacggatctgccacagacgaactacaagagatcgattgaaataccaggatacggagtcagattgacagatttcccagaggggaagagcgcacaagaagaaacttacttggtggcctccatgatatccccaatagcctgggagaatcgttctattttctgaatactttccagcaagccagaggacatgactttttccatagccaagaattttgaatgaggcatctccttcaaaagtttactcagaggagaaaggctggatatcctacggtcagcaagatgcgacaattagactgaactacacgaagaattgcaattcgatctgcttacgtgctgcttgagccgctaatttttgtctgagacgcgtcctcatccaccggctcatcctggtgctgaggtatatactgttcaaaaagaaatttgggtagtttgagcatcaagttatcattcaaaggctccaaagattcgtacagaaagcgaatcttacctgtttagctacacttctgatttgggagaccgcgacttctctgaacaccgtcaccaatcgaacattttccctgactctgaccaagcccaatactaatggcctcaactttgccgtcacggcctcgagatcctgaagcttacccaccatttccgcctccaaaagcgcatgtagctctgactctagttgagtaccaatcgccaacgccagacctgcgagcgattgaggtaatccggctaaggatgacaagcctgtcagatctataggagatggtggtgttcgatgttgatgaatgttccgttttgaggaggatgaagcgcgagggaaggaaggaagggaaggagatctgggcggactccttggctcggcccgacttgggctcgaaggaatgaaatgtgaagttgaggtcggtatttctgaaagaccgccatcgggttcttcttcaacctgtttcagtagagagccggaacgaaacctcccagaagaaccttttcttggtctccctggagttgaaggggatgagcttgtttgggttcggttcccgcttcccaacgttccaagcatttgctcagactgtttccctttccctttatttttgacccagctatcgacttcctcccataattcaacagcgccatgtccatctcctgttgaaacgaggcctttgatcatgccaagcgcttcctcgattcctttgatctcactcacagctgactcgacgctcttaagttgtttgagtgatcgagcgagtttgaccgcttccagacctcgttgggcctgagctttgtcgaccatgtcaagttctaatcgaagagactcgatccgagagagacatgtttcagactctgattgaagatcctgtaggttcgtcagcgcggcaaagaaggaggctgaccgcttcgaaatctccgcaatgaggtgctgttcgacaacgtccaggtagccggacaacttctcctgaaacacttccgtcgggataggggtcggaggatcggccgtgaaatttgtgggaaagtgggatgtgaccttagcgattgatggatcgggatcagcggacacgagcgagttcgacgagggagttcgttcagacaacggtttaagggtcggaaggggagagtcgaatgagcttgaatcgatgacaggcggcggagagaccaatcggccagtcacctggtcaaatatgtggggatttcctagattgaaatctgttcgaaagtatacatcaggaatactgttaagggcaggaagatgcctctcggcctcgaccgattggttcttccgtcctacgtctcctacataggcatcggtgctggacttgtcagaattccgagcagattgctcatactttccccattcagcagaaatcgattgaatatatgtgtttaggtcgttcttgttaactcttgggaggacttctggagggggtgcaggaggtagtgggattctggatgctctaagaggagccggtttgcgagtaggatgactgaggactgtgctgatagctagattttaaacgatccagagtgtgtacgatcagatactaccgtcatcagataacgaggagctcgaaaggtgtggccaatggatcgacgagtcagataaaactcttttgacgaaccgtgaaacccttggcgtgctgtgagatcagatccaggtcgagataatgacccgttcaggctgacgagattgagctgagatagatctatcggggtcgaagagagagagccggctgtgatatcagacaagaaaatggagatgagcttgctttacatcgcttcccataagggactagcttccgttcaaatcaagtttcaagccggccaagatcaaatacaattggatacgaacctctctcgagccgagctctaatggatgagctgaagtcgccatcaaattgggttgagtcctcggccgagaagatactctctgatagtgcaggtgtggacgttctggagatgtccatgtcctctaaccagagctactcggacgtcttgagagatgagctatgagtgatgagagttgagtaaccttgacagagagatcaacagaccgaagatgtttgtccggtgagatgagaatggtccgtgcgccattcgtggttacgaaggtggttactctcacgtgtcatgttgccaggaccaattttactctcagtttgatgtctttcacttcgcacagatggaaaagatgatgaacattgatcatatatcgggatagagcacagagaacaagagcaagaacggtatatgagatgtctgctaaacaagataggaacgagctagacatcctggttcgataaagaaacctgctagtacatttgcaaccatcaagcataactcggtagacctagcccgaaaaagaacgggatagatccatcggtgagcagcagcgaccaagacactgactatagtcttcccttctcagaacgagacgtggaaagacccaaagccctccgaagcccaaaacggacgtcggaaaggtcgaggtcaagatgatatccctcgcgtatgactcgaactcgcccaatacccagcctggaagagctgggggtagatcttgtgcagtcacgacgtctgatctccagccgagactgatgaccagatgagaactgcaaagggttctaccatgagtgaggacttaagaaacgaggggaggaaagtaaggtatgaagagtggaaaatggttacaagcaatatatagaaggaaaacaatagcagaaacttgggaggacacaaggcccgatcaggtcaatagtcagtaggttctatacatctctaacttcacaacttggtatggtgaaggaggagaacactaggagactggagtggtgagtgaaagggtaaaacgaatgaaagagaaaaaaacgaaaggggcctggtaattatagagaatttcatttttgaatttgtaataatcataaaccttatatgatttacaccggttacacttgcgtgcctctcgcgctgagcaggtttcccctcgaacggcctgcatctcgctacccataccattttcccttctcatcgacatcagccatcagcctttctttcttgaacatatcctatccagttatccaaagatggtatgttccttcgttgtggaccttcttcctgctttcagaacaaatagtggatgtctcaagaagaagaatcccgagattgtctgagtctgatcgattgccttttccttgttgcaacccatcttcttattcatcggaccttgcctttgtgatcatactcgaccttttcgtctgctttcaaacatatcaacagaacgaagaagatcatcaaccgatcgctggaccttctaccgtagaagagtcacttccgatggaggttgataactcgaatccaaccatcaaagatcgtcagtcctttttttctttaccaagttatattccttcttttcgtgttgttgctcgcttggcaaggttagatggcaaggttgagaaagcggggagcttagcagatggcagacatggataccaaaatctgtagctggctagaccaatcagtctatcaagattgtggatatagcagatgctacacttgtgcccattcatctgattatcgttggcagacgatgcccacatcattctatctattctcctgtttgagatcacactgcctcttgagatgaatgaggttggaagtctagtgattcgaaacgacttctttttgccgatcatacatcatgtcgaaaaatatcatttgacagaacgactgcttatcatcattgtttgtacttgtatctatttcccgacatggcccttcgacttcatctctatcgttcattatttaatacagatgaggcgttcgccgccaaacacatgcctgacctcggtcaagagattgaggattttcaggtccaaacatggcgtgtatccaactggagcactctctcgaagcgattgagtggagcggactttgcctgtggtggccacaaatggtatgtacctcatctgagaagacccagtattaactttgtacaacatgctgacagatagtcgtctctcgattggaacaggcgtatacttatatttcctcaaggaaatgccaacgggcagccaaacgatatggtctctgtttatctagattacgccaacccaaaatcatcaccagaaggatggcacgcatgtgctcagttcgccctagcgatatccaatcctaacgatccgtccattttcactgtctcacgtaaatatttttgtcaatcttcgcatatcgtcacaaaaagcttattccactgttctgtttttcgggcttggtgatgtgtagacgcccaccatcgatttgtagcggaggagtgtgactggggatttacaaggtttgtagatctccgaaaactgcattcaacacaggaaggccatgcccgaccgacaatcgaaggagatgaggtggacgtgacagcttttgtcagggtgttgaaggatccgaccggagtgttatggcataactttgtcaagtgagtggatttgaccgacggctaagagcaagtgtaattgggtgaccaccaacagcctgctgatgctctttgttcaaacttgctatgatcaatacgtgtgctgggtgggtgcagctatgactctaaaaagtttacaggctatgtaggacttaagaaccagggtgctacgtgctacatgaattcgttattgcaatcgttattcttcacatcatacttccgtagagttcgtcctcttttctttgagaactttttctttcttgggactgctgcctctctttcacaaaacgatgtactgatagcctacctcttttcgttgtatttccgctcttgtgtacgattacattttcgaacaggcggtttatcaaataccaacagaagacgacacgccgagtgaaagtgtggcactcgccttgcagagagtattctatcacctacagacttctgatcagcccgttggttcgtattcattcccttatcattttaccaatttgtgatgtcaacgtccattctgacgcccaatactgactttccttgagacacataggcaccaacgaattgacaaggtcctttgggtggaagtctctagattcgttcatgcaacatgacgttcaagaattcaaccgggtgctacaggacaagctagagacgaagatgaaggtgaattttttctttccttattgcatatgcgaccagagtataccggaagtgtaggtggcttatcggatggattttctgtcgggccttatccagggaacggatgccgagggagctattcaaagactatttgttggaaagatgaaaagttatatcaagtgtgtgaatgtggattatgagtcagctaggtcggaagacttttacggtatgtcgacacgtcttccaatttacttcacgctttgttatcagggtcttgtatttatcttcaaacttggactattacgcggacagatattcaacttaacgtcaagggtcttaaaaaccttcacgagtccttcaaagattatgttgctgttgagacgctagatggggagaacagataccaggccgagggacatggattgcaagacgcacgaaagggagtcatttttgagtctttccctccagtgctgcatctccagttgaagagatttgaatatgatattcaaagagataccatggtcaaggttcgtctcggaactacctgctttactgtattttctctttcggcacccttgactcaacgttcaacccctctatccatttgtttgttttcatctggcgtatatcatccagctaaacgatcgtcacgagttcccctacgagattgatttgggacaataccttgatgagaacgcagaccgatcgcgcagtcacgtctacaagctccacggtgttctcgtacacgcaggtgacctccacggtgggcactactttgcactcatcaaacccgagaaggacggaaagtggttcaagtacgacgatgacagggtcactcctgtgaccgataaggaagtcctcgaggataactacggaggagaaatcttaacgcctgcaaatgtcaacttgccccgaaacgcggccaggccagcgaagagatttatcaacgcgtatatgctggtctatatccgagagggtgacattgatgaggtgttgaagccgttcgaggaggctgatacgccatcccatctgaagaagaggttggaagaagagaagctccagctagagtctaggaagagagagaaggaagatcagcatctctacttgagcgctaaggttcgttgagtgtgcattcgtctttcttgaagtagagacctttcttgttccctcgatggtcttttcttttaatcactgcaacttttgccttggctaactatttgatatatatatattaaatcaatagatcattacagacgactcgttcaagaaacatcaaggtttcgatttggccactttcgaagacaaaaacatacctctctctgatctcgatacattccgtgttctcaagaccgagccctacaaacagttcaagcagcgcgtcagtcagcactacggttatcctgaaagtcaattccgactctgggtgctcgttaacaggcaaaacaagacggttcgaccggattcgccgatcgaagacatggaccagatgcaaacaatggaaaacatccgaaatcagatggccaaccgagcgaatgatcttcgactgtacttggactttgagcccgatgcggaaaagagtcttcaggtcaatcacaacacccacagtatgattttcctcaagcagtttgatctgcagggtcaaaccttaaccggcgcgcacaagctctatgtgaaccgaaactccaaggttggagacctgattccagttatccaacgactgatgatgtggtcgcccaacacacctataaagctgtatgaggagatcaagccggggatgattgagcctatgaagttcaagaacacgtttgcgatcagtgagatccaggatggtgatattatctgtttccaggtggactaccatgatcgagagcaagaagtcgccaacaactcgattgcgaacgctcctgcgttctacgagttccttcaaaaccggatcctggtccgattccagcccaaaaacggcgatagcgaccccaaggccatgttcgagacgatactcactcgaaagatgacctacgatatgatggccacgaaggtaggagagtaccttgagcatgatcctatcaagcttcggttcacttcgcccaacggaccgaacggtgctcccaagacgatcgtcaagcgcgctctcaatcaatctgtccaggacattgttcactcaacttactctgctccagtgacgatgctctactatgagaagctggatatcagtattgtcgagctcgagaccaagaaatcactcaaggtcatctggacaggcgctctcaataaagaagagggatctttccctttccttctgcccaagaccactacgatcgagtcattgggtgagcaaatcggcaagcaggttaccatgtcggacgatggaagcaagagaattcggttcttcgagatcactaacgtcggccgacggaagccttatgatttctcggagcacacaatgatcggaaacattgacgatgctaccgacgtctatgccgaggaagtacctgtagaagagctcaacatggctgaagacgaaacgttgatctcatgcttccacttctccaaggagccatcgagatggcacggaatccccttccgatttgtgctccggcctggagagaaattctcacagaccaagaagcgacttcaagccaggacaggcgcgaccgataaagattttgcaaagtatcggttcgcattgatcttgaccgatacttctggttacaaacagcccaactacattgaagaccacgacgagatccatcatcacaagttcaccagctctcattatcttggaattgaccatgtggacaagacgggcaggtccaacaggtcgacgatggagaaagctatcgttattcgatgattaatcggtcactcctccatccctcctgtctatctaattcttgtcttctccgtttcttggctggacgtccttgtgaccgttttctatcaagctactgtctccgtagttctttctcatacgttcaaatcaatctgatctatatattttactttgacctctttattcaatctcacagtcaaattacccttgaactcctcttcctcccccttctctttccttattccttcccttatccaaagtcgttcctgctctttttgcctagtaaactctcttctccttcgcataccttgtattacatgcaacttttctttcagcaccagttctgaatgcagaaaatattcccgtcctgaagatacagatagcacaagagagagaataggaagaaaagctttatccagcaatctgtcatcgttaaatcttcatcctgatacaaatgaatcccgtacacccgacttgacaaaagcgtgacccagccgtcccaagacaagacgatccggatgcatcctgcgctatcctcaaccaacccggctcaaagcgttctccttcccactccttcaaggacaaagcctctcttagttacatatccttcccttttctctttcgtgtttcgtcttcgtcagagaccatgagagtcagggacaagaaacgagcgagaaggggagaagtgacggataaaaacgtggaggcggatttaggaagttgagaggaaaagaaagtataggatgagaacagaaaggagaaaggcagaagggaatagacgagcgggagaaagagaagcaaagacgtccaagccctcgtactctccctcgtgcttaaaactctgtgaatccgcccccttggctctggacaactgagtacgcacttcgaccgtcatcttccagcccaatgtccgaagatttgtatagagaacctaaatcattctggcccagctgactcatcctatccgactgtgcaaacccaatggatgaaccgacgattgaaacatcggaagaagtgtacccgtggatatcacttcccgcaatgacactcgccgtatccgcattggaattggtctctcctgcatagaggtcttgagaaatgattgacgaagcgtaggatgaatatgtctggtttccttttcgaccgcctacagctgattgggagaatggaccagcggcggagtgagaggaaaacatggggagaccggagctggtattgtgggttgcttgtgatttgagagattgggcatcggaaggaacgtatgccagcgggtcatgtgttcggtaaaatgctggatcgaatcgactcggaggaggagcggttcgttgcactacacaccaggaaaaaatcagttcttctgagaatcaagccgcactgaagaagaactggactcactacctgtagagccattgctggcgttgttgatgagctctccagtgtgagcatcaaactttcggaactgatccattgccttctctaaggttcgtcgaggcttgctgaactggatcaaactcggctggagattgcttagaggaccttcaaccaagcaagagcgttccttgaaatgggaaagcaaaaagtgccaaagaggatgctggagggattgtgaagtaatgatgaacgtatcagctatctgcaaaagaaaaggagaaccctatgatgaaactgaccttgctgagaactttgggattacccaagatgacgactccgtattttgctcgagtaagcgcgacattcaaccttctcggatcgctcaggaaaccgatgccctggtgttcgttacttctcacacaagacaagatgatgtaatccttctctcttccttggaatgcgtctacactggcgacctcaacttccttatacaactcttttttgagagacccgttgaattgcatatagttgaccacgtaggatcgttgaccttcatagggagtgatgacaccaatttggctaggaaggacgccagacttgaagaatttagtgacaatcttctcgacgttggaagcttccgttctgtgagttatggcgtgcagcaagatatgtcagctaaactcagagggagcaggggcagagacaagaacgaatacaattcctattgatagagaaaaacagacctgtttaagaaagacgttccactggatgaaatttcctctgttcccaagttctggtagaacatcattggcgtatctgccactggccaggggaaatccacgttttttctcaacctctcgggtgcagtcactccattttggagagttccctcgtaaaacatattggatggaaactcggacaggcaagggtgcattcggtattgaacttgaagtcggattggtcggttgccgaggatgattagtcgctcgaagagcgactgggatagaccagcccgagcagctttcttgttcatgatgaccgggccaagttgttgatgatctcccaccaaaacagcctgcttacagcccaacacaagaggaatcatacactctgtagagcaacaaagaagagatttttagggcgaaaatcaacatccagaacatctgccagtaaggtgatggtggaaggatggtactcacctggctctgcagcctgggtagcttcgtcgatcaatactgtcctgaacttgaacttgctcaatcttggatccgccgttcctacacacgtacaacaaatcacatctgccgcgtttaaaatctctttctcacaagctttgactaagaccttatatttcctctcatcgctctgactcaactccccctgggactctttcaacaggattaacttctggagctcggtatgagtctcggcgttggcaacctgttcgtgcaaggtaaggaatgagattggcgagtcaagtgcctctcttgatttggcggtaattcggacgactttgagaccggtagcatgaatcttctcggtcagttggtcgacggcgacattcgacggtgcgcacacgagtacttgtccggggttcatcttggcaaggtggtatacgatcgaggcggaggtcacggtcttaccggttcctggaggaccctatgaacattgatgagatgtcgaatcgatcatccgtgatggttagatttcgacatatgtgacgagcgactgaaggtgagagaaacacaaacctgaatcaaacttaatggcttttgtaaaacactcttcacagcgaacatctgcgaatgattgagctctggcaaaccaggcgcagagaatctaaatttataaatgaataaaaaagagttaccaaaccaaaggatcgatgatcagtctttcggcactccttatacggaatatagaggaggaaacgtaccgcttgggcatctgtgtccttaaaacctggggctccaactcatgacctagaagtttatggtactatgaggtgttgaaacgagtccagttattgtctactcctaaacaaaagcttgagaggaaatggtgaaaggacttacaatatatccgcttacactcctttcatctacagcaaacgttttcatggcgagttgcattcgatcgaacgaagttgacttccagacaaaatcggccgagaacccatgggtgcagtctgtcggaacaccgtctgacctcctcagctccaatccaatctcgtcactgacgtctgtgagagaagtgaaggagaaattgagccacccgtcaatacagtctctataatttctctgctcacacacaaagttcactaactattaggaatcttgatgacatttcctactccgtcccactcgccacttcctttaccaccgctgtagccacctcctccagcgcctccgccgccattcccaaacttgagcctcaattcgtcgcccacggccaaccttacctccccgctctccaacttgggcatattaaaccaagcgactcgcttttggttcaatccgacgtcccatcggacgatgatatcattttgagtttgagactctttgacctttttgtcgtaatcggcctcgattttgacgagagggccaaagatgttctggtattgatacgcgtcttcgtatctgttttattaacattttgtttttagagagaaaagtggacgattgagatcttgcgagaagcagttttatgtgctgcagactcataacgagaaagcaactgacttgagtagaattggttgaggctcctcatctattccagctcggccaatgtcctctagatcagcatttggatcctccttccacatctcctcaagcttgttgatctgatggtatgagatttgtctagcacgaagctgttcctgctccgagggtgtcttgacaagccaggaaagaaaagcgcgatcgtcgatgatagctgaccattgagtggtgtcccagacaatatctttggaagacgtcatggccgcacaaggttgtctacatagtgagaaggatcaaaagtgtgcgtatcaaaatgttgatcgaaggggatatgtcgagtcggacagagaagattattacaagaaaaactcaccgacagagcaacacaaccacggtgtcactcttagccgggatgaatccaagcataaagacgtttttcgatccacagttgtagcattctggagtggtttctcccaagggcgactcagcatggaggatgacctccttatgctttgctcgaacaagatggttgacgatatgcgaggctgaagtcgtccctcgagcgttgcagaaccatttttgacaaatcagacactgtatgatttgaagcagggatgcatgagaagagcgattcacgagattgtagaaagattagcagacgtcataaatgtaaccgctgatgagtgatagaaactcgccttgactacacaagatgggttatggataccacagtagctgagacgaacggaaaacataagattagcgtttgttcaacgcgacagggttttgctaagcaagcgcacatggccgtctataccacgatcggaaaggaacagagacggagggataatctacctgcatgcgtgctcaaccacacctccttctaacttgaggtcttcgagaacaccatcgagatcatcgtcaagctcctgagcagcattggcctgtgcgtgcgtcatgtggtggttgctggagccatggtgatgacttccgttgaaggtctgctgagaaagcgagtggtccgagtaagcggcgtgtggttcgttgttagtggcgtgtgtggttgttgtgaatgatgaatacacggaagccgagtcatctgcaccatactgatcgtgtatacgtagttatggaatagggagaaggcgaaattaagcatcgatcaagacgacgggaaagaaggatagagacaaagaaacggagcaggggaaacgatacctgtgaggcgccatcgaaggcctcgaattgatcctgtgaggtttgagaatggcagagccagcagtgagcgaagcattctctctgaatgtaccacacgatctcatccagcacatgcttaccatgctgtccgatagatctacaacgaatgacggacgatgaacaggtaggatcgatggttgatgaaggtagacgaatctcaagtgtagtgggagccgatgaaaaagaggcacacatctaggtacatattcaggcacaaatctaggcacggggtgatgcgtaaccgcgattcacgtgaccgtcatcaccgactaagaccaacgacttaggtgaaaaacgtcatattttcatgtattttggatctgatggcgtgcccagaatttaacaaacggatgatctcaagtaccatcttgctccttcatcatcatcatctatcacaactatcgtgtatccctggcataggaaaacctggagtacatctcctatagtcatcaagaaagttcagacaagtaaggaagccgaaaaaaaataccagggaatcaagccaaagacagcgcaagatgcggctcctctcgtcatccgtccgcgtcgttccctcccaattccgcttactcaccaccacatccgtgaagtcattctcggtcgttcggccgtctgaagctagcgtatcgtcaagaccagcccaaggatttaatccttccttcccctgtgtcgatgctcacgaggcgcgcgcggaaaaactctcgagaaatatctcgcaagagccactccgaacaagtttccccaatagaggtcccttagaagatccaaagggcgaagagcctagttactcggtatgtgttactcctgcgctcctttctgaggtctttcttcatcgaacgtcctaatatttgtgttgacctcacttctccgttgactcgcatacgcattacttccatcttgtatttgctattcattcgctttttgtatgtgcgcaaacacatccacttccactcacataggccccttctccggcaaactaccagacctttcatcaccctggccctttgcctcttacatactctgcaccccttccctcatttgacgtggcgtacgagacatggggaacgctctctcctaagaaagacaacgtcatcctcctccataccggactctctgcttcgtcccatgcggcttcgaccgagttgaatcctgcacccggatggtgggaggctttcatcggcccagggaagacgcttgacaccgacaaattcttcattttatgttgcaacgccctcggtggttgctatggctcgactggcccagcaagccccatgccgggcggccaggacggtgaaaagtgggcgaccagattcccagttgtcagcatattcgacatagttagtctcttcttcactctgtgtgctgttggtcaggacattgctcaccatgacacacatatgaacttttatccaatcaggttcggtctcagttccaccttttggaccatctaggtatagacaagatctatgcctcggtaggcgctagtatggggggcatgcaatccattgctgccggccacctctttcctgaaagggttcgtaagtttccctctgtttgatcagcgccgtagaatgtttatcaacaaaatcctccttacttgcgcacatgaacgtactttttttttctctcgacgtataggttggaaggattgtctctatctcgggatctgctcgatctggtctcacaggagttgctctcaggtttgctcaacgaagtggtgagcttttcctctcctttgcagttcatctgttctagtcgactttcattcgttgggcctaatggcaatttgtcttgtccgtgtttcgtatttgaatcagtcttgatggctgatccgaactggaacaaaggattttactacgatggccttccacctcacgcggggatgaaactcgctcgacgtgaattctgttccttcctctagaaaatctatgcatcccctaagacgagaatttgtcactcacttctatgctatatgattctctcttccctggttcgcgatagaaattgcgactatcacctacagatccggccccgaatgggaacagcgatttggccgtcgaatgcgttcacaacaacctgacaaagacgggtcaaatccacttcgagtgccggccttgtgtccagatttcttgatcgaaacctacttagatcaccaggtaagattttgtcttcgatttgttttcctactcagatactggtcgtcttaaatatattgcgcctcaaacgactcttgccggaacaaacagggagaacaatggtgtctaaagtacgatgcaaactcgttcatctacgtgtccaaagcgatggatctatttgatatgacagcctcctctctcgccgatcttcaatctcgacgagatcaactggatgccgagttcccaagttccacgcctgcttctagctcgaccttgccttctgatccatctcagactgacggacctcaaacgccgccactcacgacgtcatacgctccattcttggacgatctagctgctgggctgaagaatttgaaggatatcccgaccttggttcttggcgttcagagcgatattctcttccccgtcgatcagcaaagggatttcgcagaggctttaaggagagcaggaaattcgaaggtcgcttactttgagctcggaggtgtttgggggtaagttgatctccatccatcttaggggattgctatataatactgacgaatcaataatcggctctccacttgattctcactttctctacctcgatccacagtcatgatacttttttgattgacaagacgaatgttggcggtgctcttcgaggcttccttgcctaaaatatgtagcctgacgtccggagatctggaacactgttcgagtccgatgtgtttgctcacctggttgcctgtatatttgttcatctgtttgtttgcgcgcacgatatgtaccatacagtgctgagagaaagaaggtgattcataacgacacaaaatgaaatgagacgaaatgaatagagtgaatggcgaaacaatctctcggccgataagcatgattaaactccccacgcgtgcccactcacgcgcattgtgttccgcgtggtccaaagaaaaaataggtagcgaaatgagagttgtttcacctcccttcctatctatcatccaccctttctacatccatataccgagatgagatttcttagaccgcagaaactcgtcccactcttacttctacctctgcttgcctcagcttctgcgccgatcgctgcacaggacacctcagctgtgtctgcacctccctctaaaggcatagtagtgcaagctgtggatgctttggccgacatcgtctactctaccatcggactcgatctcaaaggcgtcaaggtcaaactggcagaagaagctgtgaaggcggtggagaatgataagatcgagggcatgatcaggttgacggatgagaattacgatgagctcgtcgaatttgaggatctcacttccgaagaagaggaagatagagtgtggtgtgtgcttatgtgagtctttgccttctctcacttgctcttcgacgtttccgtctccatctcggctagcaggacatgttttgcatttggtattgactgtttcctctcttctccttttctcgtttgcccaaatcaagacatggggcaaagacagattcgttgagcgagatgttctggaaagctcacttgggagccaagaatgttagccttggagatcctcatgagctcgatcgtgtcaagtttgccagaatagattacctgaacgtgacaagtgtcttgactcggtggaacgtttggaagtgagtagacttgtcaacccatctatttcgccctcttgttcaaacacttctacgacgagcctgactgatcgttttcctttttcgtgcgatgaagaccaccctacatcgtcttcgtgtctgaccgaggacaaactcttcggttcctcggtccaagatcgatccgacccgaaggtgaactcctcagagaagttcttgtcaatgatgactggaaaaaagcccccgtttgggaatctgaatgggctcctaaaggatcccggtgcgatctcatattcccttcttatctttctgtctttatctgtttcgtgtttatccctcatagctaatgcaagttggagtttccaaaaatccgcgcatgtgcatcgctcatgttactacagaggtgaatttatgcgctcttttgggtactacttcgccatttggaacactctcgcttccagaatccctagatttggttgggtgatgttatccggtttggtatcacagtctatccttaggtttatgcaccgaaacgaccctccagctgtgcctaagaaggtgcgatgttctgattgtctctttctcgtttgacaaccaattgacattcgaggaggggcatttcttcttcttcttcttttcctgtcccctgattccaaaagatcgtggagcctgtggcgccagccgcttctgataaagcgaaagctatagcagatgccgtccgaaaacgtgcttcggaaaaagcaaagcccgaggatgacaagtctcagccacaacccgaggggttcgttcctttttcttcttttccttattatatgacatctttgtcgcgctttgttcgttcttcttatgtttttaatatatttctttcgcgttcgtgcgcattcgctttgaacgctaccaatcagagttagaacgagaagcgcagctgctcgcaagtagatcagtgacaaaaaacagggcttatgattctaggaaaacaaaaggaggaggagggggatgagaatgcatagatgagaagatggtccttcttgatttgggtagatagatgagaaacatgatttactgttatctgtctctttctcttccttttttttttttaaaaaaaatgttgtatatggtttcacctcctcctttccagatttaatgggtttcgtcgtctcaagcgtgtatatactatgtttttacgtcagttggggacatggttcacacgcataatatgagaggagtataaatgatgaacagtgatggtgatgttaatttcattatttcatttcttctgttctccctctagcccttacagatcctcacttgctccagccccatagacacctgtcggctggacatacggcttcgcaggccttcccctctgcatattcggtggaaggttctttggtgttggtgcgacataggaagaatgaggagcagaggaggtagaaacatcagacgacgtgaaaggaccagtcttggaaggatcgaatagcgggatgtgagtgttgggattggatccccagttgatggtcttggcgggagagtggatgaggtctttaatcctattggtttttgaagtaggacaagagaagaaaagaggcagagtagttgttaggctcgtagacttgaggaaagattgctttcaagcaaatattgtgaacaagaagggcacaaacttgtctccgagcttgatgtttgtccatcggataactctgggatccactcggtattgatcgtctaaagctttcagcgtaatcggcgagcagtcaaactcgaccacaaagtaactattccgtaaggagtaaacccgaatagacagcacaggagatcagtataagggcaagctctctcatttccgcgggacaaaaactgaacaagagaaatcaaagacaggagtgttggactgactctccaacttcatgggtcaccttgtgtcttcgcatcttttcaggcaacgtttgggtaccccaagatttgatcgtccttacatgtcctcctatttagtgagatcaccagataaacatcgcggatttcccatcagaatcccagatgaaacacaaaagaaaggagcaagcgagaccgttagctcatggatgatttaaaggaatcgtatccagtgttctgatgaagacaagagaaaaagggaagaaaggaagaacaaaccgtgctccatgatatgaagagcagtggatctgacaaggtctcgaataggtttctacaaaatcctcagattaatcatacagaatcaaaagagatgggcaaaatcttggttttagctcaggaaatttcctcctaaacgtgaatctgaacttgttatgatataggttatcccatccattctctcttgacgatccctcaagctgccagaccgttgaacgttctgaacgacacccgaacgagatcctgagagggaagaaaagagtctaggcaaaaaaaaaccaatacgaacgtatttatcatagtgagatgcaatggcgacaagctggtagaacggcatgatgtatatcggataggtaatagaagcacacaacagaatggaaggtgaacgtcgtcggtttgatcgtcgtttcgttttctctttgccatttcgaagtcgtctaaggtgtaaccagtgtagccatgatcctacccggttactaaccgctatcgtttagatttgttcaagcccagcaaacctcaagcagactctctgtctctctcctgttctctcctattctctctatccatccacatccatatacacacacgcagaacaactccgttcgattcagagtgcatatacgaataacgtagcatggtcaaacccgctcagtcctccaaggctggaccttctcagtctggcgctatcacatccaaatctagcaacgcgtatctacctacccaagattctgacgacgatgatgactactccggtttggacgacaatgatgaagaagaccccgagttagaagattcggaagaggatgaatttgaggaagatagagctcggactaagggtgttgccgtttgggccgatgatgacgaaggtgacgaggacgttagcgaagaggacgaagaggattacggtcgtcaagacgaagaatccaacggagaaggttatagcgaagatgaagaggagccggtcgagaaacagtcaaaaggaaaaggaaaggataaagaactggcaagtccggaagttctttctcgaatcgttcttgtaccaaaaggctaactgtcacgtttctctacattcatggtacgaatccaatggttggagtaggcccgattacaaaacggcaagtcgaattgttcgaatcggtgtatgctcaataagactaacatttatgctgaacggtctttcgatctatttttgcctctaatcagatctacgcacacttcccttagcgacacttcttaaagcaaaacagtctcttcctaaatccacaggtccggactctgacgaagaagatcaggctcaggcaaaagcggctagagtggccgaagcgcgagagaagttagcggtactcatgagagggaagaatggcggaaagaaccaaacggaggacaagactcaacaaaagaaagaacgtgagaggagagagaaagtgaagagagataacaagcacgcgttcgtcttttcccctcttctctgctggaatcccatcatgattcgagtatagcgactagataactttaccaaaattgaattgcatcaatgattcgtggatgtgtgtacgtgttcctggtattgaataaattcagtcctatggaaatgagttcgaaacgtcaagtctctcgacgaagagacgtcatcgagatcgagaaggtggtccgtcttgtcttatctctcctcccttcgcctgctctacccccttgtctttcctttttggagctccatttttgcttatttggattcttttctctcctcgataggaacgtcgagatcctaggttctcttctctctccggaacggtcgaccctcaccttcacaataaagcgtattcattccttcccgacctgctcactaacgaataccacgatcttcgaatgcaactaaagaccgctcagaaacgattatcttccgtcccccgagcagagcgtgcggcaaaggagagagagatcgaacagatcgagcttgagcttagcagagtccggactagaaaggagaaggacgagagagcaaagagagagagagacgctttgcagaattggaagaaggaagaacgagcgaaacgaggggaaggaaaaggagagtggcacttgaaagattgtcagttcaatttctcgttcatgattgttccctgctctctttttatcccgtccataaccacaaaaacaaactgaatgaatctcctcctttcttccttctttctttcctgatcctgttcgcgtttgtctctcgcttttgacgataaaaagccgagaagaagaggattcttgcggaagcgaaacactcggccctgcttgcccaaggtggtcagttcgccgtcaagaaggcaat

SEQ ID NO: 2138 - DNA, 7396 bp, Xanthophyllomyces dendrorhous
gatgtaagaaactatacagaatgactgaaaatccaatatatcacggaaaagagaacgagataggagacagaagagacacaagtttatatcaaaaacaaaaaaagaggaagattgttgtacatcgtacgaaacggatgagaaagaggagagagaaggatgatatgataaatttgaagagatgagatcggcaaccgtctgtgttacacggtgtcgaggggaatgaataatatgagaggatgcagaagagatatcggtcaagctagggtaaggaagagaaaattcatagaaagaagagtgaaaaagaacaaagacgaaaacgaagaggaacaagaacgtaagggagaatgtggaaataacaaagtggagagtgaagagacgtcggacgtcaagattcggagcaaacagttatgtaagaaccaaatcctgggaagatggaaacattaaaaagaaacgccctaggtaagaggcgatgagtcgaggttgtgagatcgaaacacgaagagctgagaaactgagaattagaccaccaggtgaggttgacccacacaaaaagaacagagccaggacaagagggatgacgaaaagaaaaaggcatgaggaaaagaaagggagagaacgttgaatgaatgaaagcaagccttggcgtttaaccgcctcctttcgcgctcaacaagagctcagccgcttcccgatcttcgattccctgcgtttgtttgtctttgatatcttctttggcggtggaaaggattggattcaggcctatacctgattgctccgctgcaggcgagtcaccggctggcaggctctccccgtcttcctctcctctcacgttgccgagatggcttttcggaattgcgccagcctccatcggtctggacgaaaatctgaggggactcgaggctcggggaatgctctgagcgatcacggcgtgatggatgattggggatggattgcctaggagtggagaggtcggttgaagtcccggggttacgtggccggcattgttgccgctactgctagcgttgttgttagggctgttgacagcagtagctgaagtgagaggagatgtgttgacagcagtagctgaagtgagaggagatgtgttgacagtggacatggcgccgagagggctgtatgtgttgccggtagatgaatgggccagcgtaggagagagcgggacttcgggtgaagatgatctaagccttttcggaccgtggccactagacggaagagtctcgtactcggctatcgaagatgtcgacgaagaagcatcaagagtgaccgaggacggataagtaggatgatcaatttctttcgctccttgagcaaggtaaggatacccactggtctctggcacataaacatccaccgaggccggagccgtcgatgacgacaatggcgaatagttaaaggcaggctcaagtggagaagacatgattggagatctgtacggatgatgcaagcttggaagaggcgacaaaggccgttgaatggtcgagtggggcacgagtggagatgtcatgggcgagagcgagttcggccttgtgtagctgggcgtgcccgccaatctcaatccgccaatctgtccatcaagtccagaatccgaagagagatatccactagtgggttgaccgtaagagtctctcccaacataccgttctcgtttcccatacgcattctccgagtccgagaacccgtcgttagccactctgtccgccacgggcgacgtcgccggggaatcacccacctcgggtgtcatatttctcggtgtgtagagcggaagtgagtttgtgcgcatcatgctcgtccctccgtggccgacgggtcggttacctggtctgccgccgttggcatccagaccaatcttgctccagaagtccaaccgaatcgtcttttcaggaaccctgtaccatttacctccactcaacacgtcggttgcttgttctctggtgataacgtctttctcccaatccggccgtcggccccggagtttctccacatcaacctttgtgccagatgccgggggtgtttccgctcggaagatatcaatgctttgagcagatggatggaaccgagatttatgtttggacggaggagccgatctcggccgaggagggggtcgaggaatgtgcgctctcggacgggaatgagaccgactggatgatgtttgagcctcgagagctatctgatgtggtcggcggggggcacgggattgacgttcaaaaccctcgggtatcgcgtggttgtatttgggggacgtctcgagctcggatgaagaagcatcggactcagacggcgcgccaggcccgggtgagtttcgaggtgtccccgcaggagtcgtgtctctcgatgcctgaaggtaaataagacggaaaggagagaaagtctcatctagtcaatattgggtgaaaggaagaatcgactgagatctgatcggtctgttcactcacgccaccgccctctttgttcctaggttttctaccgccaaaatgagaagtaggtcgagatttttcatgagtctgaacatatagtccacagctgtgatggtaaaagaggcaggcgaaatgagaacgtgactttgatagttgatgggaggaatagagcgatgaaagcttacgcgttgctaaaaggcagagacaatcggaagtatcacaacagacacaaaggaggtcagggcgttagagcacaaacgactgaggtttgtacttcaacccacttaccacagacgttctttatccaaaccggttcgccacaaggatgtatggttctgatagacatatggatggatggatggatggttcaaaagaaaaggacaaggaaaagaaggaaatttttcagtaaagagttaaagctagtcaaattttcagacaagccacgcttggacttgacagagcatcattcagaccaacctcgtcgacaccacaatttgctgtaggatttgatcggagttttaggaacaatcaacaagggacgcgatcgatggatgacggcaataccaataaaaacaacaacaacagaaaatgagatagacggaacgattttgtagctttcagcccacactaagacgccagaaggatggatacggccaagagaggaagtctatacacgaaccacatgttccgtgtgcgagctttcttttcatctttgaggacatttcttcttagatcagacgatctgagtgaacaggtgtagagagaaagaagatggagggtgaatcggtggaaagtcgggagatgggagaagggaagagagatggagatggtggaaaggctggataaagatcagatcgaaggaaggaagggagggaaagcgaaacgggagagataaatcggtaagacagatgtctaaggtgttgcctggatgtatgcgaatgaaggataaaagtgaggacgggtgaacacggaaacgatcgaatgtcaatcgggagatgtcagcaaataaggccaagaaagatgagaaatcgttcatagacgaaactgataagggcccttgattgattcgccctccgaggagatggccgagatcaagaagagcacaattgttagatggaaagtatcttacctttcagacagcttgatggctgattctgtgctttctctagatggaaagaagagagaaagagagaaacaggaaagagtggaggaagtgaacaggtgtgagacacgttccttgggtacgatttcccttcaggacagatcgacaggattgatgtgtctagggctctgcagattgaatcaagaatgagtcccaatctgttgaaggcgaacggatcgaacggctgatgccggcctggttgttcggtctgtgatatctatgagagatctgggactgaatcgatctatctgctgacgaaaagaaggggagaaacactgatgttgatgggatgattgttggtgtgagagatggtcgaatgggagggaacagagatggccaaagacgcgcgggtctccaggaaaaaatttaagcacgttagggttatgcatcaaactagtcagcctcactatgtgctcaagggtatatatgcacacatgcaatgatacacatctccagatacaaaagctcatacatatctcatatctacaacttgggtttaccctcctcctcagaaggcatatcattcagaccaccaacagggccaagaaactccattcgttccattcgtagtcgaacgcccttccattccatgatgcaccggatggacgtcaagagcgcgtatatctgtttcggcgtggccgaatggttctgggctcctttgaagtgaccctgtagatggatgaggagacaagaaaaagatagaaagatagaaagaaagagaaggagagagaaagaaaatcagaaaatagaagacagagaggcgagcacggcgtttagagcactacttttggtgcgcgacagacgattgactgagtgaaagaagaaacaactgacttttgtctgaggagggagatcggatgcgaaacagagagcgagacagagaagggaggagtccagaggatcttggagaactctggtatctgacaagacgggtgtgtactatagggacgtagaacatgaggacgacgtcaacttggaaaggaatgattacggcgaagactctgaagaggagaacttacaatcaacttgagagcactgtccaccagattagggtgaccccatctcaacgattcgaggactcggcctattccaccatgttcaataatattgcacgatcgctatcaaaatgggatctctaatagagtacacactcttgatgccaacggttcgagagctgagctcacctgcaactttcccatagatgttattgaaaagaattctgcctctggacaccggctcgagaggctgttggttgagagcgttagtgaccggatggggggccagcccatactcccccaacggttcgaaggcagtggggaacgggtgagccgcctcgattcgttcgaccagcggccagatatctgggtggtttttggacagatgggttgagagcgcggtgagtgaggatatggtgagtggaaatccaaccaacgggaaggacttttgtaggtccaaatacaagatggaacaaaatctagttggtcaagcagcgcatatacctatgtacggtctcgagagaaaacgttacctttaacagtgcttccctcgttcgtacggcgaccagtaatttaccaaacatccgtttgtctttgacatcttgaccagctaacgcaacccaatcgggaattttctcttgattaccaacctcgatggctttatcaacaccaacctccaggtggtcacaagcgtcatcgaacagagcaaggatgagctctggttcattcaagctggatagtactgctccgagaaggggaacgaatagagagcgaggggagcacacatccgaatagagtgttctaagatgcgctaacagcgctgggggaaagggacccgaagactgcgacatatgaataaaccgaaagtagcagagatagtttgtatgaaggaaagcgatagggtggtatgaagagggagattagtcgaagcgagtcaatatacagactaaatgacgagtgatgccgtctccacgactggggcgcgaaagtgagcgagtcagaagccggccggatggggacgagcggcaccaggcaattagggaccaggcactatcatatcttgacttcagtctgaggtcaagccgaagcgaggctagagaggcatcccagacgcacagtcgttcactatcttcaggcccgcagtgcgcagtcaaaatgctgttcctgtcccttcggaggctgatccctgccggttggctcctgcccagcctgctgctgcttaattctcccgtcagcgtcgtttcggataaaacatcatcgatcttctcataaaccggatcgtttttattttctttccttctacttcatccttcatccacatccacacatccacttcatatccacatccatccacatcatggaaaagacaccagagggctacttgcccatccctacctcggctgctccgccgtcgtacactcctcagcagccttcatccaagctctcaaagacaaagaagctcgctatccttgcctcggtttcaggaggtttgttctacctcgcgtccaaatgtggcggaggtcacggctttcccgatctctgggatggtgacttcaagaaaggttgggagatcgtcaagcacaagggtgcgaagcaccactgggaggagcaggcttgggagtgggattcctccaaggagcgaggtcacaacagggttcgttctatgccgatgcgttatttctgaccaacctgtccattcactcacacatgtctcgtaatttttcttctcctcttccttacctgacattgactttatcatccacaacacagattcaccatgagaagcttggtacctctgctttgaaactctctgagcctatcaacgatgaattccgccctaatgcgactgtctccctgactgcggccgagtccttctggttgaacttggagtatgtcgctccatctttatcgcgcggcccagtccgttctaactctgttattggttccacttctgttgtatcgtttgttaacaattttgtgcatatgattggtttcctattgtttttcctttttgtgtcactaaccagggatggcgttcaggccgagctccaattcgtcccatccaagggggacgccgtttctttctatgttgagcaggtcttgcaaagctctcaggtcgacgagtccactcttgcatcatacgatgcgttaaaagtcgtcgacgatagcaagaatcctgagaaggccgggttgatcatcgtcagtctatcgtttcccacttggtttgatgtcttcgtcggcactgaacaagatttgttcaattggtttattgacgccgttctacttcgatcccttatttcacctggtacagtcccgaggccagaatgctcagtcttcgccgtcttacatcatctcgatctcccttcctgtgaccggaaagcccttttcgttccacgccgacggaaactccctcgctgttcctgcagccaacttgaagggaattaagttcgatgctttctccctcaccgctggtgtaaccgacaaggtcgagctcaacgaccttcatgccagggaggctactgtggacttgtcctttggagccattgttggttccttcaacgtctcccgagagcttattctcaggactgttgccggagccattcaagccaatgtcaccctctttgagatccctcaccaccaccaccaccacaaacatggaaagcagaacggtactgaatctggtaagtgttttcctcggccagtcgctgtttgatatgttgttgagtattttcctcttttggtgttttccgatctctagaagagttcccttctccccctaaggatggtgagaggcccccgcatcaccc

SEQ ID NO: 2139 - DNA, 16075 bp, Xanthophyllomyces dendrorhous
tcctttcgtcgtcaacgtcgtgaccaccactggcgtcggagcgatcgatcttcagtacgttggtgacatcccttccaatcacactagcctcttgagcaagagtgttgccaggatcggtgaggtgcgagtttctgctcctactggctacaaggggaagtttgttgagggttccaggatcggtgaggtttctgtcggcttcgttcccggagtgaacgtcacgattgagaaggaggtccaccacggacctggaggattcatcaagggtttcgttggtgaccacccttctccccatcacaagcactgccccgaccacccgaagcaccctaagcacccaaagggtgacaagcctgagaagaaggaggccggacatcctcatggacgacctgaggatgagagctacggggccgagaagaggcatcaccacttgcacaagatgcatggcgacgatgatgatgatgatgaggaggacaagcatcgagtccataagcaccaccaccatcacgaggacgacgatgaggaggttcatgatcataaacacaacgatgagaagaagcccaagaagggtcccaagaagcccaaggatcctaagggtcctaagaaggatcaccgaggtcctccccaccctcctcctggttacggctttgtcggcgccttcactggaaccggcaagaccgaggttttctttgcttaattggaaaaaacaaacaaacaatcaaaactctttgtgttgttcctcttttctaggtcgaccttgatttgatcttttctttctttctcttatctattcgatgaccttgcttttctcccttttcctttccattccatccaccggaccgctctcggctctctttcgagtcattctatcggcttgtctgtttgttttcttgttcttttcagaagccaaagaaggaaataatgtgcacctatcctgtttgatttccgctcgcctctccttgcttcaagacggcaacgaaaaaactctttctccttcttacttctctgctatgtattttctttttagctttatgtcggtttaactctacttatttatcatttctgccctgatcttccttttcctttctttccttatatgtagtaaccttttttcttctccccttttatcttatacgtccctttattcacaaactattacttctcttcattttatacgttctcatctacccatttgttttcgtttttaggcctagcaaacacctatatgcaaaggtccttttcgtttcctaattaagaaaaaaaaagaaaagagtggatgcattgctgtggagtctgtcaaccgacttcagagcctttaacgtccatcgagaattccaaagattcattttatgttttgaaatagaacagaaaaattaaagaagagacgtccgtaatgcaatcggctggatcagaagccacaaaggagaaagaaaaggtgataacaatggaaagtagactacaacgacgaggtgatgacaattagaaaagagcgagagcagaagatacgaaaactatgccacgtcatacttaagcggctgtttcagagttcagcgcagtgaagaagttgaaaaaatcgacctgagaggcattgatacccgatcggtagaggtgatgggaagcaatataggccgagtagagcgctctgcagtactcgtcaggtagccgctggagcaacgtgtcgagtccgactttgtcgaccaaagtcttggggatggcctttcggaagacgtttcgtctactcgtctcaagattgtacagaccatggctttcttcaagctcgacttgaagagcattcaatgtgcttgaaagttcatcgctgagcaacgttcgaggaacggttgatttctttatatgaccaagagaatgagaaaggtggttcatcagccggatttatgaattcatacagaacaagttggagcctcatacgtacgcgtcgcttgtactcgtcctgaatacacgcgtgctcaagtcggccgttctcacagatcatatcttggatctgaaaagaggagaagacacagcacagaccgtcagtcaaggttctataatataggccgaaacgcaactaaaaaactcacgtctttgacgtagctcttatagaaatcggattttccgttcttgcaaagcatgagctccaagctgttgataaagaaaaataacaaaggataagcaaactggcaatagagcagagaagataacgagaaggcagtacttactattcctcgtcagaaagtcccaaaccagctaacacctcgagggaagaagatgtaacaccaccctaagaatacaaaaacaagcattagctccgaagcgtttaaacaattagtatgttcaggaagaaaaaaactaaccttattagcggaagaatctttatacaatacgactcctttcttctcgaggtgcagtcgggcttgctgagtgaagaacaggttggctccctcgacaacagccttgaagtggggcttgccatccgcatcgaagagcttggatacgttagtgacgctgtatgagagaagaatgttcatctatcagtcccacaggtcttgcagagacataacaagagagaagcactgacttaacagactcaggctaagaggaaggtaaatatttcgtcagtctagattctgaatgatcggaagggaagataagataagatatccgacttactcgtcctccgcaaggcacaaagatatcagccttgaatcgaaggtgagcgccattccggaatgtggtaccatcggccactttctctccagagggaaggacaacatcggtatcgtcgattaaaatcttgtatccctcgggacccaaaagatcgctgttgaagttctcgacgggaattcgagccttagcaagtcgaataagctcactgtagacaatgcggattgatttgtgatcagtactagacaggcgcatcggacaaggaaaaggcaaaaaggtcacaaacgttcggtttaaaccggaaggatcatggatgacaccagatccatcaataatggcgatcgtcttgtcattcgacagaagaatctcgttagaacccaagtcaccgtcaggtcctccagtttggaactaagcgagcagatagtaacagaacgacaataagactctcaactttcatcttgaggcgaaggtgcgcctacttgccttagtgacgtctttctctttccatcctagagtagcatagacaccaaggatgtactgtcgaacagacagagaggtctacagagaaaaaaaatccgacagtcacatctcagtaatagatatcaaatacttaacacaagcggagactagaggaacttaccattccgtactcatcatgaggaataccaccgaatgcctcaggtcctttaccagtagtgaaagacttccagaacgaggcccctcgggatcgggcgtgtccagcggcccagtccatcatatcggccgttccctcatcgggtccaaagaagagaatctcgggcttgccgtaaaggtcgacgatggggcccttgattcctggagtctttccagggagcaacaggtcgagaatggcatcaacatagtgctcgaaacagactcgagggttggctcccaaggaaggcaggatggttcctttggctcctccctcagggatgtccttgttcttaagatgttgtgtcgaagcaagtccatagtctggtttggaggaaaaaagggttcagttattgcgagttaaagataacaagactgcggaactcactctcatcaaagagacttcgagcattgatagagtactgctctcggcctcgggatcgaacgatacgaatacctcctcgggaaacatctcggaatcgaacatgctacaacaaacgatgcagataacggagaatgagcagtcttcaaaccgatcaaagtgcggaccaccggcaacttacgaaacccctgaagtcggatccaacaaccaagatgataccgaaaggagtcttggggtactcgaccttaggaaggaaagcggggtccaacctgaaactcagagccaccttggtggtctggtaaaagttagctgtacatgccggagagatggtttacttcttgtcagtcggtatggtcaatgcaccaggtggtacgtcaacatatagactcactcttaaggacgtgtttattgaagatcaagaaactatccgaatgccaataggacgtatcagaattgctcatctgaagggctggtaagtagagaacacttacgcctcgatgacctggatgtcgtgcgagttggtcaaagtctttcgaatcttgttgtagagttcctcatcggtcagaggtcgctcggtcttcaacctctgataactcagagtaggcctaagaaaacacgtgtcagccaaagcctcagtcaagacgagataatgattttaaactcacatgagagacgagttctcatcaacttcgggataatgcgtcatggcaaagttaatgtacaacaatcggatctgaagatcgtcaagatagaacaaatcaataggaatcgccaattctcaaatatcgagatgaacatgtccgacttacgagctgagggttggttgagatcacgtccttgatggactctcgagtgaaagtttcttctcggaaccgagtcttgatgttattcagactgtatgaagaaagcgtaaaaaatcaggatacatcagtagctatgcgatatcgcttttcaaagagtcacttacacttcagcgtggacagggttgctctcatccaaaattgacttaagagatatatagctaaggtagacataagcgaaaagaacacagtgagccggatgaactttgagaaataataccaggagaggagacgaccgacctgttacccaatcggttgcagaaatgctgagcgaagatccatccagcgtaagcataggaagcctcttgaacggcatgcccactctgttcggatcctccgaagaaagggttatcagggagagagtagagcagtgaagtctccttgataacttggtggatagaatgctcgataggaggggcatttgaattgggcacgtttcgaaggtagaggccttttacgattgtaaaaaaaagtaccgcatgagcgtgaggttgttcggttcgaccagagacgcaatattggacagatacgcacagattacagtgacaccgttgctgaactgctcgacatacttcctggttgagctgtttatttaaagtgggaagatcaatcaaaatatacacagacagcttatgagaagattgaaggaggcttacaagagaccgtagaagtgataaagatctgaaagcgcgctatggaagttgttggtacctcccatctatggcgagaaggaagaagaggagcaagacgataaaattagcctacgaataaccaagctaatggataagaaaatgacagataatcaaaccttggcaccgatgacaacccgcatctctccagtgccctcaacatcgtagacctcgataacgggagcaaaacctcgcttctcgacctcaaagattacgctctcgtagatctccttggtatttcccgaggccttctctaagaaagccggatctgagatctgatcgatcgttcgcttcttggtatactcaacatgctcctgaggcgagagatctgttggggggttgtaggccgggagattcgaccgagagacaaagtagcatcggacggattgcgttgttgatgcagagactgagccggaagatcgatatgtttccaatcgataggccttgtctattgttgatgaattaagatagagctcatcgattctagtttgcaacaaatttcgaaaaatagataaaacgagataaaataaaatcaacaaagatagacaacagataaggtgtgagtgatcggtacataatcattggaaagacactcagaagacaggaagggctgatttacctcttctccacagttgctccaggaccggaagtactggtaaccccggcttcagaggtgtgaatgaagatggcgcctaagagagaattagacgataaacatacaaccaacccatataagcgcccaaatcttcttgcatgcgatggagggaagtctaagtcaaaagatcatgcaaacttgccttccttttttccttcttcttcaggctggattcgttcgagatcaatctcgagcttggcagccgagtgctttgtgtaggccagaatctttgctccgtacagggccataatatgttcggcgatgagtgccggggtttcgttcatgaagtaggtgtcatcgatccccaagttcctaatgagatcaaagcatatcccaggtaaatacgttgtcaagactacgtcttgatgtgatgtactttattctcaaaaagagaacatgtatatggatcagaacatacaggtagaaccagttgacctcattcttgacgagatcagcaggaaggaatccttggctggcgacgaccttttccacctcgacctgctgggcggccttgccagcgtagacagagtccttgtaaccgacggtatcttttcgaattctgccagcatcaagagggaagtaaaaacatatgcgctaagtggttgaaacccataggaaaggagaaaaacgggcaccaggaacaggtcgagtacgagacagatagatgcatacctgtggatgttatcgctcgatggcgttctggacgccgcggtgaagtctccgaggacttgcctcacgttgagatgagcagcagacatagtgtggagagagagagtgcggaaggagagtttgtgtaaagggagagatgcctaattgaaggaggtggcgatatcgatggtgggtgatcaggaaagaagaagaagaacagaagaaagagagatagaactcagcccaagctcaacgaaaggaaccaagaagcagcccaagggcaaagtgatgtgtgcgctcaaagcgtgaaagacaaacaaggcacgaggcaccagacgagaggttcgcgcaaaagtcaaagggggccccttgcgcgtaaaagagttgggcgagcccatttcggtcgctcaacccagtcccaggcagaacgacgatactcaatcaatctctgcctctcgttgttgtttggttttattttaataatatactctgtccattcagactcgggattaagcaatatcatattgggtttgggcaccaatgcatgcgctatgtatttacacacacacacacatacacgcacttacactcgaccggccgacaaggcatgatctgctgcatagtgaatgatgatgacaaaaaggctcggaagttgtgtatgcgtaccgtataagttatcgacgatgagtcaggtgcttgcttatgtttgctctttttagttggttgatatcaatattatggtatcaagggaaatggacaagagagtaagaggatagatttgtgttcggagggatacaagttcaaacgggttatacgatatggagtgggtaagcgatcgcggaaataggacaagagagaagcaaaagcaacaagaacatgttccttatataggcagacactctcttcgaccacaaggtttgtcactttgagcagtcttcaccggtttgcacatcacataaggtcatgctcccagtaaagatatttagagaaagagcaggaggtgatgatggcaaatacgagtgagaccgacgtgttgttaggtcattcaaagcatttcttggttgcttgcttgtatgtttcgttccttatttttttcgatatttcgaatagagtcaacagtgggaaataaatcattggggtgtgaccatgggtgagatgactatgactaggtgagtgagtgtgcttgtgtgaccatggcgcgggaaaacccccacaggctcatcggatttagccgcttctactctgtcgcatctccttctttgactcggctctacctggcacctctgagtggtcgacgacaaagacatcattctacttctgttctgtttttttatttctctaaaaagggccacggctcatacacagttgactatactgttcactctaccccttcttgcgcttacgacgttcctcaattcgagacatctcctctttgccgtagtctaccatcaatgctactttcttgcatgcccccaagttggcaagtctctgtaggaagagaaagagagaggggacggatcaatataaataagagtgcagactcggaaacaaaacactcacatcagccgcctcgttcccatcttctccagaatgacctttgacccatctgaatctgaccgcgccctgtctgagtccccatccgcgttcatatctgaccccttcttcctcatccgtctcggcatcgatttcgacctctggtttgacaaatggatcgcgtcgactgcatcgttcgaccacctctgcaaacgccccgactgtcagctcggactctggccgtcgtcgctgccgtctggccaagagaagtctctcgatatgaataatcagatccaagttcttgacctgttcatcggacgccgttcgaaactctcgtcttcgccaattcggtaaccatgtggtgagcgcgtcgatcgagtatttagaatctgttcgaatttctaggggcgagtccggcccaggcgcgctttcgagagcgagtagaatcgagagtagttctccgcggttatttgtctgttccggtcccggaacgcgtcgagagatgtttctattaagaagagtgtgcgcatgaaggaaaagggcagaatagcgatattagcgcgggtatacagggaaaaccaggaataaaactattacgtacagatcagtgttggagctccagaacactccagatccagcgaaagctcctcgctgaccatttttgaccgcgctaccgtccgtgtataccactactctcccactcgggagtcttctgaacccatcatctccctgaacgatcggaagcttcatctgttgtctagacgataaattggcagtcttctggttgataatcttcgcgttcatacctgattctgtgttcgatcgtttgcttgcaggtaaagatacgtcctccatcaacgaatggtctcgtttcgttccggttgccacaggcagtgaggcaatggtaccatcagcagcagcatcatgagctccagagattacgaacgcattcgcctccgatcgtgagtcaagctttctatagatagcctcagagaatcctttggcctgtttcaaacactcagccctagatgtgtaaaggtcagagaagaggaaaaagagattccttgtagtcaataatttttgtcttcgagccaaagtaatatcagagtcaagaccaaacgaagtagagactaaactagaacggaccatgtgctgtatacacctggttgatgccccctttgaacggcatagaatgcttcagaagaaacaccaataccagttctggctttctttgggagggcaggaacgggggctggatctgtcgagattcttacctctatcagtcctacgaacctttctgcctctattcgtgtagcaaattttttgaaggcaggattgggataccgatcggtctggtttttgcattcatcccttttgtggctcgttcgaattagaagaagaaagagctcgatcagccaccaatgttttcctctcatcaacaacctggatattgaagctcaaaggtgttaaccctaacagaccactcaccaggtgaggtatataccaggaatccgtcctctccttacagcatagtatcctcccttggccctaagagaaaggaggaagttgaatgctaagtgagaagaacagtcttgaagtttgacaagcttacaacgggcaagatgacaatttcgaatcgaagaacttacatggtggtcgttcaatgattgtctgatggaaagaaacttgatgcgtcttaaaaacatagcgcatctctcaacgttcatctattccttcgttttctccttagtattcaagtcttttctcacactctctggcttcttcgtgttcaaaatgatatgaccacaacttgagttcacaatttgatggttaagatgtgccatacaaacccaaactagagaaagatgcctaacaatcatgtagaaatcaaatcgtatccgacttcttacatcagtcactcgtccttcttgaccttctttttcttcttcttcttctcttcaccgccaagttctggctctccagctgatgccaccgcagcttttctctttttgctgttcgccgtctcagtctcgccgtcggcctcagcctcgcccgccgtgctgtccatcacggctacctgatcttcatctccaaccgttactaaggccgaaggagaaacctcaggctggagagccaattcggttccgtaaccagaaggcttgtttcggaacttcaacttctcggtaggttgaaccctaggaggaaccacccgaggagtatacaatgtggatggaccgacagaggccggttgaatcgtggtagagtggtgagacgttgtgattagggatgacgaggccagaggagcgagcactaaagatttcttgatgggtctaggtgctagaggtgatccgaaagagtgaaaaaggcagagaagagaagcgaatgagactgaagatcagcgagttgcacaaaaaggcctatagcaaatgtgcattcataacaaagaagccccacgtacccacgacatatgcttccttgcttttactaggaagaagaacctttagactagcgagttcttcagcggtccctcctagcgcactagcaccttgcaccacataatcggccgtcttggtactcaacgatccggtaggttccttgttgaccgacgaggaaaggttaatcgtcaacccagacaaatggcgagacttgatctaacaacattacgagcaaaccgggtttgaaaaatagagaacgaaagaacaaggagacttggttaacagttgaaaaacgcagaggactaaaccgaatgatacgaacagagtcagggattcggatagcccaaagttcgagattcggattcgctagtagtcgatcataatcgaactgagacgaagcttccgagatcttgacaggtcgcatctttcgtggaggcgcgtagtttctgagcaaatagagaatacaatgggcaggacgagagcatgatataggacaggagtagaaccgcagacgatgaatatatagatacaaagggtgggtagtcagcgttgtagaatcgtattagtgagattatctagctctgttcggagatgacatcctgattcattcaagaatcaagcaattaaataaaaacaagcttgacagactcacagagcgtttgtagtacccagtctcctatctggtccactggcaatctcgtcctcgctcatagaatcatccgaaccagaatcgtctgatccgggcgcggccttgcctttgccctttttatcacctttggatgaagcagcagccgaagacatcgacttagtaggcctctcgtcgatctttgaggaagaatccgagtcggaggaactgtcagacatagtgagagggaggcaaagaattgaagctcgatggtgattgatgtatagaagttggccgaaaggagtcgaggcaaaaaatcaatccacgaaccaccgtaacctcacaagtgtaactatgtcatacctgtaaccgactgtgcctcaaccggccatgtcgaccataaaccccatctctcaccttcactctctacacacacactcagagaaaccaccatagcatatacccaccggttttctaaatccaaacaggtctttctcaatatctataggtgcatccgtcatctgagtcttatcagacaactatgtttgcggaagaagatgaaaacccgttcgccaatgcggtctctcctttcggcacctcatccgtctttcaacctacttcactagccataccgaatgatattgcaaccacttcctcggcaacagccatcctctcgtctgtcaactacggccctcctctcgatacacctatcctgagtcctacagaggagcgcgtgaatccttatgtccaagctattcaatacgccaaagaggatgatgcactcgggaatacttctgtaccttctatgaacgacccaccatctggccgagccgttgaggatcctatggacggaacgcatgggacagtgtttggagatgcaagtggctcaggcggaggatttcaggtcgctcctccttcagagtccttcaaattccttgatctgaatctcaagatggaaggatccgctcaagaaacgatccttcctactcaggatgaaagataccaacatacaccgtcctctcagccccctaccttctccgtagatccttatgataactctcaggacccttactccttatttggttcttcctcatctccatatacatctacatctgctgtctcatctgaatttgctattgcgccccctctctcttcacttccggcttctcctttggcgccgaaacacatgcggaaggattcattcgatccgcttgcggcaatcctaggagaatcggaagaggttaagatgaagtccgcattcaaaaggagctcaaacacgacgagttcaccttctcgctctacatcattgaagaagaaggaaactcttatagtcaagaaagaggttgaggatgaggacgacccgtttgcatcactcatcaaaaacaagaagcgcaattcaaaaccttccggctcaaagcccaattctgctcccagtaacactgtatcttccgctgctcctttgcctcggcctgtacctaataaagctcctaagatctcttccttgatacccgccgatgatgatacctctccgaagccctcttccagttctattcaaacacacagtacagaggcacttagcggaaaagaagattccggcttgacgcctaaagctacaacgaccgagttgccaatctcttcatcttccattaacctctccgaagtatctacactcactaaagaagactccttgttggctgtcatcccagcagagattgcccttccagaatctcgagcatcaactcctcctccacatgaaccaatcatcgctccttctcctccgattgcttctcagttcaatcacgaacctgcgatggcttctcctcttcagccggcatacccatcaaccttccaattagttcactcttccaattcttcagcctcatcttcctcttcacacagtacctatacccccacaccacctcatattgaacgatcgctctcgagcataacgctgcctccgccgggaatgaccgatccgaacccagatagagggtggtcaaaagatgaagactctacatctgacgcttggggcgatgggactgtgaatcaagttaataatggaccagagtcttatgaggagaacagaaaggtaagaagggaggctagcaacgtagctcttaggggaacaggagacaacggaagtttctttagtggaatggagagggacgatgaagaagaggtttgtctatcaaacatcttgattatcatctatccagacagttccttcatgtacatggcccttgctccagcgctcatcaagtttgccatttcattgtgattgatttcctttcttcctaccatccaatagactgaaaccaatcaatccggggaagacgttaccttcacttcgacccttctaactgacgacacacaggacactgcatctgcgacatcatttagagagtcggcagccaaggcggtcaaaatcatggacatcaaagttggggatcctactaagaaaggaattggggctgcaggccatatagtttataccgttactactcgggtgaggcaacaggctttatcgtctcttcacaatcgctacttgaaggagttcagtttttgatcgttcaacctcttatcctcattcttctcagcatctgataagaggaggagagacttctgtcctccgtcgattctcagattttttgtggttgtttggcgcattgcagaataacaacccaggagtagtagtccctcctgtcccagataagcatccctttggtaagctcagtcctttgtctagcatcttctattagattcatggcagacagagtggtagcttacgttatgtctgctggtcaacatcgtcattctcacgttaaaattcgaatcgacatgataggccggtttgccgaagaattcgttgaaacaagacgaaatgcattggaaaaatgtatacaaaagatggcaaaccacccagttctgcaactcgacgcagacttcaggacctttttagaaagtgattccctaacgcatcacgtatgtaatttctttgtgactcatatgcttgatatatactatcgaccagtctaagcatatctgttagtttcgttacatgtatatgtggtctaacatagctttttctgatgatttcataggtgaagagcaagaaagccgaacaggtcacagagcagaagggatatctcgcgaccctgacgagtggtttggctggtcccaaatttcatgagagagatgaggtagtttctttgtctttaatcacctatgaggtgtacatctgaaggcaaaagagggactgacatcaaatccttacgtttcttctcctctcttccttcttcagtggtttgatgataagaagtctgttctggagacgttggagtctcagctaaaagcactggttaaatccatcgagcttgtttcaaagcaacgattaggttcgtacgaaattcttgccttcgaataaccacaatcaagcagctgacttatctgttgtctatacggattaaccagacatggcgaccgctgtctcagagtttgcagataccgtttcgggtttggccgtttgcgatttgagccagcagctgtcccatgctttggaaaggtttgcggatattggaaggagagtccgagatcttcaagaagagaacgccaaaggagatgtcgtaaccttcatgacgacttgtaagtcttcattaatatatgatcaaggaaataggatgcctcgatgaacatagtcttacgtatctgtcgagttcatttcttgataaatacagcggatgaatacattcgactgatcgcttctgtccgagtaagtctattcgctatctataccatagagtccatttagttgatgccatttccaatctatcaagcttgcgttcgcctctcgtatcaaactttactttcatcatcaaaacttggagagtgaacttcggcgacttcgatcggcatttgagaaagctcgtcgggctggaaaggcgtatgagcgagggcctgaggcacagggtctggccgaggtcagtggctttgttttcacttatatattctgatttgtttcctcttcgaaatcggacaacctagacttttctcattctatcattttgatattctcttgatgaacgcatgtgtttcgttccaggccgagcgacgcgctaaagaggctgaagcagagttcaactcggtctctagactcgtcaaagttgagtatggtagattcgagaatgagagaatagaagatttcaagaaggcactcgaaggtctggtcgaaggaatgatctcaaggcagaagctagtatgtggttgatatctgttgctttcgagaaattgatatattttcatgttgaccacttcactattcttatttcttgacgtagctcattgccgcttgggaagatttccatcgatccctacttcgacttgtccaacagaatatcccttctacaccctcccaccctcgatcagacagtcaggtattcatcgaaactcacccatcgtccacatccacgaacatatccagcgatgacgccccccctgagtcatccatgacggcagtttcttcattagtcttatcggaagaggaagcaccagtgtttaaaccagataacttaggcccggtgactctgccaacagaacccgagaacgcatgggcttgataacaccacttcttaatgatctcttcgccatatggtgaactgtctcgtgattttcgttctctttccatgcaattaacgaagaacggtcgaaattatcttctttttatgtcaatgctcgtgttagtagaaaaactaattatggatacaaatagtagatactgggaatctcatccgtggtatgtccatccgaactatatacacgaacgcagttgtctatgagatttacaagccagagtggaatggaggaaggagagaagaagaacgcatagaaaagtaaggaaatagaggaaagttttttttttttttttttt

SEQ ID NO: 2140 - DNA, 25731 bp, Xanthophyllomyces dendrorhous
ttttttttttttttttttattgagaaaaaaggaataagtagatgcagaaaaacttcggtagtagtaaccccagcatcagcgcatggccgcttgtacacaagcacttcgggcttcttcaatctcagaaacccattcgatcgcttctttactggatctaaacaaatacaacaaaccacaatgagccaaaaaaattatgtagaacgggaccatactagtagatgaagacataggcacttacgatgcgcgaagaaccaatcgatttcctcgatatctcggaatgatttcaaacttattactggaagatgcttcttccgagacaagaacatcttgaagcggaatgggctggcgtagatcgttgtcgatacagagaagagataatacaggaagcaaacttgtcagtcaaatatgagtgagaatcatttgagggcatctaaagagcacaaaccatttggtagagggttttagcaggctctgatagtacctgttatatatgaacaatatctaatgagtatctgcatgtgtacatacttaaaattgtcaatacgcgatgctaaccagtatgaggctgcaagacagcaagttgggtacacatttgatcaacaccaagaaactcgattcagcacctggatggggcaatctacgacttactcattggtaagtataaccgtgaaaagtttcttgctgccctttccctatacgaacaaacctcgacagatgagtacagagatatcaatcagagtgatgacaaggtgcattgtgtaccttggtgagtgttccttctttcagaagttttctagggccaaggaatcgagtaggagccgaaagctcaagtgatcacaggacataatagtccataaaaattagcaggacgaaagaggagagaaagggtctgaaaaacggaaaactcacatccaacctcccgtttccaacccacaaatcggctgataatgcagccaatctgtcattaccttccttcagccggatgttttcatttatgcgcatcagaatcttctcggcttggtaaatagttgttctagaagacccatttgtcgatcacgtgtcagaacgtgcccaaaaccacgatcaagaaacgcgcggcgacctactctagttttgtatagtcctcgcccggctcagtgtaatggagaatctgttttaaaagtagagggtactgcacaagtgtaatagagtatacatatgtagcacatcagcattgaaaacttcgaattgttcatgttgatagacacatgcataccctagtgatacgttgcactatgcgtggtcagaccgaagattaacacccagacaacaatacattagctacacgaggttcaagaactactggtagaaaaaaatcgtaaggctttacttggtatcagtaagaagctcgagaggtccaagcctcggagagctggttcatttgtccgaagagactgcaagatttcctcaagctttaagtttttacgacgcagagattgaaggatgctcgctgctgtagattggttgacacagtagggaacgtaaacatcgacgttgggaatatggctaaaaagaggccatatataggagaaggaggaatagcgttgagaatgatgagacgcgtccagaaaattaccattaaacaaaaatattgacttacttgatgagaatatcggcgatggatgtcaggtacatccgggactctctctggctctcctctagcattgttaaaatatcggaaggtgtccacttagttaacatatacacacatatgtaccatcttgcagaacaagaattcggacagacaaaacaaacctagttcactgtgcattgtggttgacatcatcaaaatatcttcaatgtttgcaaatatcactagtaactccttgtcatctaggatgctcatcaaagctgcataaaagacctgtttggcccaaagaatacccatttcaagatcgaagggatcagtatagacgcacttcgccttgaaaaagagaacaagtcttactccaacgataagttgacaatcccgaacgtaagcagactctgtcgctataaattcgaacatctgaaggaagaaagaaaaggatgatggtcaatgattcaatcttataattcagtcttccgtttctctatcacaacgatatcagcagaaaataccatcgaaactcacagcctcctgtcgttttctctcctggtcagagagcgtcttcaggagcccggaatctgacactctgatgccatatagataaacatatgccgggtcagtgagagcaaaaaaatctcagaatagcgaagttgagaagacttgcaagctagaccaattctgcttacacccgaagacatcaagaaaaaccatctgagatcagttctgtccatttctttgcgttgagtgaaaggagtttggagagacagtgcgaacattacaaggagcttgagttgatgttcgtgacattgagctagctggagaagagattgatccaactgatatcttcttcggtgcatgggcctctaggaacccagaacctgaactagatgtaaccgaagcaaacttgttcataaactgactaagcctcttatcagctcgagctccaaacgtcgacgaggtaactagcgaaggcgcgcctgccaaaggtgtggattgcggaggtgtgatagggcctgaagtatcaggaagagagaaagaatctcgtttgtcaatgcttatcgaggatggtcgttgggcctgttgttctaggaaggcctgatatttgtcgtacgcatcaaagatctctgtaccaggggaaggagatctagatatgattgaaggggcagctagagaagaagtagttgaagtcaccgagatagaacgctttcttgttccttcctgtcctaaatcactcgactttagcttacgagacgtcggcactgagggggctggtcgacgaggcttgctcaaagggtcgttagggtcgtgaggcttaataataagcccggccatctcgaccaccctaagcctttcaatctctcggtttcgagcctcctcttcaccgttttcttctgtttcatcatcatcttcagaaccatgatcgtcttctgccgtagcgggagaaaccactctcggactagaagaaggacgtctgtccaaaggtggaggtggagtgggaacagaacgtctattcaaaggctttacttgttcataaagttctgaattagggggagatattatcgttgtaggaatatcagcgtcttcggataagacaagagtagctgacgtgtgttccggcagagcaaatgatgcgtcagttgcttatcatgtgcaggaagaaagatagccagacatgatcagtgaaaggcgcgagaggaggatatgaaagtgatatgcgtatcatccggagcaacgaagaatttgagattgtcatggtagagaagagcgtagataaatgaaagaagaaagcaaaagagaaataacatgatttcagcctgtgtgcgccatagcgaaaaaaccagaaaagacaataaagaggggggtgtaaacagaaaagtcacgcaatgtttcaagagacagaattaacgtccagaaagatacgaaaagaagaagagaagacaaacagaacgaaaacgagaaaggattttgcagttttttttccgataaaagaatgactaaccgataagctccaagtaagacgcaggaacaaggaagcagactccatcgatcacagccttccaccaggactcatcagaccggtcgacaatggtgatcgtatcaccctctatgaatggaagctcctcatcagttgttccagtatacgtataaagcgctttggcttggacaactatcaagaggcgatttaatgagacaacaggatcagcggttgataaaaaccttctccgaaaaatcaaggacacttaccctccaaaacttcggacacgtatgaagcagggaaccatccggactttcgctctttaagagtagttccgtacatccacgggctttctgggtcagtcgccgggtgggcgtcaatcatcagattctcagtgaaagctaatggtaaggaatataaaagaacaatcagcactgaagggtcacaaatgcagataggaaactcgaaacatacaaagatcttcaggtctctggccttcgtaggaaaacaacgtccggaccttcaaggaccttgacaaattgactccgtctaaagggtcaactaccacctttgatccttcttcttcgacttcttcgtcctcctccacaggagcagcaagcttaggcagctctgaggcatgctgctggacgcccccgttggctgctagaccttggtaccaatctacgctctctctgttcgcgtttcgttccctcacctcctctactctctcttcttgaggcacgggaggggatactgctcgtggaacatcactgatatgagccggaggagccgcatcaccgatcactcgacctgtcacggctgcactggacgtatccttcgtcaccgtcttcttgagtttggctcccccttgaatagaggcgaagagtcccccccgagaggctggatcagcagaccctccacctagcgcagagagaagggagttggatctagatggctgtgtttctgttgaagcgacgggcgagtcggctgatctaggaactggagaggcagaggaagacgtaggaggcataattcctccgaataacgctctagccaactcggctttgcgtttcttagcggtatcatagtcatcggagctatctgaatcgttgtctttgtcctcaataacatcccaatcttcgtctggaggagtgataaactgcttagcaggaggtcgagcaataggggcagcgacggttgcggccgaggatttaatcaccggcggaggagcaggcgaagtggactcgattggagcaggagacgcgtctttcttgaaaaaagggttgaaggagctcgtcttggggacggagacaggaggagtgattgaatcagtcggcgaagtaacagtcccgccagttaatcgatggaaagggttatgagaaccacccgttccggtaccagcagcctcagctacatctgatacgggagcaactggaccagacgcaggcgagacagccttcttcgcacttccggccttcttcctagcctcaaactcttcctcagctttccgttcttcctcttcttgtctttccagctcagccatccgagccgcgcgggtagcagcagcgttcttaagtctttgttctcgctctcgaagaagctggtcctcctggtcatcaacatcgtcctcaacaggcactggcgctttggggggaggtgggacttgagccttaggggcaggagtaacaggtgtctggggcttagaggctggggctgtaggagctttcttcaaaatcgacctaggttgaggaggcggaggcgcagccttgggtttgctggcgtctgggactgaaactggggcaggcgtggttggggccggaccgcccttctctgcctccaacctagccttcctctccttctctttctcagcccgactcgcctcggcctctttagccttctcttcggcctccttcttctccctctccaatcgctcttcaacactcttatctacacttggttccttgtcgtccccagtagctagaccaagagctcgcatacgctcttgaattttttgctcagcttgtaatcgtcgctgttcctttcgttgttctggagtcaggttcgtcggagcaagagcagatacaggcgccgatggaggtggtgcaggggggtgaggagcagaaagtgaatgtgacggagcagccggggcaggaggaggtgatcgaggccgtcggtttcgatctcgatcatcgtggtatcgttctcggtctcggtggtcatctcgggaggacgattggtaatctctatctctgtatcgatctcggtcgtcttgatcgaacgtacctcgaagataaccttcgtctcggtctcttccgtaacgatcctcttcgtatcgtccaccatatcggtcattccgcctgtcccttgctttgattccatctcggtcttcccgcttcttcctctcatcgcgctcagcaatccgtttctcgacctcagggattttctcgtgggcgatatagagaagctctcgctcgagtttacgcctctcctcgtctttctcagcggtccgtcgaccggaagacacgtattcaatgtcatctttgactcttcgaaccctatacttgagatcctccatctcttgctctagagcctcatcctccgccgtcttatcgtcttcgtcagcaattttcttgtcaagcagagaagatgtgctttggagctgtcgcttgatctcggataggtcgtcagaagcgctctcgttacctgttcgaacactagctcgatcgagatgtcgagcagaagacttatacactttagtatctcggttctcgtcgtgtttgtacactgtaccgtcctttcgagaggcaccggccgatggattaggggaggagttgaaagaacgagacttagagtaagagggtgttcccgaaaaatcgtcggttgatgttgaacggtaattagtgtcgtttttgagaaggttcttgagaaaatcgacgttcgagtcgagatccttagacgaggcaggaacgagctcgggaggaagaacattgggaatatcgtttccattgagacctgtgtatagatgaccagttcagctagatttatagttatgagagattaaagagggcaacttacgtcggtagatcaacgccatagccacatggaactcttggatgttgagcttccctcggttgtccgcatcagctagcgtcctgatatatcaacgcacggtcaatgcttgtgttcgaatattcgaaatgattacacatgggactaaccagatttgagccatatcgtcccgattcaacccactctgtccaaagacctcctgagcggtttcaccagagatgaaacctgtgccctgttgatcccaagctcggaaaatctgatcgtagttttttcgctcatctttggtcaatgtccatggaattttgggggtcgcgatggacttattttgagtaagctgcagaaagttgataaatcattcgacaataagcgtacgggagttgattcgctaacctgacgtcagagatgagaaaggaattaccatgttcatggatgaagaaagggtagacgcagggaggttgggttgctgaaacacgggagcccctgaggaagcgtatggctgtgagtgaatgaaaatagtattaagataacgtgagcaagcggatagaagacatgataatttcatctctatattggctattaaagaccccgagatcatcacagcctggtagacaaggtatgagggacatgggatgaggcgaaacgtactgtagatatattcatcggcatgaaagagctgctcatcatctgtagcctagggtcatgaaaacctgtctgctgaggaactaagcctcctgctccggcccacccggtcgcctgaggcatgagcccaccccctacttgaccagctcccgcccaaccagtgacctgaggtcgaagtccaccaccaatacctccagcgccctgacctgctccagcccatccggtagcctgaggaacaagacccggagctagtccttgttgggaaggaggaggtgcattcaaaaaggagtacggctgagctgatgtttggtttgaaagaggaggtctagaaaagcctgtctgctgcggttgaaaccctgtttgctgtgggtactggtatccagtttgctgaggttgctggaacccggaaggattccactgattattcatagttttagatgtgtatgtagcgagaatggaaggtcgagagagaagaaaagaaaatgacagaagagaagaaacagagatggatggttggaggaaggaaacgaaggcagtcgggcgatgcgacgggcgtgttccgccatctcggtcggtagcggttacgcaactacacaaatgtagttatgggatcacagggccgtggttacacaggcgatcgttcaactttcaggcactcgttctttcttgtgttcctgttcctgatttctttaatcctgttcctagatttctccattgatcctttcccttcatctctctcgctgacattcacgtctcactcgcctttcgtggaaactcctcttccttccggacgtttcatcatgtcgttctctcaatcgacccgcaggtcgacaagatcgtcgcgtaggactccctccgtcgctcctccttctaactcttcccaaccgttctcgtctgtgtttgattctccggtcaattcggtagctcttaaatccaatttcagacctccttcatccatcgcaagcaccgctcagaacaatgatgatgagacaatgtctgagaagaccgagaacggtttggacagagtgacagtcgctcaagggtttggactagcgccgacggtcggatcagctggcggaggcttcggaacggacggtgtctgggtcaaggacaaacgtattgaggtgtggaagaaaggagagcttcccggagaagtccatgatctccttcaaaattccggtatgctctcattctgtttgttcttgaactgacgggatcttcacgttgacgctaatcaactcttcgcttgtcttatattactctacagatttatatacaactgctctatcaggctcgctggatcccttaactggcttcgcaaccctagtcacatcgtcttacttgctcatctggaactaccaaaaggtggcttcttgttctgttctcgtggtagttctttgaagtcgtcaactaatcaacgtgtctaatcttggatcgatctcagaaatcctctacccttcccacgttgtatccctttccacttccttcctcatcgcccttagctcttaacttggcgcatcttgttcggcatccttccggaagagagccaggagtattgaccatctctccacaaggagagatccgtttttgggaaggagtcagtttggccttggtagatggcggtgagaggtttgtcgaaggaatggtggccaatctatcggagggagagaaggtcgagattgtcaaggaggtcgaggtttgtcttctcttgccatcgattttctgtttcatctctatgtgtgtgaggattaactcatcaatgtaataacacaatatcttaatcctggtagcctggtcactatgtcttgaccacaaattactctctcttacatactcttctaatcacctaccccactggtcgtcctacccttcacacgactgctttccaacttccttctacgcattcatcccttctttctcgattcttccgagcaacgcctcacccctcatcgttctcccctccggaccatctccccagaatccttttgactatcctcccgcctgctatatcccccaaccaatccgaccctgcagcatccgccgaaggtggctctaaagatcttttggtcatcaccaaccggtctcttcagagatggaagatctcttctaggtcggcgccccaacttcagacagaacaaaaccttttggaacctatcgtcaaggcgctgtctcctgcacagacgtcgatcacaggcatgagcacgacctctggtgttgatggagatcttgtaggaattagtctagaaatttgggacatcgaaatcgttgatccgctcagaggagaaatcggggtgctcgtgagctttgtagacggatttctcgggtatggagagagaggcttgaggggagagagaaaacgattcgcggttatcagagtcagagtagacgagggtgctcaggttggcgccgaagttaaggtcgaaggagtggtaaagagcgatttcggttgcgtaagtgcctttatcagttgactcgacgtttggtcatgcagtagccgggtttatctgacgattgtcatctgcatcctctcctcctctttcctcgtcgtataggacatcgatccccgtccgcttcccttccctacactgacagttcctcagacgttgacgccaaccaaaacagcctttgtacttcttcccagctcgcttcttatgctctcgcttaccccatcagacccatacgaggaggttatcgagctcaaggactctgtcacaaatgctcttctaggtaaaggaggtctaggcgcgagggatggaatcagaagcgagttagggattgtcagtctcaagagtggagtgttaggcgttggtgttcgaggtggcagtggagaagggggaaccgagtacatatttaacattctcgtgtgtctgatcaaagtttagaagagacgcaatctgacttatctcttcgcgctctctcgaattagtcgcgctacgatcgccaccgctagactcaaatccaaactcgaacaagcaatcttttttggagacaagccagaggtgagtgtcgttgaatccccatatgcgcgctttgtgtatcttcttaggcttttatcagttttcttatttatctcacctaatgatctgaacggcatttcagaatccactctcgttcgagcttcatggaggatatgatggtaaccttatgcaggctgccgaacaagtttcaaatgacattctggcttctggttggtctctcttcttctgctgacagatgcgcaatgtcacgctgaacaattcatgcctactgaatttcggtttttggattagtttctcccaacatggttcctatcttggatctccgtgcacaaattgcggatagacaaaatagactacgcaacctgatcgacttcatcggaggaaacggcctgctcggaaaggtttgtctttcgtcgattccaacatctcggttgacttgtctaaatctgattggcttcccttgttaaacagctttcacaatcaagtaggcgagaattgtcttggaatgctgagcgcctggctgcctgctccgacctgtgggtctatcagaatgtccgaatggggtatgtcatctcccaatccggtgcctttttgacctcacatatgctaattgtcgccaaactatttctctctaccaatcagaggaaacaaccaagcgggcactcccagaggtttgttagcggatgggattcactccctcatgtcgctttctgggtttggagcgggagaggatgtagtcaggctatttttcagaacaaaagtcagtgaaatgatagcgaatgccatctttattgacggatggagcttgattcgttgtgctgacgaagaaacatccttggtaatgtgtactttgattgtgtaggcccgtgaactagggtctgtgctggatcaggtttcaatccaacttcgatcgacactgcgaattccttcgtcaactgagttaacgtcaaaatggcttttagaggccaaccgaatcttcctcgtgcgtcatatcttccaatacgcttcttatcacatgcgatgatgacttatatcaatatgcacatttttatgttgatatactcaaaggcatccttcaaagcatctttccgtcaccgcgaagagactggcgtgaaatatgggatttcaccctctgaatcatctctctctgagccttggacttgcacgaaagctgtgcttgaatctctcgattaccttgtcatcagtacagaggccatcattcatcagcgaagccgcgagttcggatcctcgttggatgaagagccctcctcagcagagatgagcgatggacgattcggtgcacctgaaatcaaacaggggcaggagactcaaagggagtttaaagaacagctgtgtgagctcgctgcggctttgttctcgagttttgaggagagaatcagatacctgttgaagtgagtttatatgactttcctgtggtaacctatctgagaaaatattgacgatccttcccttcggattttgttacccaccacccccctttgtctcgtgttgtaagtgtgattgaacacaacacattaggaggtactatcgatgatcgagaagtcatcactctcaaagatcgataccttcagctccgatcgcgagtgatccttgatttggtcaagattgatcgttccgaacaagcgttcgagctggctgaacatcacagagatttccgagcgctcgtcgagctttgtaacaatcctcagattggctcttcggctcgggtccaattctatattgaaaaatttagggaagattttgcttttgaactctatcagtggtatatcgaaaagggtgcgtcttaatcttcttacttataccgagaaacgatgactctcgcaaagagtataggttgattgaagactcgttctactacgtcacgttcaggtcaagtcaagacgttgcttactcaggacgagatttataacgagcttgtcactaagttcttggactcgacagagaactctcgaattgcttggttgcacgatctttcgatcaagcgatacgactatgcatcacattctttattaaaagagtctgagtcggagcccaagctcgttaacaaacaggtatgtctcatgagatactgctttcttaacatcttcgcatcaccgcatcaccacgacactgctaacggtggggttttgtaaaatttgtatatccaacagttgatgctcagtctgagtaaactttgtcaagttgttaatcttagccagggaggaacaacgagcgaagacgctcggaaggttcttgacggttagtggatattgtctaactgatctctcttcatagtcgtggcctataagctaagttatggatgcccggtactctattcaggtctagatgatcggttggacttgattagtgttcacgaacgacttcgggatctttttcaacaggctttaaaagagtctggcaagtattcatcgaccgttgaagataacgtcgaggtggtgaccgctatcttggcgcccaacttgactcctctacccgcccttcgagctgtatgtctcaagcgtcgatttcatatcaatgcaggactcgcgttgaaaagattaaaatcctgattgaactgaccacctttcttcatatgccatagttattcgtgaggctcggtcgagatttgttgttaggcaagactcttcaacccgaagacttgatcgatcttctgacattgaaagccaaccaaaacgaggatcaagttggagactatgctatcgcgcttgatgttctgatgagagctagggtgagtcgtttccttgtctctctgttcgttttaattcaattttaacgttcaactgactcaatgatttcctgacgagttcatataggaaattcccaagggaagagcgaacatggctttgtcgagtatccagcgaagagtttacatccgtgatgagtacgtcatgttcttctcaccgtccatgccacgtgctaatccagatttttccctctttatcttttctgctctcgatgtggtcgatgcagctggtcagctttgtcttcaacaagtaatctggccgaccaacaactcgaggagattcttcgttcaaccgcatattaccagacccttcgtatcctgaaaggttcgttcctaattcatgatctcttgttattctctcaggtgcctgcgcaaccaagccgtcctgaccttttcccgccctcatcgtagatcttcatgctacacccacaccctctctgggccctttaacactgtccagaccgactgaagctctccttccatcagcctatataactggatctccagccgaattagcagctagatttgttgatgaaccagcagatgaggtcgaagttatctggtcggatctaaaatcagagaacgaacagttgaggagttacttggaaggtcaggctgaaggatcggaaggtctaggggtttgggcggaggagattcagaggttggtagatttggattagtatagctattcatctgtttcatttttctttcacttctcgatttctcgtctggttcgattgctctcaaaaccatctagttgggaaacaaaaaagaacacgaagccgatgataagatgagataaaacaatataaagagaatgatacagctaaagaagtaataaaataagacgacatgaaaaacagagatatatgaattgtgaagcaatgttttatttgcatgagaaaatggtaaaaggaagagagagatgaaaatacacagtgaacgaagagtatttgttatggattaacagaacacgtggcagtaaattaaaggcatcaagatggaaggaaaatggaaagacatgcagtttatgcgatgacaaatcgaggtcagcgaattagagtaggatagagaagaggtcgacaagtatttccgataggagaagaaccaagtgaagagaagcaaaacaagagagtgagaagagcagggagtggagtcacagtaattatgacggcaagacaggcaagataagaaaacataggtggttcgacggcccgaccaatgttcggacgattgccgagttgttttactttctccgacctctgtttccccgacctgtgcccttccagcaatctggtattgtcttctgatgctgtaatgatcatagtccggaagcggtgttaagcatgctcaagaaaagcagaagaagtaagaaaataaaaagacggaccctgataagtgcatcttttctcgaaaactgtttctgacacttctcgcaataaaatcctgttgagggaacgccctgtttggaatgaatggtgtcgacatgtcttttgagatcatagaatctaacaaatcgagctggacattgttgtttcgtctccggatcaacttttgaaagcgtgatgaagaggaagacgtatcagggtcattgaaagttggaagatatttgggcgcttggggagaacaagataggattgacttactatgggtacagagcgtaatctctcccgataacgacccactcacgctcgaacttcttctcagctttcctgctccacccaaacctaacgcactcttcttcgtttttcgaacctttgtccccttggtcgtccctgtaccgcccttcgttcctacctttcgcttatgttctccatttatcccagagaaggacccggtggatgatcgtttacctccggcaacgccagcagtagtcgttgctggtgctgtacttcctccctgaatatactcttcttcctcgtcatcatcgtcttcatcagattcgaactccgagtcagaggtcctgaagttctcgtcaccgtcttcaacccgataaccgtcttccggttggtcatccgggatagtagaatcctggctgatggatggagggggagacgatgctgaatgcaacctaggcggaagcgtctgactctgatccattacagatgatgcaggatcgtactccgaatcactactagtgtaatagcctatcggttggaaaccaaggttaacccctcgaagaggctcttccagttcgtgccccccatcattctccggtgtatttccaggtggacttgatccggcaaagtgttcaatcagcggagatcctttgcttggcgaatgatgcactcccgctgtgagagaagcttttcttgaatgaccagaagggatgtaatgaaactgttctttaatctgtggtgcgtttggttcgggtaggatgagtggggagccgggctcatcgtcttcggatgaggtggagagataatatgactcgagggtatctgaccgagtgggtgcaaatattgctgtgcgggatccgttctctgtcggagccgaatcgacagtcaaaggagacgaaaaatggaaatgagtgtgttgcttgggaacataggatccgttcacatttgctatcgaggatccaggaccagtggccgaggtagaggcagtgcttggatgtacatcttggggtttcgcaaacaatgacggatatgtctttttcattattcgatcgtcaccgaatatgtcccttggagagacggtcgtggatgcgtccgagaatgtcggagattgcaattgaggagaacgatattggtgcatcgaagactggttgtccaaggcgtggatgaatggtgatttttgaggaggttgatgggggtgatgcaacggcggcggtgccggcggaggatacatcggtaacggctgtcggtcgggcttatggatcatgctggaggatgggcgatgggagtcatcgtcgtacgtcttggtcggtcggaaatggttttcacctgatgacgagaaggattcactggatgaaaagaagaatgcatgcaatcaggttaaagattcatcagacatggtcagttcaacggatcgaaagggcaaatggcagtgatagaaaacgaatagagataaaggaaaaggaagcgagaggagacatatggtcggttgcttttcaagctgagttttcttcccgttcctctgatgtctcagcgaatattatacggtccatttcttatgtaccaagccgactagatgcccagccgaagaaacggcccctcgagaaacttctatccgacatgcaaggaacaatgagagaacgaaagaacagaaattcagaggacatacgatttttcctgagagctctgagacctagagtctgcgggtcgaaagagctcgagatcatcgtcttcatcctctccgaagacgtactcgtcgttcgaagtgaattgtaagcttggagactgaaataccgaggacatctcagatatatctgcgtgttcgtggatggcgttggactacttgcttctccgtcctttgtcgtcgttgccgttgtcgttcttgttcgatttattctttctctatctgacttgaaaagaacgatgaaagatgcttacatcagcaagaaattgatgccaaacccgatgcggtcatcacttgagtgacggttacttttgcaacgacgacaattgctgtgtataacacgtgagtgtgttttccacaatgtaaccagccaaccaaccttccccggccagcgagttggcttctcactttcatcggccgtcgtcggtttcatctgcaactcgctcagacgactctgttctgcttcctttcactccccagctcttttctcaccaatggaccttgaccaacatgaccgctgtctctcgatagccagagcaaaactcgaagggggtgaccccacagctgctaagcggttcgtcaacaaagcccttggcatgaaggagacctccgaaggcttgagcttgctacaaaagatagagaaggttcgtctattctcttgggttttctgtgaaaaacaaaaagtaccaccagaagaaatggtcatttgaaccgtctgcctatcacgagccgaagtcgaaactcgttgagtcgtaaacgacacgtgtgcatatatcatttgaaaaagaatagtacttgtatcttgcaatctctattggagacagcgcaactgccgccagccttacgacagaaagaccacttcaacattacccagtcactcttgttctctatctcatctccttttgggtttgcgttacttccttgttgagagcttacaccgtacgttttctcttgctcgcgaacaggaaattgccaatccgacacgtgaggcacctactacggcttccactacatcgtcggagccctccgcttcgagttcaactacccatgctagacatccccctaaaccaaatctttccaccaggccatcatcagcatcttccagtcaaagtcgcaagccggaggagcagaagagggagtacactgctgaacagatggcgatcgtcaagcgaatcaagagctgcaaagagggacagttctatgagatcatgagttgtgcgtccttatatccgttctcctcctgttctagtcaacaaacacgaaactgattagttgtgtacaattgtagtggaaaagacgtgcacggacggagagatcaagaaatcataccgaaaagtaagtgaatataatttagccattggcttcaggaattcagtcggtcactaaacgtttctttctcttgtctagctcgcgttggcgttacacccagacaagaagtcagtcgtcagcttcactcggtgcccttgatgatcgatggtctgaccgatgactctttgttgttaaattcttctgcgcacagtggcgctcctggagcagacgaagccttcaaatgtatgtactctaattcttcctcgaaaaaaagaaagaaacataagaaagtcacagcactaaaccaactgacctctcttcattcaaatcacagtggtgtcgaaatcgtttcagatcttgtctgatccagacaaacgagcaatgtatgacagggatggggctgacccagactcgcgtgcctccatgagttcttcccgtggtttcagcaatggttcgactggtatgcaccgtggcttcaacgggggcggacaatttgcacaagaggtgaacccagaggatctcttcaatgccttcttcgggggtggctcaggctttggaggaggaagtccgtttggcggacaaagtgagtacatcgcccatcgttttgacagtaaaaatagctcttgacttatctctctgcttccttcagcgttcacatttggaaatggaggtttccaccaaacccgggtgtatccacaaagacgagctcgaaatccacaaggaaatggggcagaaaccgagagctctctcctgtctcaactagcaccaatgttgatccttgttctgttttcgcttatctcctttctacccaatatcttgaacccacctgtgcaaccgccttcattctctttcgctccgagatcgcctgattttacgacagaacgactgacgtccaagttctccgtcccgtactacgtcaacccggctgaattcaatcgccatccgatatttgaaagtattccgggttctcaaaagtcaaatcccaaggccgggatatatagttcggaacttcgaaagttcgaagaacaagaggttgagttgggatacgtgaaacaattgaacagccgatgtaacgccgaccacgaaagaaagcagagggagatcgagagacattcaggatttttcggagtaggagctgattgggagaaggtcaagaacacccaacagcaaaagctggagagctgtgaagagttgaaacggtttgggcatcattttaggtcttagaattggatgatttttctttgtaacagtgtttttggttggcttcttgtcgtctgtcctttctcatttgttcttctcctccatggggaagaagttctcttgtcctcgtatcggttctcactcttttcgtttcgtgttcagagaagtccttttccgtacttgttccaatctacaccttttctcgcactgagctcaacccttcactcatctatcggtctgtcaatccaatcatccaactaaggaacagagacatgctaacaggtcaagatgtcatacatgaaagtttagaagaaaccctatacaatcaaaccatttcacgccgattgatactcgtctttcaccgcctttcccttccgtccttgctactccctccatttgctgttttgaacacttttttgtcgactgcatattcaggaaacattgctgtcttagctctggtaatgaagatctgtgtcacgattggtgtggtgtagtgtgctgaggcaagatatagaggtgaggctagacaggcgatttcctgccttggtgggtttaaccgatgggcatatcgtcagatatttctcttcgtgatacgttctgtgatattcacgtcttgcgctcttgcttttccccctcagtagtaccttatttagaagttgtgggactggatcgtgcgacgggacgagacaaaatctcggatgatgtgtctaaagactactcccgatagtgacatagggaaacaggagaaagtttaaagaacttctttcgcgagaagtaacagagatcaaaaacccatcaattccaccccattctgttccccagaaacagaaagatcacatccgctcagctctcctcttctcctcccgatttactttccgtcagcaacgtaggaagcaacggcggccgatcgggcggcagccttgtccttctcgatcttgaggtagtactcatctcggattcgaactagtgatgatacatgggtatcgagaaatgagaatcagttcacatgtttgtgccggagaaagaacagaatgtatcaagaggtatagaaagaacggtgtagtcaggggagaaaggcaaaagaacaatcgtcggtaatcacaaagcgatttggggagaatgcatggaaacggatgctcattcgggatggcttccatagtgacatagaggaaagggctggagatgaagaacgacacttagatggatagtgctttgaaaaacttcgcagccggattggctctgcaaccttcatccggtctatagcttcccgacccatcgtcatgatcgaccaagtgttcttcctcatggttgaacccgcaaccgtttctgaaagtaagataagaagtgaagtacttacgatcagggatgtgggatccgtacctacagtttgaatgaagcataaaacagtcaaagagtgtcaatcaagtgaagatataaagacaaacaaaagagaaaggatagaagatgattggatggcgaaagaagctgcactcaccagtaagcgtaagctccgagcgttccaagaccgaggctaagagagtttgaatcgaggacgaagaggatgaaaagcgtcagatggatctcagagagtggaataggatcggttgtagataggatagaatgatttacgccatggtgatgtcaaagatgatgacccttcggctgaagagaggggaaaaaatggggtaggaaagaaaaaggaagaaaaaagttttgaagacagataacgttcagtcgtgaagaaaaacaagacaaatagatgatggaagcaagagcacgaacagctttccggcagatggggggactcggtgaactcgggagacagcagaagccatgatgaatgtgttgggagtggatgtaagtgggtgaaagcaaaagagagagaagggttgaacgacccggtgagaagacagacgaagtgtctgtaaccaaagtgaaaccatgatttcgaaagtggtgtaaccaactgaatcaacgtccactgggcgaatcatggtagtgcaaagaacacataaacaatgaagcatatatcgcatcgatgaaggaatttggaaagtgtttgcacgtattcgctaatagatttagagtctgactggctcgcacagctaacgatttcccgaagacctcacaagacatcctgaacgagcgggatagtgatgggaacccaacacagtccgacgtgcggcttgagggggcgtgttggaaaacacatgttgagaaggcactattgaagagtatagatggaccaggggtagaaacgaagacattataagagagagcaggatgatacaaggtgtagagcgatgcttttctttctctagctcgtaccctcttgcgcctgcatgcaaagatatcgagacacggtgagactttctgctgaaagaatgcggatggtttacttgtatttacgagattttctatccatatggatagatggatgtaagtagatagaagtagaaccatgatcttagcatgagtacgttcggtcagttcgatgtataggataggacttaaaagaagattaaacttgctctagtgacattctttctgagagagacatctcatataacgttcctggtccatgctacaacccggtcaaacaagcatcttctgcgcgttctctaccacttgtccttcatttgtcttccgatccattgtctacacaccatctgcagatctcgcgcgacgttgtacactcctatatacgggtctcgttgagcactggctacggctggcggttacgtgcactctatcccgtaaccagcgtgccttaactgggctcctccccaccggcattctttcctttcgtctctctttcgctcgatctctttcttcctctttcctctccatcctttttgctcttccatctctcaccttaatttctcatccttatctcgcttggccattctagtcgagccttgttcgaccagcaaagattcaccgccctcatacttgatctcacaatcgcctatcaacctccccttctcgttttgaactactctcgacatggagcctcaagatcctcattcgggctcccctcagaaccaatggcggttcgctcagtgcttcggtgacaaaggcgaggtcgaagacatcacagaaggttagtaatgatagctccaaaaaagatcaatgctacgtctttctctatgctcgctgtgttctttagatatcggtgagagaaagttgaaggtcaaacaagcggaggacacgctcagattgatggtcaggagctgggacaggtccctctctcttaattttcgtcctgtttatctatcgtcttagacatttcttttacgcctgctgtgtcgtcaggcaattgaagagatgtgttttgatgggagctcgagattgatctgttctgatcaaccgatcgttcttggtcgaggttgatctcagagatgagatgatggagatctgtggagatgatttacatctttttcgcctctctccaaacattcctcttctcatcgttccttcagtccagacatcggcatattttacccttgagaaatggtatggaggtgtttgacgcgtttagaatcgtcgcaccactctattcaaacttcttgtcttgtttccttcgtgtcaaacaaaattttctttctggaccatctattgactcttctcctcccttcgtgcctttcactcttctatcccggccatgtctccttcctgtcgcatcctgaactcggcccatccctcgtccttactatgatcttacaattccgtctcccggcaaacgttgccacgcaataaacaactatagccgacatcatctcgacagttgagttcgatcacacgggagattatttggcaacaggtgacaagggtggtcgagtcgtcttgtttgagcgaaatgaacaggtacgcctctattattattatttggagttttcctccttttttctttggttctttcttttaccgctatctttacacgaaatgccttgcccataaggagtcttgttcggaagcttactcaaacctctgatatctttttcgaactgtacggtcgagtagaagaagggttgtgaatataagttttacactgagttgtgagtatctcgaagcatgaaacatcattcagcaaagtagccctggcttgattccgggaaagagatttcaaacgcgaatgtcgtttttcctgacccggccgtcttgtattgtcttttcttgatctctcttcttcaactcttttgtgggaatcagtcaatcacacgagccagagttcgactatctgaagtcgctcgagattgaagagaagatcaaccgcatcaagtggtgcaaacgacaaaattcggctcactttttactttctacgaatggttcgtttgtgtatcctccgtcacgtcttgtactcaacagtcacacgtgccgagcgtaaatctgaccttcaacggcaaacgtcgtcccatcttgctatttctgccccacacttcactcgtgcaatccctcgcctctatagacaagacaatcaagctgtggaaggtttttgagaagtccatcaaggtcgtggccgagaacaacttgtcttccgatcactttatcaacgcgcccatcacctcaacctctggtaaccctcatatcacgtccgctagctcactcacactccctcggttggcccatcacgactcaatcgtagcggccgtaccgaggaaggtctacgcgaacgcgcactcttatcacgtcaactcgatttcgatcaactcggatcaagagacctacatctcggcggatgatctccgaatcaacttgtggaatttgaatatcagcgatcagagtttcagtaagtttcacaacagtgcacatgtcaacagaatggggagtgcaatgcagaacctgcattatctcgttagaagaggctgtatgaagagtaggctggggaagacaggcgtatagagagcaggaagaaagcataccttgggacgaggcagaggacaatctcattgtaccggttgtgtcctgcactgccgacttaattgaccttgatgtctttgaccctgcttttcctcccaatcagacattgtcgatatcaagccgacaaacatggaggagctcacagaggtcatcactgcagcagagttccaccctttgtcgtgcaacttgtttatgtattcgtcgtcgaagggtacgattaagttggccgatatgagacaagccgcgctatgtgactcgcatgcgaaacgttcgtcatttttgcactttcctcggatttcgaagatgtgtgtacgtcctaaactgatctagtctctccaatctacagaatacgaagaggaggaagacccggccaacaaatcgttcttttccgagattatatcgtctatatcagacgtcaaattctcgaaagatggtcgatttatcctctctagggattaccttacgctcaagatttgggatgtcaagatggaaaacaagccggtcaagactataaacattcacgatcatctgcgaggaaagctctgtgacttgtatgagaacgactgtatctttgacaagttcgaatgcacgttcagcggggatgggcagtacgtatcgtcttccgatagtatatcacatgtactaaacgctgattgttttcggtcgtggcttttctctttttttcatcgcttttacccccaggtcggtactcactggatcgtatcacaactatttcaagatctacgatgtcgactcttcttcggacattctcctccaggcagacaagtcggcattcaaagcaaagaagatcggcgacgtcaagggcggggcgaagggcaagtcgggtgcaatggagacgaatggaatcgacttcaacaagaagatagtgcgtctattgtttgctcttgctttgatcctcggaatccgtttggttcgaacctaattttgatccgtctgatgattctctccatatagcttcatggaagctggcacccaaaagagaatactatcgctgttcgttttggtttctcttattccttgtgtttcttttctggactgccactgatgcgtgaatattgtcctacctctagatcgcggccacgaacaatcttttcttgtactcgactcagtccaactagagctcctcgacagacctattcgtcaccctcttcttgttttttcctcttcgttcacctttgatcccacccgcatggttcttctttatattcaagagttctcttctctgttgtctgccccgttctcgatgttttgctcgccattgtccctttttctttctctagtgtctttttgatctctcacacatcctttgatcgattgttcctttctgtcgttttcctttctgttcccccttttttttctctacttctggtgctccatcttacaacccgtctcttatgcctgttcttctcatctctttccccaccccgttccgcccgcccttttttcctccaaacaactccatctccgctttttcttgggtgaaaacctcggctgtataccaaatctatctactcatttctcctctctaatcacccttccttccctcggtcatgaccatctccgttttttctttcttaccgttctgtttctttctccggtgagggatcagggtcctgggaacggcctggtcaatccttcttccttttcactctcaacaccccccccccttttttcctcctctcccatcccctgcctggtgtttttcttctcttcttactgcagaaatcgccttggtttccgttttcgtatctccctttgttccgtgtccgtatctttgtccgtgtgtgttaaagccctcaattctttatctttatcttccttttttttcccttactccaaagatgtccatgtccaagaaatttccaatctccgtctgcctactccccctcccgctctctttcaagaaggggggaaaaaggggaaggggggg

SEQ ID NO: 2141 - DNA, 302 bp, Xanthophyllomyces dendrorhous
aaggaagggaggaagggcaaagaacaggagaacatggcataagaagggacacatttgatggatacacatcgaacacagcacaacacagcaaagagagatacaaaaggaaaaagaacgatacaaaactcgatttacagaacgcggaggatgattctcctcctcctcctcctctctgtttatctttctttatgggaactcggcgagggcgaagattgacaagatgggttgaacaagacgaaatgataatgagaagaagagaaaacagaaacaagcacacacacacacacacacacacacacaca

SEQ ID NO: 2142 - DNA, 1933 bp, Xanthophyllomyces dendrorhous
cacacacacacacacacacatacacacacacacacatacacacacatacacacacatacacacacatacaaaaagaaccaggactatcggttgccaagcgttcgatcgagattgaaggccgtgctgatcagacagacggcggaaaagccctggggggtgtttccgaggccttcgccgcctctcgagatttcctcgctgaacaggccgacatggttcccgtacccgagcaggtcctcgaacatcgccgtcgcgcgggggaggacggtccggtcgaaggcgcccaccctggtcaacgcttcgaccccccagagggtgcagagcgtgaaggcgccttcggatccgccgacaccgtcgttgaccttgtcggtgtcgtaccggaagatcaggttgttcgcgcagagcccgcccttctcgggcaccctcagcacccggtcgagtgtcgatcggaaccggggatcagaagcgctcataaagaacaccagaggcatcaccagcaccgcagagctttggtcgcgggaaggggggtttttttttttttttccaacatgacacgaaagcaaccagatcagacccaagcacacagctgtgctcatgaacgatgggggaaaaaaaaaagacaacaaagaaagacgacctactctacaacatccttggcctcgtatgattgagctaagagggtgggttaaagaaagaaagaaagaaagaaagaaacaagatcggaccgatcgaaaggtcaaccaggaagctcatgagtcgacaagacaaccgacggccaaggacgtaccgaaaaacttttcttcgtcactggcaggacgtagatcgaagggtgatcagtaaacgtgaagaaactccgcctggggacacactttcgatcagagacttacttccaacccttgaccatgacctcctctgtggggacgagaacaaagagaatggtcagtcggtgaacgccggggcggggaaggaacaaggacgacggtgaaggaacggaccgtagatggcatctctggtggcgagccacttgtctcgctgccggagaggcaacgaccgtttgtcggccagacgaaggcctctgtcgacggcgacccagagcatgatcttggagtacaaaaagtttcgtttggtgtctctgacttcccagatgctgagatcgggctggtcccagttatcgcacacccagtcgaccatctctcggacggcgacccacatgtcccacgagaggggcttgctgaactctgtcggacggccagaagagggaggcaaagtgaggtcagagtcgggtagaacgagcggtgtcggtcgagtcggtcttactttgggcgagatagattgaatccatcaactctccatagatgtcaagctgaaggtggtctctggggggaggagaggagagaaaaggacgagatggatgatctatcagcgtacggcactggaatgagaagactgataacaggatgcacactcacgcggctccgttcttcatatggatatgtatgtattatttcagatcgactcggtcagtaagctttcccccaaaagaaaccaagaaggaaatgcctgtccggtcaagcttagacgtactccgattctgaccggcttggagcctagacatcatcggttgagggtcgtcctggtcagtttctttatcaaccgatgatcaagcagacaaagaggcgaccgttgactgacctttgtgtcctgcaaaatggtcgagcgtctcttcctccatatcctgttcgttcacgcacatccacgacgtcagataaatgtggatatgtctacaggtgatcaaacaggaaggaaaagaaagagagaaaagaaaaagaccaacgacatcgcctcggatggtgtacattatctgaagacttccgtcctttgcgcgctttccggctagcccttggatgaattccatgaatgcgtttgcctgtagagg

SEQ ID NO: 2143 - DNA, 615 bp, Xanthophyllomyces dendrorhous
aagcaacgggggatgccgaattgagaattagtgatgatcgatcgcatgaagagagacaaggcaaacgaaagaggttgatcatggggcgaacctcgtcggtgtaacctaaccggatgagcgcgtagagcgtgaaggaagaatctctgatccaggtgtatcgataatcccagtttctggttccaccgatatgctccggaagtgagaacgtcggtgcggcctgtgttggggacggaaaggaaggtgcacgaatgagtgggtgaacgagtaggttttttttgaaggtcaggcggtcaacaagggatacgtacgatgatagcaccggtctgcagacacgcgacaggaccgattggagaaggagaagaaggtaaagagaaacacaaaaaagacttgtgagacagctggttgagaaagaaagaaaaagaccgaatgaaaggcatctcttgtacgacggaccttttcaaagataagcatcttgagggtcagagcctgtctttggacgacctctctccatcgacctttgtaggtcgacttgccgatccatttgacccagaaggtattcgtttgctgtttcacacacaggaatccaggcgcatgttgtcagaggggtcatgtgtc

SEQ ID NO: 2144 - DNA, 750 bp, Xanthophyllomyces dendrorhous
gacctgagggcgaacggagagcaaggcagaacgtcaggggagggttcttgtttctttcgcagtcgagagcaaaggacgacgctgtgacttacggccgacatgacgggatcctctggagatctgatcttgctgacccctttggcaagggtggacaagtcgacgccaagttcttcggccatctcctttgtcgctttgttgccttagggggagagatagggagatggggagacgatgagcgagagggagccaaggctttagagttgagaggacggacctttatttttggcagactgctcaaagcctctggcagggaactctctgagcacaaagtcgacgatctctccttcgtaaacctggggaggagggtgaaatcttgaaggttagcctgagagattggctgaaaagaaagaggaaaaaaaaaagagagaaacttgcctcgaactctgaatagacagcctctcccaaatggccgttggcagaaagatcgagtttggaccagtggatgtccggtccgccggggcctttgtgctcgttcaaaccgtcgacatcgggttctgcggtcccgccgtcgctgctttccttgcagacgttctcgccagacacggcgactctgacgtcgagtgagaggtttttagaggtgaacttgatcttgcgcttgtcaaactcggtcggcgcgacctgggagtcgtctcggatgatctagacggggaggaagggtggtgagtgggtaggactgactaggtgtatttg

SEQ ID NO: 2145 - DNA, 1082 bp, Xanthophyllomyces dendrorhous
gagaaagaaggaaagaaagagaactgacctctgtctggtgggaatctcggccgtagttgaaggctggggcgacctcgactctgaaggtgagctttcctctgatgacttcgacccgtctgatgagccatggtaggtaggacttgctgggcagggtcgagctctttgggacgaggaggtctgtgatttgcccgacgcctcgctcgctgaggaactgatattggggggagaaagaatttagagagatgaggattgggatggctaggatgattgatacgagagaacgtttgtggggagggagggcatacctttgtggctagaacgttggaagaggggaggtaggcttgtttggttgagaacggggtggtgggggtgattgaaaagtggccgccctatggaggagtgggtgtaaagtcagtgaacgcggctgggtgagggtgtgagggggacggactggtctacctttttggcgtccaggatcctgagcgtttggggggaaaggtaagagtgagcgcgcgcagaacgatgggattagagagcgttgtgagagagaaagatcgtaccttgcaaagacgctacaggagatgggagagagagagagagagatttggtgtgagcttggctgggcgcatatgcatgcgcgattgggttgatggctgagacgagggagaagatgctgacctgggtgagtcaaagtctgggatgcacattgactcgatacttccctggagaggagggtgaacaagggggatcgcctggttagctttgggtgcgggagagagggagggagagaaacgggatgagcgcacgttgatggatatcatcgctgcagtctgcaggtttccgatcatggcatggtcctgttttggggtatgagcgtgggggtatgagcgtgggcgtgggcgtgggcgtgggcgtgggcgtgggctttcgatgagggcaagagaaggggaagaaaagaaaacgaaagaaagaaaaaaggaatccctacttggatacccatcaccgcattggcgttggtcgacatgggtggcattctttgggtggtgctgttggctgggtgtggctgtgggtgtgggtgaggg

SEQ ID NO: 2146 - DNA, 1139 bp, Xanthophyllomyces dendrorhous
gtgagggagtgagggagagagagatcagcgggggagccaacaggcagagacagagacatgagaacggcgaagtaagctaagaggagacgaacgagagagagagagagagagagagagagggcggcgatgagagaaagagggagagaggacgagatggacgatgtgtgggtgaggataaggggaggagtaggagtaggagtaggagtaggagtaggagtaggagtgagcaagagcaagagcaagagcaagagcaagagcaaggctgagggcaagggaggttgagcaagcgagtgtgtgctagcaagggtaagagagagagagcgagagtgctggttacactgagcaagagagagattgcgtgtgagcgtgctggtgctagtgagagcgtgggcatggggatgggcatggacaagggcaagggcaagggcaagggcaagggcaagggctcaagatgggaattggttccgatcggtaatcatgacgttcctcagccgacagaggcactacagcagcgggccacgccgtcagcacacgtcaccgcacacccgagcacgactgaacaagtacacagtgtagtgtagtgtagtgtagtatagtgtagtgtagtatataatagtacagaatagtgtagtgtagtgtagtacagaatagtacagaatatagtacattacattacatcgcatcacagtacagtacagtctaacacactcaatacactctgtattcacccttgcccttcccctctctgcccctctctctgtagtgaatgtgtagtatacatatgtctgtacgttctgtcttgctcccatctccccagcgcacacacacccacccacacccacaccccttggcgatgacgtcgtgggcagatctcagccaggcctggttacaccgatggtaacatacacacagccttcacccatcccacgtgccactgaccgccagccccccaacgtttagcctcctttctgtccatctttccatctcgcctgcctttccattctttccatctttctctctgctcactttgtccgtcctcgtccagtcaccttgacattcaccttcgccttcaccttcgccttcaccttcgccttcaccttcgtcttcgcctccaccttgacatccacacacacacacac

SEQ ID NO: 2147 - DNA, 625 bp, Xanthophyllomyces dendrorhous
tctccccaacaaacccatcccccatcctctcctccgccctcaatatgcccggtccccccgtcggtctctccctcacctcgtcctcgttcacacagaccagatcgttcctcggaggagcccacccaaacaccagcctgttctacgccgccggctcctctccacccgctcatctcttcccgtcgacctacaccggcccctcgtcctcctcgtcgtcctcctcgatctctactcctgcctcgtccgccagaaggtccttctcggccacctcaaagcccacgctcggtctctctctcccctccacctcgccccatctgccctccacgtcctcctcgtccggctcacccccacagaaggactgccaatgggcaaccgcctgggcgtccggcatcaacggcagcgtagcagccggcataaagtctcccggcctctacggcggaagcgccctcgcggacgaggacgaggatgacgactcgctccccggtcccctcgccagcagcctgcccatcctgaccatcccggccgccagcaccgcccaaaagtccctcccccaaggtcccggcccaggcccaggcgccggtcccagctcccagaccgccggtggtcctcccacacgcagggtctcgat

SEQ ID NO: 2148 - DNA, 1608 bp, Xanthophyllomyces dendrorhous
ctcgggcagtctcctccgaccaagcatcccggcccccagcccgatcaccccgcccagctcccagccgaccaccgcgatctcgtactccttccccaacgccacccctggctcaggcccgtccgtccagttctccaactcgttcgaacccgctcagcatcagccgaggccggccgagatcaaggccccgtccgtcccttccatcggtcccagacgaaagtctgtcaaatcgtccggcggaaagagggcgatctctccggtgggtctgactcttttttgtttccttgtgtctcgtgcttagtagcagcctcttcttcttcctttttcctcttgttcgcttactaatcttttccttttttttttcttttcttttttttttccccccaaaacggttctgaattctcttatccaacagaccggagaaagaatgctcgtcggacacgccggcggaggcatgttctaacatagcctccattcactcccccatccccgaaagtttcctctgcttccctctccccaactctggatctctccgtggccagtttcttgtctctttcttgactgctttgcttctgggttctctctctcttccgggctcttactcttttgattcctttcctccctctcttgcgctctcttgtcacccactcatgtacacttagccatacgctcaaaccttcctcctatctatctttccatcgtttctcctacccatgtcgtacgcacctcgacgtgctgtctcaatatatatattttcatttttatttatttttttacttttcctcctccttctcctcttcccttagcccccagtctttgtgtctgtgtaccttgttgtctctgtgtctctgttgtctcttctgccgtattcgagcgactcgtcaccctggttcgcgttgtgttcaaatcgactgtttgatatacttacgacctaatcctctctgaagtctatctcacgacctttcactttcctatatcaacattgttgtcgcttcttctccgttctacattctaacccccttgtcgcgcctctcgtttcgtcatgtaatcatcaccaccaccaccaccaccaccatcatcatcatcatcatcgtcgtcctcttttcttccaagtctgtgaattcttacgttcccgagatctctctgttcgtcatacgtcatgcatccctcctcctcctcctcctcctccctagtctagtctactgttctctcctctgttatgtttcgcttcaccctgcatcgtagacttttctcctcctcatcctcctcatcctcctcatcctcctcctttctcatctctcatctctcgtctctcgtctctcgtctttcgtctctcgtcttctctctcttgctcgctcttctccttccaagtctgctcgatgacgtcccgagtccattcggacgtcaccccggtcgagccatcatggtcaaatatcatgccacctcgtctcgtcttgtttcaacgtctgtttcaccgtcatgtttatctttaatcgattcttacaacccctaaagattcattccccaaaaaagaaaaagaaaaagaaaaagaaaagagaaagagaaggatgagaacgagaccgccggtctaaaactcgtgggattctacac

SEQ ID NO: 2149 - DNA, 9827 bp, Xanthophyllomyces dendrorhous
gggttgtgagaaagaaagagtgggaaacaaaaaaaattggggagctcgtacctcgacgccagtcttgcgcggatggtttctcgtcactcggttgcatcctgtatgtccccagtcagacgcaagggaaaaatcgaaacatcaacaatcaaaaagaagaagaaaacagtctatcagacgctcccttcttcacacttgacaaatacataacgatagacaaagaaagaaagaaagagaactcgaccgaccccagacggtgagtttctcgagccgtttcgagcagtctaggatatctttgatggtaaagtccgagacgttcccttgtttcaagcagcccaaaaaaaaccgaaataagacacacacgatcacacaaccacaccgacaccttgggaagagaaggaaaaaagggggggggaaagagatcaaactaactgcaccatccgacgtccaactctttgagcgcggtgaacgtatgggccctctccgtctctccctcaccttcctccttccctccctcctcggcctcatccaagacagtcgtcggtcccggtctccccctctcgtcaacgtcctgaccgggcacggcgatcggtctaccttccggtccaaacaccagtttcatccattccttctccaacgtcttccacccactcacgttcaaccgttcgagatctgtacccgccagaccggctagcgcgtagatcgtcttaccctgcagaccccagtttccttgaaggttcacttcgagcagcctgttttgttgaccgtccaggtcgcctccgcctccctcgcgtctggcctcggaccaggcgtcaaagaacgaggcggtgccttcgtcatctaattccggaagaagcgacaagtcgagcgactcaagtctcccacagaacggagcgatcgcactcaagagatcggtcgattgaaggtcgacatgggatcccagcgagaggtgcctcaggctcgatcctaccgtcgttaacacggccgtcagttccgggcatggagaagggaacgacctcgtcggtagcgatacgtccaagtacgtcaggccctggagagaacacaggggaggcaaccaactctcgtccacttggggaaaaaaaaaggaaaagaaagaaaaaataacaaaccccccattaaagagtgtcagcattgacgtcaacatgtcgtccaacttctcctcatcctaccctcctctcctgccccttcttgacaaatagcaaagaaagtcgaccgtacgttttccaatctccgacaacctcaattccttcagccctggattcttctcgaccaacttttccaaacactctctatcgaacctaggactctgcctgatcaagaacccatccagaccgcctctcgaaccgacgatatccataaactccagccaaccttcttttctcaccaagaacggtccgtagagctcgagccgtttgagatgaaccaaggattttccccaggagagaagcgcgctggacttgagttgtccgcataacgacagcgagagctcggtcagacatggcgtaagttgacccagagctgtggttcaccaagtaagtcttccgtgctcgtgcgagtgtaggtctcaagaggcaaagagagtggctcactgataaagtttgcgtccgtgagtagagtacagtccctcatagttagctttgtcagtccgggctcatagaacaactgagcagttgcacccgtcctgtgaaccccgaacggcacgattcaacagcttagtccatcaggatgaaaggggagggaatcaaaaatcgccagaacaagtaccgttacgtacatctttctgctcttacaaataatattgttgactttttccatgttcttcggtccgatgtctcccagagactcgacatcctctgaatatttggccacaagcgagatgcagatgtctgtcaacgctgggattcgttcccgctcctcgtaatgaacaatctgggggggggaacgaaaacaaaaaaaagagcaaacgaagtataagaatctgggaaaggataacaccgtgtctggagatccaaaccgattcgagacaaacctttcgcctttccactttagccacaggcttctttttggcagcagcaggacccttgtacgctcctagaccggcagtgacagcgcagggcctacagagataagtggatggatcatcgggcgaaggaggagaatacttggtcttatcgattgaatcaaagagagatacgggacacgcaaaggacgcacaccatcagccatctaagcatgcgcacacatcaacctatcatgtacctacgtaggaaaacgtctttccgcactccccacagccaatctgagcgcccatcaatgggggaccgctagccggtgctcgatttctttcagctggcgtctcgtcatcactaaagtcatcatcgtcatcatctcctctagataaacgggacctcttggctttaaatgctttcttctgagccgctttgagcctcttctgagcgggcgttagaagagagtcactatcggaagcatctagatcggacgagtccggatcgatctagatgtacgcagtacagaagcgagaagtgtacacgatgagtcaaacgagacaacaaacgggatattaaaccaagagaatcagactgaccacagctctcttgtttcctcgggcagcgctcctctccactctgcttatcgcagccagcgagctcggtccaggaccggcgaccgactgatctccaggagtcgactcgcgagtctcctgggtgatctcatcttcctcagtgatactcgtttgactttctccattgacgagagggtttcggtagtgaagacctgtaggtgcggtaattccttgttcctataccatcatgaaacgagagggtcaacgcgatatttcatgaacaagacttttggccacggccacgaaagaagctcgaacgcactctaagaaacgacgttaaagcagaggtcggaccagtgacccctccttgtctacgagggggcatgatcagtatcaaagaatgtggtaaacaaggaaagacaaaggtgatgagcaagtgagagttcaagatatttcagtggcgaatcctttagcggccaaggaagcctccataaatgaggctggttactaacctcagaacgcgtcaatataaccctaacgtaatttcaacgcgtctatagttctgacgcgtcaaaacgttcatccaaagccacaagaatatatacaccacatcgaacacacaatactgatatgagcgaggagaattcttagtgagtacagctctgtttatcttcttgacaaataaagctcctcatgttcttattttgctattaaaaacaattcaaaaaacccaattagcgaagcacaacgattggagaatatccgggcaaatcaagcccttttatcttccctccaattggcagccggaggagcttcagctataggcatcgtcaaacgatcggctcctcctgcagaaggcacgaaaaagaaacccaggactgaaagaaagaagaaggattcatcggtgatagaggtagcaacaaggcgaacgagcgcgcgattgcagggtattgaggctgattctgagaccctattgaagcaagctcaggtgcgtttgtttaacatcatgttccacctcctttgtagatattcgggcctgatagttctcatccaaacgataaaatcaacatagttggaagaagcagaggcagctatccgaaggaaggcagcgtacaaagctcgacatgcgccgtatacgctagactcgctacccgaacctattccgaaggaagacctctccgcactcacatccaccttgtcctctgcgacatcttctgttcatacccggtcccttccatcaaacccatcggctctcactagctcaaatggcgaatcctctgcctcatccgagattgccaaactccgatccgagttcgagggactctcggttctctcaaccgcaaagatcacgtccgaacgggtgttctctatggtcgttcatcccgaaccgacaaagacacttgtctttgtgggcgacaaattcggtcagctcggaatctgggacgcgttagctgacggaaagaccgagaacgccagggatgaggttgatgtggctgaggatgaggaaaacgagacagacgggcagggaaaacattggaggctgcagctgcacgggaccaatagtctgagctgtatgaagatcagcccttcagatagtaccaaggtatgtccttacttcagatcataatcgtttctatgattggttgacgcctgtatgtgcgattcgaaaatactgtatgaagctatatacttcgtcatacgatgcctcaattcgcgtacttgaccttcgaacgcagtcgtcgctcgaactattttctcatcaaaacgaagatcggttgatcacccatttcgatcttcctttatctggccaagagatctggtcgacagacagacatggcgggctcagtcattgtgatctgcgagaggaccatcgatctgtgaagagaagatgggacatcggaagcggcaagaagattgggggtgtaagcgtgaatcgtgagtaaactgacaattcctctttccttgcccccatatgataggagtacatccacttgagtcgactcacttgtcttcttccttcccgttgtccatcgtcgaactagctttgcaaccccatctagtgtgtactgccagtaacgaccaaacagttcgaatctgggatacccgacacctctttagaattcagccggatgcttcatcttccccttccccacctccttcgccagtccgcgctccgtctcccgagacgaaacctcttcgtactacctctcgatcaacacgagcgagccgacgggcctccgccgtcgctcgctctccttcgctttctccaccaccggctattgtcaaacttgagccgaaggtggaaagagagaccccggctgtagagatcaggccgacatacccaacagtatttaatgatcattcaacgatcgtagagtatcaggagaacaaaccaaacggaaacggtctgatgagaggtctctggagacacggaaaaagttgctcgagtgcttattgggatccatcgggcagaagattattgaccacgagttatgatgatcatatccgaggtctgttttctttttttcttctcttccagagcgcaaatcaagcatgtcttctcttttcatttctgaaatctcatcctatctgattatgtttcgtttgtcctccgaaaccacagtgtgggatatcgacccgaaatctttcacgccagatgaaccactgacggagaaacagtttgggaaaccgactatgtcgatgaaacatgattgtcaaaccgggcgatggctttcaatccttagagctcagtggagtggttcgtccgttcacctgttttaatctcctactctgtttttgttctaactgcttaacttttcattattcttcacttctgtgtgtcttatgtatttccttacgccgggtaaacacgccaaacagccaacacagatatctacccattctttacggtaggtaacatgcgtcgaagtctagacgtcgtcgctttcacaggtgaacctatcgcgaggttgttcgatcctgacttgttcgttctttttcttcatttgcttcttctttgtcttacttcgattcctttgtggttactttctaactctccgctgatggtctgatgctcctttcatactcgcatactcacaatgacaacgaaaacgaccaaaatatatacacagtataacagcagtcccagctgtgacggcttctcatccatcggttatcaatcacgtcatcggtgggaatggatctgggaaatgtcatctctggggtcgagcttaacttgtctttcccatgctttatcctgtattcttcacatctagttcgttcggttcggttcggtatggttgaaatttggatctagcgttatgtcggatctgtatcgtcgattttcaaaattgaaaacctctgtagttttgaaatataccaaaggacaaacacaacaatcaggaatggcaagaaatgtcatgctagacaacagtttagaaacgaaaagaaaagagacaaagataaagacagcgaaggaaagaaaagaagagacaaaaagaaaacgtagagcagtgaatgagggaatctttactttgtctttttaaaaaaatttaaaacaacaagaacaagtgcgaaaaggctggtttaggagggagagattcagaggggtaagatggattgggtgttgaaaaggggaggttcaaaagagaacgaagagagagagaagaaagggataaagaggctagcgagtgacaagaagccgaattgagggcaggatgaatgatggaagagtataagtgtatatctgactaggaggaagagcggatgtgtatgatgacgaatacgaacaagatgtagtcaagaaatgatgaaggaagagggaaggagagcgtagtacaacgacaagacctgagaacggaagaagagaaaagaagaggaaaggtgcgctcgtaatcacacaagaacatagaacggctgggaagacagggatagagaaagaagaaacgaggatagataggagaaaaaagcatatacaggcgagcaacagcaatgctcgatcaaaccagataaacacagatgccggtcctccttctctctttggctagattttatttatttcgaaaatgtggttcaaatcaatccccctttacagcccagaccataaaccctaatgaaaaagaagaaaagaaaaagcaaacagaaaaaccgcgaaaaggaagccctggagacgtgaggtcactttgcaggactgacgagatcgtccatcatcaacagatccattccatcgtctccgtcaacatcctccccaacgtccatcggaaggctcaatcccaggtgcgatctcctctgtccgtaatcaccagggctgggtgcgcctcgaaccaggaattcgagaccgcctagtcctcggggactaggaagtccgttcgaggcagtcagcctggtgtttgtatttccgttctgggcagcttggagaaagccaggaggagcagccgagcttagattgaactttgcagacgttatacctcttcgctgagcaagattcaaattcgccagaccgagggatgacgtcaaaggggagcctccattgtaaggggatccatcttgtttattcgtgaggaacaacgatgtctgctgctgctggacaggtgggtacggctgagggtgaggatgaattggtggttggggctgaccaagaagaccggcgatcggggatgggtatccggaattgaaagtcgaatagggcgacctgggcgaagttgaggaggatgagatggtgtccggagtggttgccgcccgatgttgggaatttacccccccagcacccataaagctggcgaatgggtactgattccctccggatggagccatcggctgggaaggaggaagaggaggcagtggggcgaccatctttggcggaggcatcggcatgtttcgaaagaacggacctccccacccctgtggaggaagcggcgcagtgtcctccatgccatccgggtgaccgtcggcgtcgacgttgaaagaagtgtcaaggaacgaaaactcttcctcaagggaccatccgtcctggtcttgatcctggtgggtcgaggctgacatcgaggtcttagtctctcgataaaggtggtcgtcagcatgatatccagtttgccctctcggtctcgacacaaattcgtactcggcttcatcagcgtcccagttgttaggaaacgcggccggataagatgcgctcatggtgaactggtggttggaccaaacgggtacggaagaggaagagtacggatggtgatgatgggaaggcgagattttcggtccttccgaacaccgttcgcacacagggtcttctgaaagaggcacggatgaagaccggagcggtaagagctctgcacatttcgaacacggcagacaaacagtcggtactctgagaccagacgcggccgtggccgaggccgtcggagggatcttgatcgggctcgagagtgggaccgactggctgatatgactttcaaggtggaatgtggcgggcagggtagacgaaagcgaggtgagcggcctgatgggctgctggtcaaaccgcgccttctttttattggactgaggcaccttaaggacgacgtggttcgagtttgtgtttcccaacggaaatccaagagatgaaccgctcgagatggagtgtcgtttctgccctttcttagctctggcctgaaattcattgtcggccggaatagcaatctgactcatggagagttcgtctagtctgccgagcgaagcggacatgctcgacggaggaggggagtcctctgtggttcggggcggtgaggggaactcttgggtagagaatgccggagaagggagagaggaagacgcagtggtcgagatggaagccgagcgagaatgtcttgtatcctgtgctacgttcgcgtagggtgcatacccgatgaagctgttggaggaagtcatcgacgagtgtgcgctctgttgtctcggcttgagctccagcttggccggccgaccccgttggggagggtcttctttgggctgatgataaggatgaagaagtgtatgcgggttcagctaaacggtttttttttgcgcacaggacgtatgcgctgtcacaagccaggaagaaacagaaaagacacgcccagaacaaaacaaacatcaagattccaactaacctcggtagtggtagtggcggcggcggcagcttccctggaaacttttgcggcctcagcctttttccgaccaccgagttgagccagaggcctcattcgtccgtgggtctgaacgtaaagtccgcatgcattgctggagtaaaagaagcagaagagaatatgcttagcaaaaaatgttgttttccaattacactcgacgaaaacaacacgagcagacaatgcatgtataggtgtgttgttatattgctcttgaaatgagacccatcgaaaaaaaaaagctcaccagagcttttccttgttcaaccctgtccgccaaagactggtcatggtcttttcgtttaagtgaacaggatgaagcaagagagaagacaaagagaatgagggaaaacaactctcggcatgtcagcagggcaagaggatgacaagaggctccatggagagtaagagagaaaagattccggccggggacgaccaaagcaacgtcccttccctcgcgcgtcccggaatgtattctgggtccgtgtttggaaagggcgagcatagacaaaggaagagagaagaaaaagagggattacggacctcgtcaataccgcagtggttgcagttaccgggtgccagtcgtcttttctggacgggcattggacgaggctttggtgcaggaggaatgatgggatgcttggtgggaggggtgggtatgacgactggagagcacaacaggaaggtcaagagtgagcgaaaggaagaccaaacgagatagggttagaattcaagttcggggacggggatgctatcccgatgtgaggcggagaacaaagcgaggagcagcgataggaggagccgaaagccaagaagcaagaagctgtgacactcacacgaaggaaaagaaaagaaggagttgaagaaagaaggcaaagggaaaaggaaaaggaagaacaaaggaaagggaagagaaggatctcaaccgagaggagttgtgggtggttgggaggagaagagacaggaggaagagaagagacaggaggaagagaagagacaggaggaagagaaagagcaagacggcgaaaggaaggaaccgaaagaaaccataaggcaccaggcaccaggcacaaaag

SEQ ID NO: 2150 - DNA, 11985 bp, Xanthophyllomyces dendrorhous
gagagggagagggagagggaaaggagaaccaggtacaccgcacagttcgctcgcctcgcctgacgtctttggggccgaagcggtccgtttgaatgtatgtgtgggggagaagccaatcgatcggtcacgcagttgtccacaagaacgcgtcaatcacatcactcggcaccgacccgcgatctagtgccacacatgaggcgcagtcgacctcattccaggccttcgtttggtgtctgtgatcaaagagcacttgcgcctcgtcgcaatgtgctttctgtgtgtgtgtgtgtatcagactttgtatcgaacaaggtcaagtgcgcgttcattctttgtctctcctgtcttttgcccggtcctactgtatgcgctggcagttttggactccggttagtaaccatttggacctgtgtccctctgcggactgtggttttaaaacttcaattctaatggctgccccatgaacgttgaagcctcgtaaggttaaactcgccgatcgacctctgcccctttcatgtaagtatgtaagtttgtatctggtctatcatcggcgggtctgtctcatccttgttctcgttcctagtaccattatcgatacttctaatactgcttctattcaactcgttgggaacctctttggtatactcttatccaaatgggttgttgactatttgactgagtgcagtaccgatccagcgagaagaaaaataagagataagacacagagaccttaaaggaaaggaggggcaaataaatagaccgcccgtatacaaagtgcacgtcagtggagatgtttcctctgccctctttcttttttcattagtagtcacgacgaacgttgtgtccgcacacacgcgcacgcaccttcctgtttgcttcctttggttatcgggtagccagatattattatttatttctcatcatccatcatttctttggataagaatacccttattgtttattatcgctccgactctcaatctgataaccaatatcctcatgccgttttacactgtctactatccactgtttgttgcatattacctattctctacttctcttccgatttttctctcatcaactacacgtgtccttatggttcatttcatacagctcatttattcatttgattaaagaaagaggaacaaaaaagcaaaaaaaaagactttgttttccccgcgttcctctgtgttctcctctgttccgctctattcctccgtgttctcctttgttcctccgcccaaccgctttacaacttttaccaattagccctgaatctttcggacgacctcagcagtaacctcgtgggtctttgccgtcccggcctttccgtttgcgtcgtacaaatcctgagtgagcactctgccctccgccaagacctcatcgaccgccgtgtagatcctcgaggcttggtcggtgtaccccaagtgggagagcaacaaagcagcagatcggatggttgcaattggatttgccaacgcgagtccttcgatatcaggggcagaaccgtgtacgggctcacccatcacaaaatcgtctccggcgttcactgagggaacaagaccgagggaaccgacgagggcggcggctccatcagataaaatgtctccgtacaggtttggtgctactgccacatcgaaagcactattcaaatcagaggcaagaaggagcttttttatcagtctgaagaatgatcgatccatactcagccatctaatacatagcaaaaactcacgagggatctcggaacatcttgtagaccatgctgtcaaccagttgttcctccaatgtgatacccgcccacttttccttaccttcagccgagtcaaacactgctcggcaactctctctgaataatccatcactcaaactgaggacgttcgacttatggacgatagtcaccttggaaggtcccttgtggtgagacccaccagggtttccagctcgctcaagtcctcgaagtcgagcaacctcaaaggccattcgagcgatccgggaggacgctcgggtactgatctgtcggtctgcgatcacgtactttcctcgctgcagaggatccgcaggatccgcagcgtattccttctcagacttgatgtactgtgaacataagagtagacaccatgttgtccgtcagtttctgtacgcttctgaattcacaaaaatcctgaagtacagtatgtttaccaaacattcagtgttctctcggacgatgaccatgtctactggctttccgggcgcacccaagacagacttgacaggtcggatgttggcgtacaaatcaaggtgctttcggagagctacaatcggcgaggagtatccggctactcgagtagaaggagagctgtccaggaagggaacgaacgcgagttgatccagttgtcagcaaagtcgaacagaatgaataagaacgggccacgagtagaaagaacttcgagctcgaaaaactcacctgacggaaccaaacattccaccatcgcaagacttcatgatctcgatagtctcttgaggaagagcgtttcccgttttgagaaatgttccccaaccggcctcgagtgggacgaactcgggcctaggaatagacgagccgagggcaagaagaacagcctcagcggcgggcaagacctccttacctatgagattccaggtttccgttgcggtcccagagaaatggtgtcatctcttcatcagcagcttcatcgtaagtatgtaaaacacatcgagcgagctcaacaagtttgacacataccgattccatctggttcaacatatgttcagaaagaatgatcgttagttcgtcctcgcgtcatgtcaaaagaagaaaaatgtaggacatttgaggcaaataatgggtgagaagcagattatagaactcaccggcagggatcatcccgagtcggagggtagatcgagcgagagaagccatttatgtgttctttgttataagtagtttacgtgttgaaggggtgatggttcttttgtctgtctgtgatggaaggttgaggatgactcaaacaaatgaagaaaaaaaaagcggtagcctaaggttttcttcattggccgatccagtcttccggaagaatttttataaacgaatgcattccaaattgcgtatatctatgggtgaatacccaatataagatcttatcaagcaatacaatgtgataagttgctgctctgccgatataacatctcaccccgctaagcaggtcaaaattattatcaccaacgccttgggatggttcatctagatcaaacattgatccttcagacaatagtcatcccatgttgcctctatttccaagccttttgacccttctcctgtacccagcgcttgctttcgcatccccacaatttaattcttcctcggaagaaacgttttctgaaactttgaccatcaggccgttgtcagatggtaaagtcaacgctcgatttgagtttgtcactcttattaatcaaacctcttcaaacggttggtcccaagcttctacttgattcgacaaccaaatctgctatctgatatcgatggtcactctcatacaaatacgataggccacagtacactagcgccagcctttattctttcgttgttgaagaagcacgaggcccaggcgtttgagctagtattgacagcaggtgtttgggatcattccagatggggttatcctctttctgaagcaggaggaacaggagcagagctctgggcttggatgggagtttctgccaagtgagcctctctgtttaatctgttatttacttactcatgcttccatcatattcactcaactaaactgaatgttttcatttacgatggaatctttgttcagatcagattctcgacatgaagctcttacccaatcgctttccggtttgttctgcgcatcactaggccagtcactgaccaacggtttcaccactcgacctcatatacctcatctgacgtccgaatcaggtcagatcttttagcgattttctctcaaccttctgttctatcactctgtacctcaatctcacctttttaataaatggccactgtttcaggttctattccgtaccacacgacatcccctccctctggactatgcaccgagaatctcactcctttcgtcaagctgttaccttccaaaggtcattcaggaatatctggtcttttgaagagtcatcgagttctcgcaggtaattggcattcaatgtctgtcaaagctagcttgatgggtggtctcagcgatgtggccagatttggaccgagtattgagcatatcgagattcggatgggcttcgagatcgtttgggatcttataggaaggaatagagggaacgaacttcgaggtaagtataattcctctttctcttcatcagctgctttcaggtgatattgagatcaattggattggttcttgcctgctcctgctagaccttagctttcaaaagatctttcacgcatccttaccaagctcgttccctcctgtatcttcttccgagctcattcttcatctgccttctggggtagacgacaaggactacacaatcttacctcatgggtttcaaagagtagccgagcatggagtggacagtgtccgatgggacttgaagagtggtaagtgcgagagagccgtagacgagaaggaagctgagaaggtcgcttaccaagtttgatcgtatctgtgacgttgggggtctaattctttcctccagccgatggtacatttgatatcgaattcagatacaacgatgccagtgaatttgtctttcgtgagtcttctctctgtacctatcagtttgtattatatcatagaaagctgatcgctttgggctattcattcttataacaaacatgcgcgtacatcctcacagcttcgacttataaacctcctccactttcaatcgaacgttcagttctgggagccacccagatcgaaggtgctttcaggatcactattgcgaataatttggatgaacagaaagaggttttcttattagaggaatggccttggtgggtcggtggttggttaggcgaacgaacgatcactctagatggagttcccaaacgtgagttcccttcatcttcatatttccccataccaaagcaaacgatgacgtactgagaaattatttgagaaaatcatgaaaatcctcctataaaacgaagaggatattcttaggtcaatctcgtatacgccctccatcccgcacgatcaaccaaccaccttagtttcgcatctaattcttccacctcaaacgaccatcgagatcaattcacccttcattaaacagttccttcagtataacgagcatctccctgacgctagtcgtggtttcgaactatgcgccgcgatcttgtttccttcaaagccaccacgtttaccatctttattgccatcttgggagtcaccgccatcaccgacaaggatatatacggggaacgtgttgatcgatctcgctactccagatttctcgatgccatataatgtgattatcatgagttgtactttactcgctctactattcggaaggtacgtaactccttccccttccttctctctttctttgtcatttattgtcaaagaaggtgtacattatgactgaacaaagaatgccccatcatcttcgtgttctcgaaatcggggtctttgtctatcaacagtgttttcaacattctaactcgtaaactagtcgctatagattcagaacatcctcttctgaatccatcgacactcgacttgtctgatccgacgacgaagctagagaatagtaaggagaagggtgcgccatttagccacagcacgaacaagctcaaggaggatgtacagagtactctataacgatagtgctgtattgatatctatatggttgcagttcaaaggtcttcatgatgatcacatatattgtttcaattgattgagactatctcaagaggttgcagggagtgttgtttccccttctgtctctctccagtaccacgccagcatggcaagcacagcaacaaaaaaaagaaaagaaatctacaacatccgcctggccaacacaacgatcagcgccaggatgatggcgaggaagattgaatcaaaccataacggaggagtcaccggattgtcggagtttctagatggaacgatctctacaaccgtagctggcgttgttatcgaggccatcggtgtattctcagtgctgagcacatcggtttcgatcggttgaccaggagcgtctacgtcctgcaaggtggttgatggactagggggcgagataggatcgatagtttctttcggtgaagagacaataggtgcctgaacgacagccgatgactcaaccgactgaactaaaagaggggaaggacagggaatagattggtcggtcgaaactgtcgaattttggtttgacgatgaaggtgagccatccgcaggcaaactcgccaatgtactagaatcaggcaaaagatcctcattcgattcttcacatttcggacaacgccattttcgagatctatcatacagatagatcagaaggaggagaagtgaacgtttaatgatcagctcttgaaaggatcgagagccgcctctcctaaagacatccgaatgaacgcacaatttggctagtcgtcttctctcttcaactggatagtcgagagcaccaacggatcgaagagcttcccctttgtttccccagaaggaaatgaggccaacgatagctattagggcaaccagtcattcacaagagcatcacacttgttatgttaattcctattcttaacagagcaagtaacaagatgaaatctttggaagactggtcctgacctgtccgaactccccaagcaggttgccaggatcctgcatggaaggatgtcagaccatctatacaaatctgagtccgatatgcgagaaaagcgtgtatcaacaagcaaatggtcaaacacttattccgaaaggcattcatggatatagaatgtctacctttttaccgacttcaaatcttccattaggcgttaggatcatcatatcgggcgcggcgaaagggtacgatggctaaggtgacatcatgtcagcatctgggtcgtgaacagaaatttgaagatcaatcgaatttttcagttcctcaccggcagagatattctgatatgatagagacctgaacaaaagcatgtagacatgatatatttagcttgtgaatcaactcatctctatatagctgagtaggaaagaaaggcgatggaatctgacctccttcgaactcagtgtctgaagcccctcggatagtaccatgccattcctacggactcaagatcgtacagcgatcagtttaagtctaggttcatgtctataaaaatatcatgaacacacaaaaatgtcatcctttggataaacatgatcgagatcgttagtccatccgaagagaagtcacacagtatacagatgaagcagctcagatttggttagcccggaacgccagagttaagtcggttatttcatatatcagtcctgcactcacctctaacggagctgcagaatagtcagtagaaagatcctcggcaagctcccgagcttcttgcatgatccttttcacagctgtcgattgtgtatatgggcgtggtacgagttgagttcttatcgagctatattccttcacatgaatcatatattcacacacgttcaaatggaactacataccagaattctttttgttatgcgttgctgtagtagccatgatggtgatgatgatgacggtgatggtgatagagggacattgggatgatgtgtgctaactctagataatcgcttctgccgctacaacttccgagtttcggaattgtctcacatcatttcggtcagcaacgttgagccaactctcgttcttggtggagatccacttgcttcctttttcatccttctgatcatttcctctgtttgcttacttctctctctccctctcatgacgacaatgctcctcggtcgcgcaaaaaaggttctgctttcctacggtattgctaccactcttagtttgctcttcttctttgccttgtccccctattcaccaaacgaaattttctcaagaccattcaaccttccgtcggtcgccttcttgagccctcatgaccgtcccatcaaaagctcgcctaaatcagtggatgaagttgacatacatctattgattcctctttcggatgttccctctcttgagccggtgtcggtccgagccgagcccgcaccctactgtcggaccgtccttacatccttactacgaggctacacacctatcctactcgacctcggaaatcaaatgacatgggaagaaggcacgagtctcaaaatcaacgtcgtagcgtcctatcttgagagactagctgcagcgaagagcaaaaaggagcaaatggtgttaatgattgacggatgggatgtctggatgcagcttgggcccgaggaacttgttcgacgctatgtgagtgacctctctcttctctccatggtatggtattgtccggttctgatgcttagctcttaacacgtttgtgacgccgtatagtatgacagtaatcaaggaattattctaggtgcagataagatgtgctggcctgctccgcctgaccttccacaagcttgtaaggatgtacccacatcaccattcacagcagagctctatcaatcgagagaagcatctgcccgcggattcactcttcgtacgtacccttgttctctcttttcattgtcagtgataagcttcccttccaatcttttgcccttctcttcttctcattcctcttcactaaaatgctcttgcaaacttgatattgcgcaccctttcctcaagcttacacatcagaacagaaagcaatcagccaatcaccccctagatttcctaactctggtactctgctttccacctctactacactgtcttcactctatgaacactttgttacacatcctatcagtcctcatccgattgctcctggtttggcatccgttcctcccaatgatcaagaacgttttgtagagacgttctatacggatcacttgtcagctcaatggagaattgcaactgggttcgggctcaacgtggactatgcaacagagttctttgggacaactttgtatgccctttcggactatgtacttaatacgggttctgccgaaagcaccgaacgatggcctgttgacgaagagaaaaaagaggaagaagaaaggcaggacaaaatgagtctagagaaggcagaaatagctcatcaagggttgttttccaaccgaatcaccggtcaaacacctatcgccatgcacttcaacgggaaagaaggtaaggaagctgccaagatcatctggcgggagatggaatggatccaaaatcggactgtacgggagacgttcgaacagaaatctggagcgacaaagggggtctgggtaggagaggtcggaggcagatggcttgagtgggataaattgggttgtcaggggatttgggaaacaatctgaacccgtcgacggtggcttaattttagcgttttctcccttttttgtttagatactatattttgcatatgtttttctcttgttcacctagatttttctgctttacacttgttctgtatcttatactttgtcttattcgttcgtaaatatacgttgtctgctttattgtcctgtgcttctccattcgcaatcgttcgcttattcgttcttggaccattggatctcctcatgatccagtttgctttgtttggtatattgcttaaatttctttttttcacatccaatgatccacatagttcgtccttgttcaacatttcttcaatattaagagaagaagtaaacagaaaggtaatcaagccaaaaaacttatttgtgtatatgcgaggaacgaactcgaaaaatctacgttccccgcttctaatataaaagaagagagaatctaacatcaaccataccttctcctattcacaatcctgttctaagctcgttccaagattgttcttttattcccacttgtcaagcttcatcgttcccttctccatgaagttggtgtgcatcttgaacgcatttcggagcatatgaggctgatgagccattccctttgccaactgttgattgatgttttgtaagggtagatattgtgaggaaagaagcccaagcgtttttcgagatgcttagtttaagagtttgctcttgaatttatatgaagagaggtgatgaatagaactaacgcattcgtgaagagctcggtcgtagtactatttcaagattcaaatcggtgacattagaaagtgggtaaacatcaattcaatgatgatataaaaaaaaagtaagaataggcacatacgtcgtgaagctggtctctgtagtcagggtgagcacacttgttgatgatcaaaggcgctcgctctcgaggggaaagtccccgaagatcagccaatccttgttccgtcactgtttccccatcattaggacagattgaacaagtgatgtgagcacaaaagtagatagagacaggtttaccatttgaacttaccaatgacatcaagatcgtgctatgtatatatcaacaggaagaacaaaccggcgaccgtgaaaccatcaggcaaggcttttcacctctgagggatagaatagaatgacaaagacttacctcggtctgatcgatatgcgaagcaaaaggaacgatgcaagagataccggtagggtccgtcttggtcgctcgtgccgaaggagagtgcatgattgactggacaaaaatcccaaagaaaaaagagaaagaacaccatcatcaacctcatcgcgcacgtccgcaaggtcgcaacgaagaagaagaagaagaaggaaaggcatacaagcttggcgtttctcaggaaatcggctgatccacccaatccgttaagcatcctggatcccagagcgttggtcgaattagcatgagcgtacatgtcaatctccaatggagtgttcatcgcgatgacaccgagccgtcgaatgatctcgggcgagttagcaacctattttggatcaaatgagaggaaagtagaggcggtcaatgcgtagtacttgtgcattgggaaggagagggaaagaggattacctgctgagatcgaagaagaagtcgatctttgtaagactcccagttggcatctgcgaaatatacaaaaacaagaatcagattctgtatcagcctgcaaaccaacagagctgtaaaaagtcaacaatcccacgtacaaaacttttcaaatccctcaggagagaatcgaatcgaggtagcggtggcaaactcgagctttccggaatcaaagaagtccaggaaggtatcctacgatatgaccaaatacagagaagaagccttcaatcaatctgttcactctcgttgctggacaacacgatgatcacgcggttgaagaacctacctggagaacctcagtccaaacagagatgttctcaaagtgagcgtcggcaagtctgtaaatcacaagtaaaatacgttctacaagttgagacttgaagttgtgtgaaaaagctctgtattggtcgactcaccctccgatgactgcaagatcacagcaggagtaaggaagagaaaggttgtcagtaggaggtcgcgcgccgagagagctaccagagatagcttgaggaaagacttaccagcattggcaatatttccaataccagattgaagaggcagcaggttcttgggcaatcgaccagcgtcgacctcggatccgaagaactcaatgatgtggttggcaattcccctcgacatctcatcctgaggggcgtttcgaccggtgttgtcggccttgtctgattctacaatagcgacgaccttctcggggtcgatagggattgagacctgtccgattcgatcggaaggccgaacgatcaggtaaggctgtcggtggggaggaaggaaggattgactgtagagtagaggttcaatagaattcaatcatcttgacatttgcataaataaggagaagcagagaataaaaaaccatacttgatatcgtgaagccccttgaac

SEQ ID NO: 2151 - DNA, 16678 bp, Xanthophyllomyces dendrorhous
ttgaacgaaggaagcctagtgttgacctcgatgatgatcttgtcggccatctgaatgatctcaggggtggctccaacagaagctcccgggacaatcgatccgtcttccaagatctcggtggcttcgataatagcatagtcgagtcggccgttaggcttatcctgtcgatttatttggaaatgattcaacgcgcatggttagaaaaagagaatcaaacattcggtacacgggtctttgcaagagcaatcaattcaaaagacgaaccttggtgtaccatccataggtcaagttctgggggaacatggaaagatgctgatccgcaactgtttatgatgaacacgtcaaccctcttcttttttcggacaagtgcgtccttctttccgccgttaagtaagaaaagaaaccggacttacatctgattttgccgttattgattcccttggcaatagcttttccgacttggtgagggtatcgcctatcaatcatgtcgagctgggcccacctatcctcagtctctggtccagtgctggcgccgacaaagagatcaaatttcatctttccctgaaggttgttggcctcgacgtgatcggcctatgtcacaacggcacgaatgaatatcgggagaacacggagtgagtcacgggttttgtgctagacgaagatggcgcgagaggcagaaaggaaacgtatgcgggcatcagctagacttaccaatatggtcggcgtgatcttggggtacccgacactgtccaggtttttcagaaccagatacatttcgttttccgagaagatgcgtatgagttcagtagattcgtacggcaatagcaaggagagaaataaaccaatgtatcctacccagtgaaacctatatgaagagaagatagagcgccatatcaaagatcagcaagagaagagaaagcagcagttgatacaaacatgtcggaagaaatgtattcaacacatgatgagggcatcatcgacataccagaccatccgagagcgtccccattcttgaacaagttgacgagctgctttgggtcagatacgaccttggagtgaagggacgtcctgagaattctttctttcaacaagtttgaaatcatgaccgagatgatgggataagtccttggacaagaagagaggaaggtgttggtggtagagagttgaaaagggaaggaagactgagaatgaaaaaaaaacaaaaagaaggcgctggaccggggttggtccgtcaatgggcatcatcgctagttggctgtattactttgggggtaagaatgcaccgcatcttacgtagccatatgcgccttggcgcgtaaccgccgtctgcatgttggcattcaaacgcacgtgtcggcggctagatggttacaacatgcggcaatttcttgtcccttccgtttccgctgataatcaatatgccttttggggacgaaggtgtcttgaggttagtctccaagtcccaagcggctatagatgtcggcctcaaaaaaatcacaatggttaggataggaaggatccgagcatagggcacaaacctgattggaaagcatctgaaaaaaccagttatagcgataaacgatattagctgtgagctgatcggtcatgaagatcttggtttccacttcacgattccatgacttgatactaaacgccaatatcgttttctttgagcgctctgtatataccaaggttttagaacagaacttgtagccatttggagcaatgtatgccatgactatgaaacacaggatttggaagatgtaagtagtgctgcgggtgcagtagatcatatatgtagtttagaaagtcatcatatcgaacattgtgagcgtggctacagaagatatgggagaaaaaggtacaagacacatggattgataggcttcaaaaagtgagtggatagtgattcgagggtcaacaatggccggggagcgacttggagttcgagatacaagcctcattcgatagatggaatggttcatgctataccctatcagctctcttgaatctattaagtgttcgagttcaactaaaagaaagcagtattctgtgtgagtcagccaacctgacccatatcaatatagcacacgagtgatgtttcttgacaaatgatgtttttggaagagggtgacaatcgatctaatctgatttctaggattgtcaaaggtaaagttgatcgattaagataagataatatcttaactagcctagtacttatgtgatattctagttattcatcttttgtaacggagtcttaactgaccgtcgtcacgcagagccagaaaaaaatatttaaggcaatcgttctgctagtcctgtgcttttctttcttcaattatcacgatcctcttcagccttgcccttgacgtctgttatcgaatagccgttctggtcaaggatatcggattcagagaggcaggtgttcttgaggcgtctcctcttttgggagacggcatcttttgttgggtgccgggtcggagaatgacaaggggctcttaatcacttaatggcagggaatcctacctgctgtcgagtttcatatgtcaccaacattcctttttgttaccgagtgtatatatcatgttatcttcgttgaacttgtataatttgagtcaatcacagaagtcttatgagtctcaaaaatatgagaaatgaggatgacgagacgatataaagatttatcgaaaaacgtgattatcgttgtttataacatcgactaatcggtgaccatggaagtcaaatccaagatcatcatcaatcttccaccccccttgtcgtcactgtgtgtatcttctgttggttttgaagcagtacgccttcgatgtccacccaggtcgccggtacaaattcggtctatacgtcaatatctgacaacacggacgagactactcttccaaatgtccccactgctatccaagccggtctgcttgaatacggtacggaaggactgaacggaaccgacggattggacactcaggtcgatggaccggacggacggagggtcagtatgtatgttgcggcgttcgaaggtgggttacagtttgatcttgatttccgatcttgcttcggtctacatgcggttctttgtgtccttgctcttctttgattgtcttatatctttcctcaaaaccgaagactgtcgcacggatatctccggtggcaacgttgctcgaacagacttcgctgaccatctgctggttgaattcaatatgaaacatagacatgttggaaaccgttctagctcaagaatcttatttgttctcttcgacggaattaaaaacattcgaacgatacaaattattgagttgtcagtcgttctgtttatgcagtgaacttcttggagttgtattcactaccaaacatcacttactgttccttctatctttacaacgatagatgacgcccgatatatccttgttcgattacttcttcgaatacccagagtccatcgagtggaacaccttgttcaatcatatacgaaagaacttggctctgggattccagctgctgtggatgaactatgtgtgcccttccaacgtgcactgcctaatccgatgttaccgcctccgactgctacttcatctgctctaaatccacctcctcttccttgttcctctgctattccttcaagtatagcttcgataaaagagaaggacagagttggcaatggatatgacaagggcaaggaaagagcgcgagaggaagacgtggtagtgattgatttgacggaggacgaagagatcgccgacccagagttagccagagcgatgagaatcagtctactctccaacacaattggtcacgcaactaatactcctactatcggttcttcctcttcctcctcccttttctacaatcagagcgacgacaactttctttcaagcgctcctgttacacctcaactttcagaatttctttctccctcaattcaggcggctctatctctggaaacccaagagctggacctctctcacttttgctcatctgctgatggactcgagactggtaaactcctcaggtgtttgagatttgatgaactaaaagacattgcaaggggcatgaacatttggaagaatggtttgactgtgggtaccgttttcttaatacatgaaacttgacagagaattctccaataacgactttctctctacaaatcagtacgatatgctagttcagcatcttctgtctatgacgaaaacacaatcagtccttcctttcttgtctactagttctcaaagtcttagaaaacctgctacgactgcgaacaaacgacctgcgctcaaacaagcaactttatcgtttggtggtgtttcggtccctcctcctcccctctctggtggtatagctagcatgaagagagaagacagcagagctagactattgaagtcaatcaaaaacgttatgggtagagcagtggtggttaatgatgatatcagaaaactctggaataggttaaatcttgtgttctatagaaggtttgttgaatccattccggtctcctctccttcgtttgatcatctcttctgtttttatatcctaactcttcttctcttgtaatgacgagcacagcacatccgcagcaccttcgatactccttccgcagatccttagtagagccaacagatggcattaccctaaatacatcccaacccgaacactctcacttttccctgatcgggcttctctggtctcatacgaacaagctctcctccttgaggttgaagtggacgatgctctaggtgaacaggaaactctgaacggcaggcaacctttttctaaatcggcaggaccgaacagtaagatcaattttggtggagcattgggaagaaaagaaggcgcgatggtggtgagagctatctgggaagttgtttgggacagatggaaggaatgtgtcaggtcggccaaggagagagatcaagaaacttgtggacccagagctatagcagataggtttcaacctggtccgttccgctccactctgtcctgttcgagattgtctcgtacttgaggcacgggagaatctaatatcttaacttaatcggcttatcaggtcatgttttgacgagaattatcgctaaaggcgctaatgctcttggggtgttacacgactacgacacagaatgtcgagttctcaaagcacttcttgaccaaaaagtgtggagaagaggaaaacgagggttcgtcccccttgtatcacgtcgtttctttctcaaatgatgcatcttcggtgtcttatcttcgagcccccttttccaatctagcgcttggtatgagagattggctctcgttctgatgacccactacaaaggtgatcaagaattggacaagaaggaacaagctctcgatgtctgtctagatggattggaagatgaagacactcacttaagtgtgtaaccacgtcgtttctatcgtctttctgctaaacccggaaggttcattgcttgttctgatcggatacataccttcccctcttttggataatcagtttaccgaccatctctcataagacgtctaaccagattagagaagcaactcaagattccagcgagggactgccatcgatgtgaaggagaactcaaagtatgcgaaaccgtcacacttggtgcacagagagtacgaaaggtagaaagtggattggatcacgaatcggatgaggacgacgaccttgaggatcagtccatagcacaggcgcgatataggtcacgctcgagatctaaatccaggtctagatcggtctcgatatcaagatcttttggaccccaatcaacaaagttggacaccaaagattcaggtgccagctcgagtgaggctaagaagccatcttggagcggcaaaagtttgtgggtaggaagaaatgagacagaggtaggggtcgaacaatgggtgctggaacagtgggaagataaaggctggaaagggtgattccatacatctgtgtttttcctttccgtgtttctatgcagaactatagttgacttctgtttgaggttgactgtaaacaaaataggttccattcagaaggttccatcatcactacgatctttggtcttctcttttgggacatatttttcgccgtcgtaccaggagcatttgagaccgcatttcagacggctccgctcgatctaggagaggatacgtttgcgctcggtgcgtccttccaccttcttcaatttgatattaaacactgatgcaaacactttctcatccacctgtaacttagctcgagcacctcttatatcggatcgtctgaacgagatagaacgtggaaacgccggagaaattctatcaagagtggacgatagagaaagagaacacgagacgatgtgtgctggtgtcagttggaattaccagaagcaggatttactagatatagtggacgttagtcatcttcgctgtatctttttgtgtgatagcgatgtagctaaaactttgatccggatgtttgctccgagtcgtgtcgtagtgtcttggtggtctcagcctatcgatcgtggtcagtattctctcctcgaactaagcatgttctctttcctcccttacgaaaatctcatgagtttcccttcgctaacagtgtcgaatgctttgtgaggagtatggccatcgaaccagtggagttccagatcttctgtatgtttcttttttgcatcgcacccataccacaccttcacagttgatcttttccgccctgaaaatattcttaattatcattattctgtcatcctctttgtcatggtgaagagtttggcacgtccctacactccaagccagattcatcgaagtgaaaggtccaggagatcaactttcatccactcaaaagatatggatagacgtcatgttgagtgcgggtattgatgttgaggtctgtcgagttgtggaaaaagcgcgaagtttcaagagagtcgttagtggggatatcggtgttgttcagactggtggagggggaagcacggacgagaagagaaaatcgaacgtgctgagcgaaactggggagactgatagagatattgaaaaggagagtgggagtatgagtggtgaaggagagatcaaaaagattaaggttcatcgagaatcaagtctagagagaagaaaaagtgacagtatggtgaagaaggaggttgttgaatatatatctattgatcattctgactgaacctatttttcttgatttgacacaatactcggattattgatgggataacttatgatatgcggaacaaaaagaagggcacctagatataagcctatgaaagagaacttgaacggttaacctctctttcgtcctccgtaaccccatttgtcgatcaagaactgagtcataaattcaaacaactctctatccagtgtatttacccccaaaaaacaagaataaagatgttcagtatggtttattgcgcatcccttgcttcgtgggctcctctgagaggaacacgatgaggagaaaaacatacctgtaggctcctccacgagagatcgaatgagcggaatcggtgaacatcctaaattgatactttctgactttgttcctagtaagcttctccaacaaagaagcagagttcgccaagtgaactaaggtagggttcagggcgtttgatcaagagacaagcagagcgtcagatacaagcccttcgccatgattgtccagtttaggacatagatttgactatagggacaagaaaaggaagaacccaccgttatcatctccacttccatgggcaagtagataatcgacgttctggaaaccagtcatattattgaccccgccagctgcatatccagcttggttctgctcaggagtgagcatatatcgttcggtgctgatatgagcagtgttgttttgggcaataagacgggatggtgtcagagcatatacacaaaagcggtttgggactatatctgctcaacttactaaacggaatcgtaatacctaaaccaaaaaagcagaagattagtgttcgtagataggcaacatccctgataaagaggcaggtacttacttccaatctgtcacgggagctacagagattccaagagaaatgacaccagagtcggcttcaatgacttttgcagtcaaatatcctccaaaactcctacgtaatcccatgatacaacctatctagtattagccaagaagggaagataagcagaaggaggagaaaaacgataagcgcaccatccccaaattccgactctccgtttgtcgacatagagcttcgtgcccgcccattgtcgagctgccgcaatttgatcgatagcttcgtacgtccccaactgtcctcgaattgggtctctgttgaacgtaaaccaagaccgtttctcttgaatgagcaaactgacacatgaataagatataaagagtccaaagtcgtacctgaatgcttttcctttaaagccagttcctcttccgtcgacgatgagaacgatgtactttaactcagtcgccaaatagtcggcccagccaactgcgaatcgagtgttgaccatctgagagactgggccgccataagctacatttctccagataggtgaatggtgaattgttgtaggttaactcgaggaaattttaagtataagaagacttacgagccaacaaaacagggtactttgtgcgtccagattcatccatgttgggcggtctgatttctttcacattaagctctaagctcaaatgaatagttgatcattcagcattatgacttcaatatgtaatgaggatcatagaaacaaagcatctatctcaccaaatccgtccgatagaatggtgtattgagaggaagatggaatgataaaccgattgagagtctcgttgagagctttgttatcttctagtaagtaatcaagctctacctcaacagaaaagtatacagaaacggaggctcaattatgaatctttgagtcaaacctatagctgatatgaaacaaatcgtgtagcgaaccttcaccgcttgtctgcctgattttttgccaaggaacatctggcccttcgtaactcaatacataaaagccagctttcggggagaatgaaacagtgtgatagcttggtcgagtcgagtccgttagcgcactgattaccgagttgaacgtgtcgtccgaggacacggtgagcggaagagtggcggagtagagatgtctttcagtagaggggttggcagcggtaaaataactgatgtgattttcagagaagattgtgttggttcaataattttcaatcacaatgtctgggctggctgacaaaggagactcacacaatacccaagtcttcgttgaatcctttgatttccccgtcaacctcccaattcccttcggttatccagacaggtttcgcggctgatgtgagtgggaagaaggcaatgtggttaaagccttctgaattggggatcacatctaggtaaccttgaccgtaaggaaccacatattggaactatggattgttcaaataggaacagaacgttgaagatagatgagctaacaatgtttttctttagtatttcgaggagaagatcatgagtgcgctaatttcaacaaagaaaacaactcacatgatcaagccatccttttccgccattcaaactcctgacgatgtttcctcggatcacaccttcttccgctagctttccaaacctatctccttgtccaatctcgaataagacaacgtttccgcttgccgcactccgatccgtctcttttataagaagttgggttttatttacccagaccaaatcgaatatgatctgatctgtcgacggcttctgatttggccaggcgagacgtcgaatactctgttggacgagtaaagtgagattggcatgggaagaagaggagatatcgatggccttagactcataatatgagagtgaaaaaacgtgtgcggtaaccaaagggtttgggtatctacaaagacaatcaatcttagtagtcagcaaaccggctaagtttgatctcggaagaatatagcttgattgtagactaatatagacaatgtaacttacccaggcttgggatacttcatgatcatttcttttgggtagggcttaatggtagacaaatcttcgtcgggatcatatatgggaaactcgtattcaggcacatctgtctcatcgaaccgcaggtagacgatttcctgtccagaaggtgagaatttgaatgcaaagtctgttccaaaaatctcttcttcgtagacccctagtgatacgatcaagaaagcattattggtccggctggaatgaagacctgatctagccaactcgatcaatacttacaatctggtactccgttgaacacagttgggcttccatccaatgtaactcggacgcttttcccgattccagttggagtgatatgcttctcaggaagaacatacagatcattcgcggatacataagcaaatccgtgaccaacagtagaccaacttgcataagcgacagtggcgttgagaacgagcgggaaggttttgtttgattcgaaggagtgaatgtagaatttggagtgtgaagagtgccgccattgcttttgtatcaacacagtgaaaaaagtttggatgtgagttgcaatcagtagttcaagcatgtattcctcagaagcttaccttcacacgatcggtttgaagagagaggtacttcaaatcgggcgaactaaacgattcaaccaagcggggtcaacgatgctcaatacaatgagtgatggtatgaagagcgatagatacagtttccagtcaacaaagttgatattgtttcccttctcgtccacaagcaaagttgaattaatcaatctgatttaaccggtcgacaggttgaaggggtgagtaaggctttcagttcaccatagtcaaatcaggggagagggaggaaaggtcaaatcacaatttcgtagagtttgcctgattgacattgtccaagaatatgtttccatcctcatcttgggtggcaatggttccatcctcagctgtgtgaaaagcgagatctcaatctgatcaggcgcgtccgaaagtaaaaatcgaggcgatgacacggaggaattgagaatattcggaccttccttgacccaggcgacattctttctctgaattgcgaaagtgccattagtgacatggtcgagcgtcaagtgcttcctaggtttcttaagtatgtgtgatagaggagtcgtccacgagctagcggcaaacgtgccgatcaggatggcgaagagaacgataaaagccaaacaaatccgtttcctagttcgagccggctagttcaggagtcatgataatttcgcatcattcggaacacacaaaagcaaggatcgttcgatttgaccagatttctgcaaaccaaaagacacagaagaacctactttactacccttaactaactcttgtcgagttgcccatagtgtatctgtttcatcctctccctctacttgttcgtcaagttgatcacgcccgtaatcaccgtcctccaatctgttttcctcttcgaatcggtccttttcttcaaattcttcatcagagctaggaagggacgagactgagtgggaccccagactgaagattggtggataaggtgggagaggtggttcggctggcatggatgatggtgttgtggatgtatggtcttcgagagtatgcacgcgttctcggctgaggccgtcttggttatttttgaatagttacattctaatcaaatccaatacataggcaagtcttactatgagaaatcaccaagaattccgaagccttcactgtcaggcagaccagaccatctacatatcatacctccaataatcccatacaattccactctagacctcatacatctgtgtactcaacatggaagatactgagagagtcgtgaggacatacatctcaactggcgcttcgcaagtgcctgtggagcttctccaacgtaagaacaattttaggtttcatcatcaaaactcacctgctctccgtcgacggcccaacccaaaccagatgatgcgacgatgacctcactgatcgtgcaaaatcttacaatggatctcttttcctcgggcacagttctcgatgacagctccgttagtcttctaggagttgttaaagcgttgggcgaatacttgacatcaccaaacgaggaactcagagtcagaggtacgcctggccaggaatgatcatggtcttcgatgccggcatgtacttccatacaacacaagttgattcaatcctcctactctttcagcccttggtctactctcaggtactttatccaagctttccccggcaaaaataaatcgtcaatccagtatgtcgagcttcttcatatgtatatgaatattcagtccgatcgagtactcggttcatgacgtctttctgttgtgtttgaaacggtgaagctcgtgtgctttccagtttctattgcgacaagctcgaagacctttacgtgatctctccggctcttcaagggttgtgtgttctgagctccttaccgacatttggctcgggggaaacagtccaagtctgtgaagcgtacgtaatttatcgtccaaaccgaatatctatacagttgttaagcaaccaagacataaagaatctgatgattcgaacgagctctctctcgaacttatttagaattttcgctcatatcaagatgaaatctctcatgcaagccgttcggttcctcgtattcaaagcaattgacattctcatggcgaaacaccgtgatggttagtctgctcttcatcgcactgttttctagctcagcatgtatgctgatcaaccgagatcattgtccaatctggttatcagctttgaaaaagatgggtagtccattcgtggccaaatattgtcagatcgccgacggtgaaaaagaccctagaaatttgttgttggcattttcgatagcaagagttatcctagttgaattcgagattgagcctcatgccgaggtaagttagtttcccttgataactaaggctacaactagaaaatttataactctttgagtcccattatgctttcaggaactgtttgatgtcacattctgttactttccaatcacctacaagccccctccgaatgatccatacggtatttcgtctgatgatcttcgaaactcccttcggttcgtatggcttcatgttttctcgaacggctcgccaacatcattcaactgattggcgctccgttctcatacccgttctgatttgacagatcatgcttatgtggaacacctctgttcgcaaagcatgcgatgcctcttcttttagacaagctaaccgcctcagggggtgatatgaaggtttgaccacattcctgtttgatactttcactcttattgtacacaacaggaatacctatgtatcaacagaaagcttattgtgtcttctcgtttctggtttgcagaaggatgtactacgaactttggcaagctgccttgtcacgtttgggcagggcaatgcggttggtcaggcgaatgaaatttgggaggccctcaaggttgaggtttgtctctttcccgagatcatcttcaactcgcatcctttgctaaaaactttaacatatctcttcattactctttcgtggatatcatcagattctattcacatccgatatcgagatggagactgaggctcttctcacactcgaggcatttttccgtactgtgtatccttcctcagatgacagaccgtcaggcatcgtcgctttcatcgtcgaacagtgcttgcaattgatatctgaaccggagaaaagtaaagctcaaccggcgacaagaatcctagcatcttgtttccacgtgtcttgtgtgtctgccccttccttatttcaaccgccttacttcttccccttctccttgttgaattgcgctcacaaattgcaatcgatatcattatagcgactctgggagtatatgcttactctcaggcggtgcctcagcttctctctcagttttacaagacagaagatctctctcagcgtggtccgattctcgaggcactaactcgcctcctctatggtgcccgagaactttatggatctccagattctggacgaacactcgacggggatcaagttcttcggtcgttcaaagatgaactcgtgggttgctttaccgcggggatcggaacaagccttttcaagagaccagcattggaaggattcatgcaaattgttcagattgagggatatctggacgaagaggaaactggattcgtagtgcagaagatcaacgatttgatcctggcgaaggaagcagaggacatacgtggtcccgcgttgattgggctgactgctatctctaaatcgacgcctaaagctgtgtctaacatcacccttcctctactattcaacaacttgaccaacaccgctccccctttcgaggatgatgaaggtcgagatcaataccgtcgaatcctctcctgtcttgttgtcctctgtgtggagcctgcgttgttttctatcttggttgatcaactgatggatagatttgaacgactctgctttcccagccaaggaccaacgttggaggatgatccgatggataaatcaatgatagagtgccgaggtgtttacgcatttgctctcttaaactgtctatggaaggtcatcaagtcgaaagtagcggaaggtcataccgatatacctgactaccaggaaaaaattttatacagcctgttcaggatctttattgtcgcttcggtagtcgagcaagaaggggagattgcgagaaatacaaaattgatagttgcggctgcacagttggaggagctgttagtgcaaacgctgaatattgagtgggttcattctccttccactatatgtctttcgacatcatcttgtttgatatgatatctgatcgtacctttgttaattccaaatcacagtcagcaatccgaatttgcgaaaaaagcatacgcagctttcttcgaagaagacccagctgctttgatgaaccgacctgtagattttcctctattaaccaagttcagccctatgaaggtttgcctcacatctaaactttttctgtgcatgaaactagatcgattgaaaactgacaattggaggttcacacaaccacagccggacgctccagaattccaaaagaacatggtcattcttctttcgtctgctgctattgcattaagacctcaggtttgtcatgtcaacgccagtttcatcctcaaaagtggcattgaatatacactgacatgctactctgctcttcaatgcaaccggtgtcttgcctgtcgtaaagtgtgcattacctatccatgacttctcgaactttgtttcatctgtacttgtttggtcacttaacactgcttcctctcaagctcaaagcaaatcgatgttccatctatttggacaaagcataaacaaattctgtgaccgtaggttttccatttgagcttcttctcctccctttccataattttcattgattgactcttatgttataactactcacgatttgcgcagagctcggaccgtttttcaaggacgccgttcctgaattttgggagacagaagtcgtcaacgtatctgcgcctgtgtcacgccggaatcgttccattcgaggatgggtttgggtaggctctagttgatcgcccaattgagaaaagcaaaatttaatatatcttggctgaaactaaagatctttttcgacagctttgccgatccctcttggttcgaagccatgaactcggatttaaatacctcgatcagttccttcgactgctgatggatgagactaatgaatccctcgcttgggaagcggccagagcgcttgctatcattgcagaaggcgatggagagggcgtattcacgaagcgaaatcatactatcattcgggtatgtgtctgaatcgtcttgaacatctctcagacctgatgtggcttctgagcaatactccttcaaatctttactatacgctgtagctgttgcataagcaaaagatcttcaactttgtcttgccaaagttggtgcagggttacactgatagcaaaggtatgggagcgttcctcttcctcttcggacagaccagacactggaaatgattggaatgtttgactcgccactatactttaaaacctgtcaactcttccccggaacttaggttcatctcaccaaagggtctttttggtggccttagcctctatcatcagaatcattcctcgatcactttgcgttgccgagttattcactgtttgtcgcttttacctcttctcttttctgcgtccgtcatgacattctcatttgtctcctccttctcatctttgacttgaaattctaaacaaccgtctgaatgaaacagctgtttcctctcctactacaaagtctggatcttcctgatccagaacttaaagcaaatgtgatggaaactatacttgagcttgctcaggtcgaagatcaagtcgcacaggacgcggtggagaaacaggcgggaaagattgtagagggcttattaagagctttagataaatccagaggaagtaacgaggtccgtcatttcgtcgtctatctatcttcagaaaaacttcttccatatattgatatcgagttgaactgtaatttatgggcttcgttcacaaatcttggccttgcatcctcttctcttccgtagcgctcgagatcggtagcattgatgacattggcagcgattccggatatcgtccgttatgatatccttcattcattcaagccgaacgttttgagggttctgggaac

SEQ ID NO: 2152 - DNA, 80363 bp, Xanthophyllomyces dendrorhous
tatatatatagatgaagccattcctgagagtatcagagaccgcctagctcaacagattagtgtgagtaacgttggcccatattttcctatgtgtatgtgcgtcctctaaatcattcatccatctgaatatccttcccgctcctcatcaacaaacagacaagcggcggtcgattggtacctgcctctcaggccgatatcatactttttgatcctcatcacccaacacatccttcagggcctacaacaaccgatgggaatccggaagcaaatcttcgtccatggcactgggttttcttttgtttacaggagaaaaagctgctgaaaacatgtctgatggagagtcaagtcccggtttttgtcaaaaagaagaatgagactgaaccttatggcgatcaaggaggtatgctggcatgttggttagctgacaaagttccggagaggttgaagttggaaaaaatgattttagtcagtcagaatctatattgatagacgattctcttgttcttcctgcttgccctattgattcgttcaactgatcgttccgttcataacgtgtccttatagtcatatggaggtctcgtcactcgtcgtcgacagaatgcattcattttcatcattgaccctggttcagcggataaggaaacactggatatcattcacgtgtactctcatgatcgatctagatacgtgctctcatatgattgggtcacaacctgtgtagagttgggggagattgctcggttgccaatagaccaaccaagtcatactcctgttccagatggtcgctccaagtttgttcaatgtttctatcatattcatccctggatcaatgccaccttgcctaaacgtccgttcattacgaacaaccccttgtttagtagtcaccggttcacagcagaggatgatcgacatcttgtccaattcattgctcaagagctttttgaccaagaacgattacctaggcgaggtcaaagaataggggataaaggaaacaagctgtatcagctcctcgttagtacatccgtaagtccacactatcaatatattcgtatatcttgtttgggagaacgaggtcgagcaatgctgacacaagcatcctcagtacaaacctgaaaaacctagaccatgggcatttaatcacccttgggaaagttggaggacgcgttacaagaaccaagctcatctagggatggaacgcgctgttcagaagacgatcggacgtcttcagcaaggacttcctctcgagccttcgtcgtcgccctcgccctcgccttctgtgccttctgctgctccttcgattcaacaacgacctgcgtctgaccggtcaaacacgttgaggaaaggaaaaggtcgcgctgacgagaacttcgatgagtcgggaagttccgatcggtatgatgacgacgctgattatcaggatcgcgaagacagttcaagtggacgggctgacgaggttaactatccgccgtccataaggccaaggaagacaatctcagagatgatggctccttatcggcccagtcgacctgttcagagacttcctccagtgattagcgaacgaccggcaccttcatccccggctccttcgtcgcctttagagggtcctgcgagacagaaactcaagcatccattagcagcttctcaatatagctcttcctctactccacaaccaaaatcaactacaaaccatgaccctgagtctgaagccaaatcgatagaggatgaggaagaaggttttgaccgaattgcagtccaaagtcatctcgagctcacagacgaagatgatgtcgaaggcacattaggcgatcctaactttgaatttaattcggacctcaattttgaatcagagtccgcgcctgaataccctggagaatcaactcaacgcgtcaagcttctcatgaacactttccttgatgatcctgcatcagttgaaacaaatccgattggagcaagtcaggattcttcggtgtcttggatggcgaaacgcaaacgagaagactatggtgtcgcaggggaagaggaagaggaagaagggccggaaacatatcgtctcagattgcttcttagtgatcatctccgttcccacacccatatatctacacaaacgcaggatcgatcgccttcacctgatggaacaggatgggagtagtcatttttcttctgcctttttgttaatccattgtattgtagaatgtgattgcgacgatcgatgccctttgtatgtattgcccacttcgctatgaatctaagggtgactgatacttactctcgaaattttcgaagatcaacttcgcagaagatgatgaggatgacataacatacaccacggagttgaaactaaatccaatacaaaatagatacacaacagatacatgaacgaaagagaagcgtgatgcatacatatgataacgacaacggggcaaagaagatattttatcgaaagagtcttaggaaaaaagacgtttgaagacgtatcctaggttatgtacccaatacatgacccaagtgatgatcatctaaaagaaaagaacggcagaagcgagagaatcagatatggtttgcgcaaagaagcctcgagacataatgaagagtttgagagagaagtgtgattaagccgatgagccgagacaatcggaagaaggaagaatagaaacaatggttgagaagtgatgggagatgtatgtgatccatggccatagccaacgaacctcagaagggaagacagaagcacttgttttttggagtatgatagtataatccggaacagactagaaggtaaataaggaatagaaagccacaagaagggaaaagggaaaacgagatcaaaaagaccaatcacatacattccagaacgacaacgccactgtgccatcttctggtctccctagcgttttgagtgcacctccgtttcgtttgacggtaatcatgaaagtctttttaccagacgtgtctggcacactagttgacgaagtttcgtcggcgttgtaccaccacctaagtatctgaccttggatttcgtacctgccttccgaaatgtgaacttcaacgtccaattcaaaaggaggaagcctcctagtcgtttccttagcttggtttgaaaggaaagccgtcgagccagccaagtttgttctcggaccaaacgcacttccagacgaattggaagatgattcaaaaatagcaaaatcatcgaaatgcctctcgtttgtctttgggtcacattcagaagacattgacattccggacaccgactgagaactgcctgggataaaccgtcgatcggaggcgtaatgaacccaagggagatatatttctgtcggggcagtctgggacattatctcatgatcgtccatctcgactgtaagcttgaaagtggaagacttgatatcaaacgacacatccgtcggtacacccgtagtggctacaggatacggtcgactgaacgctccaacagcacgagcgccgtttatcaacaagtcgggagggaggagagatgactcgcgggactcaaacagagtgggctgactggcgggagaggccgaaaattcagacggtagggacaggctagaggtcgaaacagaaggaagatttgtcttagagaatgacggaatggcggaattgtaagggcgaatgtcacccttgataacaccgccttgattctgatacttgtcatacgcggcattcgtgtcatcagatgaccacaaagaaagatcctccaggttccagttgtccccccattcatgtgagctattcagacgaaggatttggtaagtaaaaggcatcatcaaacggagtcgaaccaccgttctgattccaacaagattgtatcactcacttatcaggcacataggtccagatagtatagttcaacacgttatttccatcggccgcattgagtgtggcatctagtgctttctgttgattcgagaaatcgcctttgccttccccatcaggaccatatccgtacgcttttttgttgtcgagatcatacgggataccacactctccgatccttcatgaatggtcaaagattagcgaccaatttagagttaacggaagtgtatggcaataatgaccagacgtacaacgtgggatattgtcccagcacatcaaatgtgtcctgtttcagaacaccaagctgctcttggaaactctttctgatgttgctttctccgatcttgattgcttgtaagattgtcttgtactgtcctcgcatcacacccaatgcgtccgcattaaaccaattccagtgtcgagtcctgttgtgaaataacgtcacagaaaatggttggaccagacatggtgacggaatgttagttcgtctttagtgtattcagcaccctacttgaagatgacaaaaccaaggcacgtacatcaacgtcaggccatcgtaccaatggcaactagcgcaggctcgccctgcgagatcctcttcgtccaacactggcggtcgatggaacactggaggctgcacgaaatggattgcctcgggatgagcctgacgaattctcttggcataatttgaccaagctggccgccaaaaatctgagatgaaggaaatctgtcgatgagggtttgaaggaatggcttggaagtaatcttttttgaaaagagtcgaggtcacgggatcccagacaccatgaagtgcccagactattatgtgggtgcaattgtgtaattcttgtgagcataacggaagaagacaaaggacatagagaagaacaagagaactgactgcacgacccaagggtccatcctggatctcttttccaaccccacttggacccgccgacttctgcggctgggtccagccagcaagtcacgccctgcgggtcaagcaaaaccgatccatcacgtttaggtcccatcgccgtgaatttctgtatcaaacaatgagggttgatataattaatgaaaacggtcagagatagttcaaaattcagactactgacccatgactcgacagtgacagcttctcccatcgccaatctcattccctgaaaagcagtgggcgttgggccaagtctatgagatccaagccgagcatcgcggtcagtctaccatggatgacatacaatatcctgaagcgagaaaacaaccgacttcaaagtctgtgacttcggaataacactgatatcttcatatcctataaggccctcactcggttcattgagagaatcccatccaacgacgcagacttcaagcagatcgcctgcatctttgatccgactggcaagcttgtagatggctgcctggtaatggctctgaagatagtcctggatgttttgtccgtcaatgatacagagaggagcaaagtctctgcctccgaagaagagagtaaatacagtctgagatacaaaacgataaacgttggtaccccaaatctagatataaggtacaaagatagcggttaacgtaatggtatcgaggtaactctatttatgaaggcaacataccatggcaggaagcttggctggatcgggattgtctgcatcagggtattcggcatgtatgaatgcagccgatgttttggtgaaattacgtggattgagcccgcaggcaattaaagtccagtatggtgcgcctgaaccacccgagaatcgagaccactaaatgcgtgagggattgcagaggaacaaagaggataagacgttaaaatcgaagagtcgagttaaagatattctagaaggaagggcacatacgcaatcctggtgagggtccatatagacctgcagcagtgatatattacaacaagagaaagaagtacagtgcttagtagattgtctgacagacatggcttgagacaggatgtgacgtacgagaaagccgtattctttgcactttcgtaagacttcgacagtgtagtccatgaattcttcatcatattttcccctatttgaacatggcaatcgtacattgagataagacattgatttcctataccagagagcgaaatcgacagggactggataagatgatacgatttgtacgtacggtccttcatgctcaatgctttcccaggtaacgacgtaacggagtacgttgaaaccccatcctcttaatcgagcaaggtgaatgtctgcactcccatcatccaacctaagtggttggccgacaaacgattctccgccgttctctgctttgtcccaaagatcatccaggcactgagacggctgggagagagggctcttgcttgctcccgagagattgattccccgtagaagaagatgtcgtccagcggtgtctgaagtatagaaagaagcaagttgataagacttctgtgggatatatacatatcaggcatgcggagccggaggtggagtaagttgatcaacaggagatagaactaacctctgaagaaagcagaagatgagtgaaggtaataatcggggatcggttccgaggtcactggcgagtgtgtggcaggaggagtcatcgatttcagagttctttctttctctattccaacagtgagcgagataaaaaagacaacgagacaaggagagcaggaggtgaaagtgagagatgtagaacaggaacaggatcaggaacaccgagataacattgagcaacggtaggtgggatgagtggttcgatcgtgtcacgtgaatacacaaaggctatgctcaatcgatgacgatttcccgttgcgcacgtgtattctatcaagaactttccaaaagacactcactttatcgcttctaggccacaccctcttgtacaacaacagccaactctttatctatttggtcaaatacttcgacttgttcctcccggatcgaattgtctcaaggccaattgacatttgaggctggtacggaaagatgaagttcgccaggtatctggtaaggttccatcctgatgaactcgaacgttcgatctacatgctgagagactaacccaccatcctgtgtatacgctctgccttctttttctttttctttgttttttttcttttgagacatcctaagcaagagaatctcacaccagaatggagaagagtgtgtttccgtaatattccttcattttttgcagtacagcccaaacctgactgtagtattgtctggcattatatccttgcttaggcatacatagattataaaggtctgaagaagataatcaaaactgtgaatccgaggagtccctcagccttccggagaaatgatagctcggactctgatgatgaagctcccgtgacggatgtctctagaccatcccagtctgcgacaaataccactactcaacctacgccgtcttccttctccgctaatgaaccgcaactaacgaagaaaacttctcgttcgagccatgaagaatctgaatcgggcagggaaaccgaagcagaagatgaggcagagggtgttcagcatattccactagacggcttacctcctcctcaactccaaggttcccctctcaggcagcctgcggcgtcgtctttttcgctggtgccaggcttcatgaagcctaccgggctcacaagcgagacatcagccaagagtccttccttacgagcctcgtacggcagttttaattctacgccatccagacatggctcaagacagaattcttcgcccagagtcgtttcactgcacccccaaatttcttctgagttagcttcagattcccaaccgtcttctgacaaagattcgtcgaacttatcgtcgacgggaggtggtcttgaacggctaacccccgcatcacttcttcatcgacccgtaccagagcgaccttcttcaactctacttgcccctacctcatcatctgtccaattccgttcgaatcttccctctccttcatttttcaaattgaaaccatcgcgtcaatcccccgcctcgaatccatcgcgcaccagtgcgagactgtctccactcttaccagaatctcaagtcaagtcctcgcccgtcacattcggaccgttgattcatgatctatctaaaaaaggagatatagcagcgcccatcattggtcaaaccgcccatgaagatgaatacgaagagatgccgcctaggacgggtgtattggggtatatgcgtagaaggacctcgaatgcaggtccgcccagtacaagatcgcctatggcaacattggatacgatcttgccaacactgttaccgcaggaaaagaatttttacgacgcaatcgagcgcgagctcaataaggttgaaacgtccgtatcctatttaaggtatattttttcgtcttgagcgggccacttgctgatatccatctttcgttgctctgtttgttacatcagattttactgctcgagagaagatgagatgaaggaacgagtgagcgtgatcaaggttcaaatgagagaattagccgaacatcgaaagatattttatgtaggtctcgtttctcatcaaggaatcacctccacctttcctctcatcatatagactaatgcttgtatcattcttggcgttgtcaaagcaataccatccgacctcaaaccatttacctgcagaatattttgggcgtgttctcaaaccgattgtcaacatccaccccgctctggccccttctaatttgactcaaaattctaacagatcctcatatccatccgccatcaatcatcttcgccagcaacaatccaatcaacaaaccaaccggggaatagctaagcaagctatctcttctggaaaagaagatgagcttatagatgaacacagacacaacaacgcaaagggacagttgagtgacccgacggatgcggagtatgatccagagttgtacaaaaagtataagcgaaagctgaagcttgctgttttggagtgctacaaaggttcgtccgatcgaacaggaacaagagtccctttacggtgagctgacatgaatgtgtgtttgtgcccaaacctcggatcaggcctagaggtattgaagaattataggttaatgagcatatgatcttagatttagagttcctcttttgaagcgtaactgaaagcccattacgttgaatcctttcttgtctctggtcaaacaatcaacagaatcctcaatgtcactggattccggaaggctctcaagaaatttgagaaagcttcgaagatcaaactcatggatgtttatacgaaggaacgaatccagaagcagcggttttctgtaggtcatctgtcctttccctctcggaaatgttgatacacatataaaaattgagacgtttctttgcatgtgtcatgttggggatttatctagcatgcggaaacggtggatgagatgatcgatgatatggagaacatgtatgctactcgatttggtcagttccctagtccgggtatttcttttctttacagttgtctgagtatcgctcaacttggtatgtctcattgttggaaatctgatggcagaaaacggaaatcggaagaacgccagacagcgtttgcgagtatcagcctctacaaaaacacatcatttcagcatgtatcggtccgggctctatatcggattcggtcttcctgctctcatcgatgggatcgtttccagtgagcatactactttctttccttgttcggggctcttccctgtttggttcgtttcttcttaaaagaaacaagaacgggtgcgattgattgaatacgaatctatctctacaggcttccacccatctgtccgacaggctgttcccgcgtggggtcctcttcttcaagtttacgcggccatgtatcttccagtattgttcgcgatgctattttacttgaatttgaccgtctggtcagattcgagaataaattatcaattcatattcgagtttgatttgagatctgtactaaattatagacagtacgtatgacccaactttgttattgttgaatcggctagccggatcactgatttatgttcttcatgcatggattatcagatatctagaggtctgtagctgcctatcctgaatagtgatactttccacgtttattcttttaactgacaggaagaacccgtgctcttttctagattcctgccttcttgttcttcatgctctcatagttcgttgattttctccttcgctaagcgaattctgttagattttgaaagaatcaaactcatcgttgtaaattggaacagtgctttctggtttacgttccatgaagtgggttcgcccaacatcgctccgacgacatggcctctggcctggctcgtattcacaatatgcttcttcgtcaatccaataaacattcttcatcggcccgctcgattctggttcatcaggtttgtctcttccaagtcaggctatgatccgctctggaaagtcttcgacgtactgactggaatgaaatttctgaagagctttgtggagagtttttactccgttttacagcagcgttgaattcgcagctttcttcttagccggtaaggttgcggttctttgtttgttttcgacgacgaagctcactagaaactgtttctttggtttggatgtattcagatgaattgaactcattgatctttacaatgtacaatatctggtccgtccctcttctttcatgatacttgactctatcgaactccattcctgatccaactttttttctcttgatataggttcctgggctgtgcacaaggaaacaactggaccaatgtctacgaccattgtgaacaatatgaatcctggatcccggcagtgctgtcttgcctcccacctttgttgcgattattgcaatgtattcagcgttggagggattcaggagtgaagatccatctgatcaacgcaagtcgctcatctatactcttggcttcttttttgattgaggatctgaactgttctgatctaacttcttggattatttcgaatcgtcaattgggtctccaggctggaaaatatttgtctaccatcgttacctatgtcttttactacatatggagatctcgaggtctgtacttgttgcttctctcttgattatttctaaagcttgattgagaaagaaaaattttcacgataatgacaggcaattccatcagagatgctttcttcccaatttggttcgtcgtcgcaaccgctggatcgatttatacaaccggttgggaccttttgatcgattggtcgcttcttagaccagaccgtgggttccttcggaaagacctgatttacaccggagcgaaaccgggctactatatagctattgtacgcctttttccatagtttctggctggagtattgccaggaaggagagatccagctaatcgttctcatgtgtttattccagattaccaatgtgatcgttcgattcatttggatagggtacatcccgccaggtggtatcagcttgaggctcagagcaccttgtcagttcatactctctccctcatcctggcttttgcgagaacgaatggacacttacatgaccaaggtgccttagtgttttaccttctggagatgttgagacgatttcaatggaactttttccgagtcgagaacgaagtaagtcaacctatccagctatgtcgacctcccaagtcctaatgaaagatttacttgattatatagatgctcggaaatgtggatcaataccgagtgactcgagagcttccactcccctacgatctttcgcgagaaccagattcatctgaaggagaagaggccgaacatacttccattctttcaccaagaatgaaaggaaagaggtcagtggggagtccgtctgttgcattgaggttgtcgaaacgaaagtcaagagggacttctgtcaatggggaacccgcggagaatgtttgatcaaggaagagaccaacgattcctcgtccctattctttcttcgatttattttatcgtttttcttttaagtttattctaaaatgttaaccatcttatatactcacatacgcatacatacatgcccacatgcacgcatacacacaactcttgactcatcgcctttcgcttgtctttcatcaatccactgttgtgttattcatgtacgacaaggtttcatacttatgctcatccatctctagctcacgcacttcctttctctcggtaatttgcgcgttcgagccccagtgctgccctcggggttatttgttgtgataaacgcgttataaaatagacgccatacattacatctcaagaatttcatccttgttcttcgttctttgatatgaccgcatcgcagactttctcttcctcgacacgacgcgcgctctcttgagttgctaagcgacttgtaaaggctggtacaattttatagaagattctcaagtacatgtcttgcttcctgtttgatcagatcccatccagcttggacatggtgcttttcagtagagggtgttcctatggcaaacctgatacaaaagacgttttctggtaggacggtttgctgttgttcacatttattccgagacaagaagggaagacgagtggtaaagcttgtcgttttagtctcttgattgcgaggtatcgaggagaaatacgtaagaacagaagaaaagatagtgggagaagaacgaacggttagaaggatctctctcctttcagaaagcctgtcatacaataacctgttgatcctgttcagatcattctcttccgtcacccctacaggcttcaacctgaacactactagcgccaacatctgtttcgctaccagttcccaaccttcctctttttcaatgaccgatcccaaatcttgggctagtttgactgatttccgaatgtgtgattggaatccctcaagcccgaaggaacgaagaacgaaccacagtttgagtgatcggaatcgacgtcccaaggagagggaagtgtttcgaagatcaagtacagatccggagtcgctttgctttgtgcgaagatattcaggagtgatatctagtgcgaagggcaagagatggcgatctttgacctatgaagggaggaaagagctcgttagcaaaggaaacatatataccgaaaaacgacttctcgggaggaaacgagaatagacttacccagagaccagtagcatcaaaatttgtctgagtcaagtgccgcacggagaacatatcagtcaagaggattgacacttggatttagattgataggagcactcacgaggccctatcggagggtgattgtaaataagtatgaggatggttcatcattgtgtttctccaatgcagcgtgaaacaaaatacagaagacatacgaacccatttgtggaagtttgaactccaagaatccgcatactgttttccatttgcgagtcagcaaagtcagaaggcagagaagacggaatggcgtacgattgatgctgccgacatacctggttgacctcgtctaatttcccgagtcctctgaattcaggacaggcataactcattcccgcccaagctgcatctatatggaaatgaacgcctgggtaatccttcactgtatcaacaacaaagaagtgagttataaagccgaacgactataagaataccaaacaagcaacgaggttcgccaagataggatatcagaatcaactgacaaacttggccgatctctccaatgtggtcaatagctcctgagctggtcgtcccgaccgttccgatgaccatgaacggaatctagaggtaaacatcagggggaaggtgagtgaagacatatcaagattaaatattgggaatggttaacgaacaaatccatttttgatatcttcctcaaaagcttttcggagattatcgcctcgaagggaaagatcattctctgagttgacctggacagctcggaagtgataccccaggatctttgccgccttcgaaccgatactgaattgttgtattcaagtcgatttgttttgagtataaagtctgtgcaaagacccaagaatagagataataatgtaagagcgaacctatgggtttgggtcgaaccatatattgtcaacttttggcttttcctctctctcaggacttgtttgatcgtcgccttcccaaggacgtcgtcgttatccaatttctcgatctgaacagctttctcagtcaggatctcgaagtaccgttctcttgcagcgacagcgacggtcaaacaagcttcactcgccgagccctaatttagtttcagtacgaaacagagcttaagaagaattatgtgcgggctagagaaggaagcaggtgaacggagtacaaaccatgataactccatgtccggttccaccctcggaagccacaaacttttgaggatttaacccaaacatccgtgcgccccaatccatcacgagaagctctagctctgtgcatgcgggtgagcaagcccaattgaaccccgggttggatactgagctagaataaagatcggcaaggatgccctcaaatgaagaattcgcaggaaagtaggcaaagaatgaggggtgttgctggtattgtgtgaatacgatatgagagttaaaggttgagagtcagtataaaccagaagctcgagagagcaaggaaaacctctaacttacccaatgggtaattcctaaggataacataaacgcaaagggtgagtctacccaagaagaaactcaaggaagaagtagtgagagagcataccaggcattatgatctgttggaattcatcggcaatcgtctgaaaggcttcccctttcttaggcacctcggaagcttcaaaagacacaaagaaagaattgaaggtatgagaaaccctcctctgagcaaagattcctacatggttgatacgagcataccggtctgtttgatgaggtagccaggttggacagcactgacaacgtctctgttctcgagtgaggcatagtaatcgcagattcggtctatcgcttgataaccggcttttcgaaagctgctctcagtgggatgatagtttaatattgtttttatattgttcagcagagactacggtcgatagatgttcatctgacacgtacgtttcgatatccatccttctctcttgcttgtgctgtgttgatacaagtatctcaaagtgggtgggtgtattttcggagagacgatggaaaaaaggctgatcggttaccttcatttcgggtctcgccgaacatctttatctagaaatcccagactgaccatccatcttttcgccgttcgtttcgcctctttcatccatcttgctctccctctctcttagatatctgacacaaacacaatgcgctccaaatcccccgttccttcgtgcttctccttcctacggtcctcttcgtccagagtacaatctcctgatccttcttccgttccatcctcgtcgccggtcgctagaagggcggtggatgaaaaggtaacggaggacgatgcattgccagcatactttgcagattccatgaatcttgattctgacgatggcttgaacgacagggtttgttttaggcctcattatctctcgttcgtgttcttcatgccagctgattcgtcattttactgtctttgaaggcgctcgaaacaatccaatcggctatcgatttctattcggccgacctccgagagatttcactctttatctcggaccaccccgaactgtcttaccacgagtttcttgctcacgaccatatcacgagctttttgtcaaaacaagggtttgatgtcaccaaatcctatgtgatacccaccgccttcaaagcttcgttcacgttgaacttcaagtctgggtccttggggaagaacggaagacacgtcgggttctgtagcgaatacgatgcgttacccggcattgggaatgcctgtgggcacaagtgagttagacctcttgaacaggagtattcgccctttgcaagggaaacatgtctcctttttctgtgtactcaagctgattggtttgtctacagcctgatcgcaatcggaggaatcgccgcgttgcttgctactcgagcagcgatgaaagcttatagaatttctggcacggtcactctatttggcacgccggccgaagaaggcggtggtggaaaaatcgagctcatcaaggcgggtgcgtttaaagatctggacgcctgtctgatggtccatccgaccgcaggagggaagaaaggtgaaaagggaacagcaatcatcacaggtactctggcggttcagcagttcaaagtacagtatttcggaaagaccgcccatgcagctctggccccttgggaaggcatcaacgctcttgatgccgctgtccaagcttacagctctatagccatgcttcgtcaacagttgaatccgtctgtcagagtgcatggtatcatcttacaaggcggtctcgttccaaatgtcatcccggatcacacgttaatgaagtggtgtgctcggacgcagtctgcgaaagaactcgacactctgatggccaagcttatcgattgtttcaagttaggccgacagatcttccgtcaagaggagacctttgagaagaagaagaaagttgctgacaataaggcttgtcgtatttacccttttgcagagccgccgccttgtcaactggttgctcgtacgagatcaagatggacgggcctgcgtatagtgagcttcgatgcaacctcccgctctctcaagcattcgcaaaagtactttccaaaatgtacgacatcccagtcaagatagatatcgaccggttcgaaggtgcttctacggactttggaaacatcacatacgaagttccggcgtgccatccggactataccattccttctagacttggtgatcagaaccatacaattggggtcagttctcagtgttgtatttgttcgatctgggtaatccactagctcgatgctgatgattttgagcacgcccattcacgttcagtttaccgaggcggctaggacgaaacaggctcatgaggatacgcttcggatgtcagctggcttggctggtgtcggcatccgagtgttggaagatgaagcgtttgcgaaagaggtgtgtctttttattgtctgctatcattgctctttagatcagtcagaccaactgatcgcatctcttttgcatctcaaactgcaggcaaaaacttggtttaacaataacactaagacttagagccttccttcccttgtttttttatttgcctatcctcttacgttggttgtatgcctatggctttgtcacaagtcaggattgaaataaacatatgatacaaaaagatatggaactgtggtcacgatcgaaagacaacaaaaaacgcagttagagttagtttcgagtaccataaagggtagacatgagaagagaggacgagaagtttaggtgtaggaaatcagaaggaaggcgaatgcgagtgtccacatggggtttatgcgctctcggacaattataaacatccattgtcttaatcactttaggaggaggtggtagaggaatggcagaacaagccagaatcggaaaagagcggactaacctgtgatccaagcaagtagacagctatcgatgatggtcgatgggaggtcggatggtgaatgaaaaacggacaagaaattcggtctgcgcttagcgaattcagaatgtcacgcacgtgacctgatgttcacgtgtccaaatttaaactccgacaaacttccatcgaaacacgtgaccgtgcgagcgtccaagtcgcctagccttctcttgggtttgttgactgcccagtttgctcactcgttctttgctcactcaccgttcttacccgcttgcttgctcttcttgctcgctcgcttgcttgcttgattctttgacagccagatccatttctgtgcttgcttgtccggtcagaaagacttcaaggtgtcctttggtctggttcggtcggatcaattgtatatacagcctcctcctgttgatcttctttcgagctcacattacgcatacgtccaactttcgttcatacatcggcatacactctcactctcgttccttctcatacacgcacctacacgcacttcaacatacgtataccctctctatggaggcacaggaacgtcactccccagagccaatcctcgaggagaccttcctgccacagccctcagacctccagctcggcagccatcatcctacccaccatcctcaccttgatccggatgacacgtcctcgtcgtccctactccatgaacttacatcagaacaagcagacctgctaaaggtccagcttcaacttcattcttaccaacaacagcggcttcatcttcatcaacaccttcaccatcaccaacatccacatcctttctcacttgatgacgacgaagacgacgaagaacacaatagatccccactcgaacaccatcatcatcatgaagacgttcttcgaatccatccgaacgataccgggatctctacccaagatcttgcacctacctctggtctccatcatctcgatttcggtcatccagtcgagtttgcagatggacaggggctccagattcactctcatcaaccgatatatgaggatccgaccggaggaccatatcatctgtcccaaccattcgatttatcatcctcatcgctctcgtttggacatgccgacctgaccgataacgttcattcccatcacagccatcagttatatccacctcatccagaccaccacctgtccgttcaaccggtcgcgtcatcttcgacatcatcgatcgaggatacccaaccgagcggaccgatcaagaagaagatcggtcgtccaggtcgcaagaaatctggagctatctcggtcgatcatgtctcaaacgtgtcgagcgaagagacgagtatgggcaccgccatcggccatgtcatgggtgcgagcgcaaaaattataaagcctactggtgggtctaccactgggccagggccgacaaagaggcttcgtacggttgctagtctaggagacgacatggaaaaaatcgagaaactcagagctcagggtagggagagacagaagcgaaagagagagcgagaccgagcgagagctgccggactatctgtagaggtatgtctctgatgtttctatccgtgactcggttgagagatcgaatctgagtgtgttcctttcttgttcctatcgatagccggaaaatacagcccccaagtctatctctggacaaaactttgaactcgaccgcgatcttgaatcaagtctgacgatgtctctataccatcctgtacaaagtgctccccattcttcccctccatccgattctacaaccgcgtctcttctggcgacgagccaaaacaatcaacctacccttgaatccggccttcctccaatagatcctcccccgatattcagacttcacgatcatgacgaccgacggcagacaacgaacggacagcccagtacacacctgcacataccccaaccctctcaccctgatccatctcccctgtcagcagacctagacccatgcacacacgctccggcacaagcacatcctaacaagattctcgatgaccaagggatgcttcaggggctggatgacttgagtcgttcaggaatacgagtgttagaagaacacatgtccgcaggtaacaaccggggagaactggtggacattcaacagtgtttggaacgggttcatacccagagaaataaagttgaggaacccaacaaggacgaagagcataccatacagtcaatggcacctgcgcaagtagcggacgcgcttggcggaggtattcgcctctccgttggaagtgatctagctctcacagacggtaaagcactcgatcgagtcgtaccgatcgagaaagttgacgaagagagaaaagatcgatgtcaggaggacggccggtctgcacagagcccaaaaatcgactcggctttgacattggatgagtgggatatctcgatcgaccttggtttggaccgtcatctctcatcgtcaccttcccgttcggatgagagtctgaacggaaatatacatccccaatctgatggatctgggaatcaaaacggaaatgggaatgaagatagtacacgcgtctaccatgcttcccttagggtaaaaggaacaaccattctaggaggacaggatggtctacacgtcgaagggcttcacgcacaagatggagatcacccggagggcttgttggagatgacaccttcgtcgtcgatcccgcttctgccatacttctgttccggttaacgctgtgtcttcttcttcgccgcttttttctcttgtttctgccagctccctttcttttgtttcatctcatggttccagtttactttctttactttgacgaacgaccaatgcctcgatttcatctgttgtgttctttcttatcaaccttactttgtatatctcaatttttcgcatgcctttgttgatttttcgtctctttgtttttctcttttcctttcgatttctatatccactgtttatctcattcttgtctcggattttgtttcccccatcccatgagatttctttttacctatgtaaactcttcatttctctttcttcttctattaattttgataacttgtgcattagtcatatcttatacatcatatacgtttcgcactacctcatccttcgtactctatcagacaatggcatccccttcttgatcgacctctatccgtttcttactgtagacggaacattgatcgaatctctatgatggtgatgaaagcaacaaggaaaccccgaaaggagagaaagagttcctacgagtgtatatgtatatttcctagaaagcgatttctggacgaatggaaatcaaacacaaagaacccgagaggtctagtcagaaaatgaagatttctttctcatcagaaaactgaaggacggaccatcgacttttgatctagttaaacagaatccctaagagttgttcatttgttcgtcagatataatttcagtcacattcaatccccgccttctaaaggctcatttcgaaagcagggagaggaggaaagaaggagaaacatcaaatgcgcgaaccgaggaaaactcacagggatgacccagtccttgcaaccacaacattgacctgcccagtcgaaattcccgatcttgctgccacatcgttcgttgggacagatgatctttccacctaactgacctgattcaaagatcggtttcatccagtccatctgatccaattgtcaatcaatgacaataattcgtatatgttttaggttagaaggtttgtacgaggggttaatagtttgactaaagtagaggaagaaagagaagggagagcgtacaggctctagaaagtatcctgaacaagccgagtttacgataatggctccaccacgaccatgtacattaccatgtccgttgacaaccgacggatgaagagctgcgccatcttcgttggtgatatcatttaaggagaaagatgaaggattgtctgaggtagagggttctgaaggtacggtcgagggatgaagcacatgttctcgtagagctaggacttttctatcctttccatcgttcgcccagacaccaaacgagttgatctcagaacaagcgccagtcgtgtgatgatgatgaagaagaagagagacagaccgacaactgctacatcgaagtcttcgtctttcaagcccggtaggactcgatagagagactgaggcgaaacatgttgtttcgggaggtgaaccgttaccgtcttcatccattgagacacacgcacacatcggattgactcaagatcagaccagctcgtgtgaaaaagcattgagctctgagcctacgcctgcccacccagctgcctatgcatgcaagacgagagagatgcaaagaagaaaagacggactcatcatgttctctacgattctctttctgaagaacgccctagtcgaccgatctttggctgatactttgtaccctcctttttgaaaaacatcgagctgactcaagaatgattctgacggtctttagtcccaaaatccaaagtaagagttttcgatcagacctctctcgccctttctatccacctgaccgagatcttgtctgaatgagagaagaggaagaggaacgaacagcgtgcaacttctctttgctttgacggcctctacagcctcatcaactgacagacctctgtttgccataaggtaagcagctgccactgtcgctgatctcgctatcaagagtgaagtccggcaaatcagaacaaggaacaatggataattcaggtgtttgttccgtatataggggcggctcagctcccttacccaactcacatggagcaaggatttccagaaaggaccaaagagagaacacatacacatcccagcttgacaatgaatcagcacgccctcccccttttctaatccattcttgacgaattgaactgcttctgggagaaaagagaggatatctgcttgaggtatatcatcgataggtatcgtcagtcggtcgatttccttcattcgttccagtcggtttcatttcgccccaattcatttcgatttaatctaatgtcagtccttccagctacaaaggagtgaatgaaaagaaccgaacgagacagacatcaggcagatcaacacttcctctcaatacgctcacgacgtgtctcactcgttctctcttcaacctctccgtatcggatgcggccataaggtttccgacccataggttctctatgacctcattcatatgttccgtcactagcacagctataggcggagaagacctagacaccgcctctggctctgactggacctcaggctcggtagaggagatagaatctaccattagtatttcggaaggaggatgttgtggagcaaatgaaaggtattcccgaaaagcctatctggcggcaagcgttccagagttatcttatcaattaatttccttgttctctcatgggcaaatcatcataatcattaggggaaatataggcagaggagatagactagaattacatgacagaagatgacactgccgggtcgaatagatttatacaaaacatggcctgcttaacagctctcggtcccgtaccaaacgaaatcgggggaaggtccgcaaaagattatgaccaacacagataacgaaagaacaggaagggtgaaagaacaatctaatctgacgacctcagaggttcatccgactcggtctcctctaatcggacgctccgagtattcctatctgcccttgagcttttcagaaatttgcttaaccctccgagacttgactcgactcgaccttctctggccttcatcacgaagcacgcagcggcgacgaggaaccaccagaagatgtaggccgagatcgaacatattgtgccgttgttgttccagccgacagcagcctgtgcaatcatagcccaaccgttcgttttgatctctctgtttgataggcatcacaaagaaggaagataagcaagtcagcggcagtatcgaacacaaggaagagagagggacgcacgggttgagccaatcctggtcgaagtgaaagacgtttcctcgaaggtcatatgatccaggtccactgcctgattcggcaagatcgcctccaaccttcctctcgaacgggtaggcctcaagacgagcgacaccggtagcaaagagacctgtttgtttcgaaatccatatgcaaaagttatgagaaaagatcggaaggggtatggtaacaagagaggaacccagatcgaacatacctcctccaacaaggaagagcaaacacgatgaaaagatgataaaggtgtgcatcccgacattttttgacgaggttgatcggtagagcatataaccgataataagcccaactaagatcccggacagaatcgagatcggaatcgtctctggctgagtcacagcggcctggattgtcgatgtttatgatagatgacatcagatcgagaagaggcacctagggaaagaagtagggcaaacactaacacctgcgacaaagataacaccttcaaggccctctcggaggagagttacgaacggaaggatcctatgtttacaggacatatcagaaggatgggttgagtttcaggaaaggagtttaatggttagaacatgactccaaggcttcaaactcaccagagagcccatcgacctcggttccaaccctttctctttccgctagtctccaaggcatcgacgttttcgaacgctttagcaagcttaattcgccatttgattcgggcgcggtcgaggcgaaggaaggacaggccggtaataaggatgaagatagaggagagcagggagaaaatgccttcccagagtgtctctgccaaggcaaacgtttcggcgagagtctcgaagaactgagaagagaaaagggatgagccgaaagaggacgttgagggaaaagagtggaaggcaacttacgatgagaataaacacaacaccgatgaagagagatagcaagaaaccagagaccacgccaagccagatctgtgagcatgaacagaaactccgaggagtttagtgacactgaactgatttgaattgagccgtagctatacgggaaaagctaccaaaaaaatattcaactgacctggaggtccatctttcgcttcaacgctttctctgctttacccatttctttgtcgtattcaacaacgttctcttcatcctctgatcttctcagtagagagaccgactctactgctctaccacgatgatcatctgcgtctggcccaaggccgtcatcggatgaagctctgggagagactgaggaaaggtcgtctgtcgatattgactctagcgaaggacgttgctttgttgcgcttgatggagtggataggatgagttgggtggtgaacgagagaagaaccgagacgatcaaagccgactcgatggtctaaaggtggaaaatcggtcaatgccgaaggaaagaaggatcgaagaggaaagaggaaaggtacatacctctcgaaggatgatgaaaaatatcgagggctagagagaggaagacccatgagtgttccagcaagaggaatgaaatcgatatattccaagaaggaaagagtaatcggtagggaaagcaagagagaaaggaatgagtacgtgtctacgtcttttgatctaaaagagagaagagaaagaaaaagacacaagaggagtagtcaacttaaggacacctacgttgaacaagccggtggatgacatatttggcctttttgagggaacaagagaagaagaacgagaagaagccaacaacaaggaagccaaagagaagcagagatgggtattgtgagaaggatacggaatagaaagaaataaagtcgctggaaggagaaaagagtatataagaaaaggggagcaggctcgagcgtgtgaaggaggggcaggctgagccggatggtgggggggagggagtggaagaccagacaggtaccaggcaccaggcacggtcatttgggcacaggcacaggctctggagcacaggacatgcagtcgccatcaggcacaataatttctccgattgtccctgagcaatcaaatacaagatcggcccaatcagataaagccttctggttcgtccatccgcggctcagtttctgttagggttagctctgtcccggctccaacgtgtgtacgtcagttcgaccggaggcaactattgtactcaacataggtccttatgtgtggtcgctccgtttatccaaaggatatctgttcgttcgagttgtgttgagttgtcgaaataaacatgtcctgtctatgtagtgatctcggctgctctgtctagtacacaatcatgctcattcaatgttcacaggacatacacacagcggcctaattggacgcaagataccacatcaacaagacaagggccaagccaacggccccaccgacgacttcgccctggccacaaccaaggccaatcaaaccgagccagccataaccgaacgagagatctaacgcggcccccagctttgcctctgccacaatcctgatctcccaagcgagctttcctgaggtctgaactgggatcaccagtgaccgagccccgtcttcaccatcatcactttccttcccatcttccacatcgggacaaggaatcgctaacgtcagcaccaccggcacgtgatctgacagaccgagtgtcacaacagagctatatctctccggacggatcgctcgctcgtctcgaccgcgagaggcaaacaaaatccgatcggtgaacgccggtagtcgtttcggactgtacgccgctggattgccgatcactcgtttgtatgtcggtccaaattcacctagcggaacctcattaaacccgacgagactttttcccgtccgctggacgtcacccagttggtcatacaccgccagcccgccccaggaccgaccggctctgtcgagatcagccatcatctgtctgaacacgttgtccggtgggaaatccttcccctgggacgtgctcgacagacgatagttcagatctccaaacaaaaacacgtggttcgtcgtgttgaacgagcttcttggaaacttcttgccaggcgatctcgtatataccccactcgacacattcgaaggcaacgaaggaaatcgtagatgggtcgtcaatcgctcatagttcccgattcggctggccaccgccttggcgtttgcatgcggtgcaaagtgtgcgcatacaaacctatatcaatccttagttcccgtgagctttcctttgttcctttgcctacttcttttcgtttgattgcctacgacgcgccaagagaaatgaagaaaactcacgtcaggctctccaacggaagccccacctcgttcttttctacccttcttctcaaccagactctcccaccaacggctgccttgttccctaccaatccaccgagaaatccaagcgcgacagagcttgtagaaacctctcctacgatctttgctttctgaccatcagtagaggcataagcaccagaaaccgtccggtcgagtgcaaaaatccagagtccgacattaacgtgggcagacgaggagagcagagtgtagtgttcgttcgctggaacagatccctcgggcagtaatgaagacgcgtgttcggataggattgaagatactttcaagcccaataccgatagcagtggagcacttaagccagcatctaatcaacccattctcacatagctgattagtgtgccattccgcgagctaatgcaaacagtacgatacatcactcacacgccgaggccaagtcagttatcctgcaaagccaagaaccaaaaaacgcatacacacagagacaggattcttgagtgagacgcgctctgataattcaggttcgataagacacaagagagaagatacgaactcttgagcaccgataacgaccaaatctggcggcgattttgccgagaaatccgtcaaattgggtacaagccattctgtgaggtcctgtacaaggccatacagttacaacctcagtttccatgacgcttctttgcgtttccataatcagcccaccttgatcgtcgctttcgagccttggagcccaagattatatgttgtctggagacatgggaaaaaagaacaacagatcaaccaagtgatctctacacagtcaagacttgagagcgtacgaaccacaaatatattcaattctttattcatccttgattcggtcgagtgagagttggattgagcaaggtggcagggatagacagagacacagatggagagatgacgtttgggcgtcagcacacaacgtgtaaccatcaacataacccatattgacagggtcggtcgctgggacttgggcggatcggcttgggcgggacgggacgagaggcgcaacggatcgtcagctattggccatatttttccgtctttccacgacaaactctctcctcctcatctcttctttgctcctctccttctcttcttcaacttctttatactctttttgtcttcaaaatggccgtcggaaacgtaagtataggtgtcggccttgtcgtctttgtcgttctgttctcttttggagtttttctctctcctttctggccatttatacacatcctattgaccctcgatcctctcttttttcttgactcaacaaaatcaaactgtatacactttcttcttctctactccttcctcttctctctttctggccctcttttcttgacacagtccatctaccagaacctcttccagcgaaactcggtctacgtcaccgccatcttcctcactgccttttccttcagcgtcggattcgactctgccacctctgccttctacgataactggaacaagggtgtacgtgatccgtcttttctccttcttttcttccttgttagctctcttttcttgtctcgaggttgagagttattgagtacgagcaaaacggagtcaaagaagagcctttcttcgattggcagacaaaatggggtggatctcaaaccccattggatctttccgagaggaaatgcatcaccagtcatctagcgaatcatcggttcggagaaagagtatagagagaaggaacgcatgggcaaccggtcgtgatatatttgaactacccggttcaatcagaaatcgagaattcaatctctgtgttgagggatgacatccagtatcgagttctcatcgactcgatcaatagaataaggatttccccaactagcccaacattcgtatcaactcttccacttttcctttcttcatccttcctcgccttcaatctctcttgctctcacaaccacgttcaaggaataattggtccttgacacaaagacggaaactgacgcgtctcttgcttcttcttcattgtcttccttcacaacaaacagaaacaatggaaggagtacgttccctcgttcatgcatatgttcatttctctttttctcaatcattcacgctgacctgcgacgtctcatccacctcgcttatccttggtttcccattttacctctagcatccgacacaagttcgtcgagtctggtgatgacgagtaaaaagctaagccaaatggcaaagccaagtgtcttgtggagaggagtgggcgagtggagtgtggggagttgggaagaaggccttcttgtcttttgatatgagagaggtgttttttcttcgtattttcttagaatgtctctattttttttttcttttcttattggaaacgagaactatgcgatctcagtctcagcacatcatcacctgtgagacgaagaaaacggaaagtgaggagaaagaataactgaaagaagaaagagactaaggtgaaagcatacgtactacgaaagaatgtgaatacagctttgtcttgaggtttgtccttcttggattttctctaggtgcattatttcttcatcatgtatttgtttcattttgcctcgtattcatccagtaaagcaggaaacgctcataaggatccagcaaatatatcaggaaggagagagagcagagaggatgatggttgaaagagggaatagatgaggaatgtacaaccaaatgagaggtagagtaggacaagaaaagccacgagaacagggagtaaggtgaaggtcgaccaagtttttcagcagaattaggtgataaaggcaaacgaaggaaatatccatctctactcgtcttctcggcgagctcgcttgcctttagccctacagttttaatccaatccaggttcagacggagaggtttgttcagccatctgtctcgtcaccggaagctcactgccggatagaccgaaaagagaggaaataagaatgaagagatctcacttttcgctcaactccaaaccacctcgtttgtttcccttctttgcatcatccaagaactgatccaatccgaacggatcgatagtcgccgtcgtatccttctcgaactgtaccggcccatcccttggagcagactctccgccgggtacactctctgttccttcgaatcgatggctcactccgagtgagaacctgtcgttctgaaggttcttcaccacaccatcctcggttccaccaccataagtctcctcgccggcggcttgtccagaggaagaaagcggtttatagatcgcggcggcagcggcagatccgtggaagagaggcttgtcatacagattgtacgcgtcgtcggatgcaaaggaaccagaaagggactctcggttgaaaagtcgggaatcaatcatcgtctccttgttcgcagacggtttggcgaggccaagagcaatcttttcagagatatctcggttctgctccctgtacacataaggaaagaaacacagcagacgtgacaaaaggaggttatcagaccaggcgttctggcaaagcaactagagatgacttacttagcaatcatcttcgctctctgttcgttacccatactctgcattctcatctctctctctctctcctgcttctgctcccttcgaagtttctccctgatcctgatctcttctgcgtcctcctcatcatcccctcctttgctcttctcgctgtcactatcactgtcactgtcactcccgctaccgctctcacttccatatccacccaacgcgccgcccattcccttctcgacagcctttgatggcaaagcgggcgtggcagcagtggtgataccagctcggtcgtctcgagcccgttgggcgagcaaccgaaggtgctcctccttcgcagccttttctttttgagcaagcttctgctgcataagcgaacgttggcgaacttcttctcgggcatgtcggtcggccacgaaaagagcctccgaaaacttggcaaagttgtcgttgatgtgaacctgttaatgaatgaaaatagaaagggatagatgggatgagtttataaaagcgagaaggtaccatatttgtgtatcagacgcgaccgcgaacgcatctacgtacatcctgaaggccacgaccgtcagcagccaatcttttgtcaagagggatggtgtatcctttgttgttcttccagttggaaatacaaggcgggatcatccaatccttctgctcctgagcggttgcctttctcgggggacttcgaagcacgggcggaggaggcgatggaggacctcgagggatcttctttgctttgaatcgagcaggctgaagaggatcctcgacgacctcagtcattttgatgattcgttggttcgcgttggaagatccctgctgggcaggagtgtaacggacgtaggacgtgtttccttgagagtcagcaacctatcaatgtatccgacccgacaaaccaagggacgtatcagcaccgtgtctcatataatcaatggaacttctgagtagtatgaaacggactcgggaaggctgggcagccttgatctttgtgttgctgagtttctccaaagcgagtctagtcctttcggctgtgttcataacttcctcctcggatggcctctctaacgaacggtcagtcgtagaaagatctgttctctgagcaataggcaccaggtctgattagacaaaacaaggttcacagaattttaagaggatcaaaaccaagacccgataggaagaagagcgcaaggaaaagtacatcagtcagcttcttcagtcattgcctcattcttcacacaaggtcaacccgaacggcatctcctgaaaaccaatgagatccaaacccatgaaaactactgacctttaaaagaagactggacgttctttccttctcgttggccttgctgagcgatggctccgtagttcacgtttccatccgagtcgacctgaagggcgagtgtgttgcccgagccacctttcttccgtccaagatcaagaggatactgagcaaccggacactctgggtaagcacctccatcagcaaaatcttcaggtcgtgacggcctccaaccacgacgtgatccgtaaggctttgcaggagttagaatcgtcagagctgaagaagatggctgatcggacgtgtcctcttcgtgaccataagtcggggtgggagcggacgagaagcgaggtgttggaagaaggcttgattgaggggggagaaaacaaagttgccaacgcacaccaagaagataggatgagaaaaaaggctcgacatggtcttgtgccacaccaacacgacccagaatcactcactttgctaaggccgccatgatgaagaaccagccggacgagcagaagagaaagtgaaggttggtggatgacaatcgatgaaggcgtaaagatactccttgtagctctctcacttaagctagttggttttgattcttttttgatttgtcaacttcaagatattgagtattacctaatccacatcatattccacctcaagatactcaaaagagtgtaagacggagggaacaggacagagagaccacaatgtctatctatttccatggatcggtacgactagaggaaaaaaatgatatatgtgttctatcccattcagagatttacataaaactccaatgactttattaacaatggtcccttctcttcttcctcccattggtattccagacctttgagcacagcattgcgctccttcagtcgaacttttcgaatcctcactgcaaagccggcagagatcggacggtgatcagatatgttgggctcgtatcgttggtctgtgtcagcaaataacagaggaacatatcagtgttggaaatattgactgaacccagtggatgctaccaatccgattagatcagatgcttacagtgcaagggttcgatgttagccggcaccctagatcgatagagaatccggtcgcacctggaagaggagatgagaagaacgctgagtattatacggaacacgaacagaagaaaactcaggtcggtatcacttaccaggctggaacctgtacgttacgtcaagtgcagagggaggatgagttgtcaatgtaggtcatgacggaaaaacaacagaaatagaagtacgtacccgttttttctcacttgtatcatactcgtcagagtttcgattatacttgtatgttggactgtttaacacagaaccatccatatcagtcggaccatagccacaacacagggaggagaaacaagtgaaagtgcgggagactaactcgaatgctacgggcggttccgagaacgtcctgagtctaaagttcggattcgtcttcatctcctttttcaactgatcatgttctaaaaggtatgctcgttctccgcatctcaagctagatatcacgttctctcttctaagatcgatccggtagttgagatcaccctgaaggaaacagatgtcatggtcgagcaccatcgagccatctcctccgctggcgtaagcgagctcgtctcggcctaaactggacatagggaaccgagattcttcgtcaagaatgctagcaagatcctggcaggagagaaatgcatatagcagagtggtaagcatagagcggcagagatctggaagatttatcttgattaatgaagaagacttacagcgtttcgagcagtcttctgattttgtcctgcagccaggtgacaattgatgaagcacatagaagaatcatccacgatgaacctggcaattatagctccctgtgttttggatatatgacagatacaaaccttcagcgcggtacaaaccgaacatggctaagcaaaagaaaagacaacagagacaaaccttgttaccaaacattccagccatccctctctttactgtggtgatcgcaatatctctcaggttgatcgtctctgcgtttttcacgaatatacaagtgaacagtccaacgaggttctgggtatggacaaccgtgtaaggtgactcggctggcatggctacttgaacggcttgaacgagcttatcataccacagccggtagcgctgagataccttctcggacatgtctccattcactttagatttactaaagagaagggattctgatagaatcacgatcagataaaccaggcagacaaatgagcgtgaggaaaagattcgaagggcacaagatcagaaaacagctctagactcactagcctggagtttcttatcttctagatcgatcaactcttgaaatccaaagatgatgatgtcaggcgaactctccgaagtcaacacagatgttaaaaacgatgcgttgtcggcgttggacgtcaactgagacggtttggaagcgtcgatgttccatgaacaagagagcacggtgagatctctgtacgaacagaattcggattctcgctctaagagacgactctctgagattacaaaacatttccgtgtgttagaaacatattcttcagacaaagaagagagcaatgaggcctaaatacctagccaatcaacagctaacaacccgtcccaagcatgtacacagtcgtctcttccccaagagtagacagttaagaaaccctatcggatgtggtttacagattttgttttataacaataaagagtatcagaatcagacacactggacgcaaaacccttcgaaatagaggagaaagagaaacagaatagacttacatcgtttatggaaccaatatctatgtcgaacccgagaatagggctctccctacgagaaaagggcacatagatcccataccacaattttggataaggtcaaccacgaatatcccttgcatagaaaaacagacagatagaaaaccggtcatcatcctctcatagtcaaaaacttacgaatgagctccccacaaattggtaactctccaagggaacgattgtacgtcataaatcgtgatcactcccttcctcgatcctgcccatagtctatctccaactcctatcaaagcgacgatcgccgtggtcgataccttgatgacagacaaacaggccgggttggttcctctcgaccaaacagagatttgaccgccttcgtgtccaaggtagacatattccgagagagcggggataatcgttccgcacaagacagcacccgaagctacattcgctgtagggagaactctcccgcctgttatggaggagctggcagtggtggcagagtcggttgaagaaccgaatggttcgtataccctgatagtcggtcgacgagcagacgtggcatcagaaaaatgatggctatgatgactgacggaattgtgtcgaccggggaggagggaaaggttcgaagaacctcctgttgaaacgagagacgacgtggatcccgtggaagaaccactcgagcctccgataggtccactcgacgtccatatctgatcgtccaagaggccaacgtatgtttgtctatctgcaagcctcaacgtttgactcgcgttgaacatgttgaattgcccgttctctttcatcttgaacaagtgtgacttgccggactcatctaccgtcaagattgattgtttgtgcttgacgatcgtcagaactggaccatgatgagcccctatcctgatctgcgtcgctatagatccccaaaggtccatctcccaaagatggccttccttgcttccacaccatagatagcgcgcgtcctcaccttctacagccgacggtcggaaacaaagggcagtgatctttgagtccttatgttttatctctagtcccatctccttttggtccatggagagaagcatcacataggatatcccctgctgagccgctcctctgacgtcgtacactttcagatgagaatggcccacggcgaccatacctgacgaacaagcaaacgccgtcggatgccccgagcctgaagaatgtttgatctgaaccggatgaggatgtagtaccgggggccttctgttcgacatggttggatctgggtactcgtccgcctttcgagaaaaagagtcggtgaccggaagtccggaaggagccgtgggcgtcgcttcatcatcttcattttcatcttcggaatcatcgccttcataaacgaacgatggatcggatagctgtgattttggagtgttagaataagctacttctgcagagggtccgacccggcgagttggtggcggcggtggtggtggtgggggatatgaagaggctagttctgaagttgaatgttgagtgtatggtgaagatgcggaggtgggtcctgtgaatggggaagcggttcgactggcaggccttgagtaggaagttcttggactatcccgtttgatcgtcaccgatctcatgggaggtggtggtggcggaacccaagaatcttcagttgaagacgcaatctcagattgaatcccagagccggataatgttctggacctggtaggtagagggggggcaatcgatacattcgtatagtcattaggagtagacgctatcggtcgcttagatgaaggtaaaggtggtggtggtggtggtggcgattgactcaagacttcctcgaggtctcccgctgaggaacttgtagaggaagcagagacaagagtggtagcccttctccttactggcaacggtggtttactctgcccttccaagctaacggtcgttgggacggaggatgatattgaggatgcagacgacggcgttcgggatggcaccggcggcttgtgtctggcaggcattattacctgaggggtaggagtggaagaggtctccaccgccgatgggtcaaacgtcggaggcaagggcggaattgagtaaggctcatcatccctgttaacgatagagctcgatattggacttctcgaccgaggtggtggaacaggcggtggaggttttaatgcagtcggaaagatgacttctgttcgagcagcagattgaccgccaggggagacctggttgatgggttgatcgtatgctgatgggggttgaagcttgattgcatgaacacctttagcgagcgatgaagagttgacgttcgatggctgtttgactgatgctgatgatggagggtttaattcagggctgagagatggtcggttcggaggaattggtggcggactcaaaagttctggctcgtcagtcaaacctcttgaggaagaatctagtgtatcgacgtttggaggtgaagctatcaacggagggacaatatggaatgatggtgagggtgatggcacgcgcgcaggtccaggtcgggcggacgtcgagacatttgtggaacctccgaactttgatctcaaagaagacacgctttgaaatccttcggtctcctcctctcccgactgtgtctctagttctgtctgtgcagagataggagacggagagatgacgaccattttagcaggcgcgaactgtgcgctctccactcccccagaggctagctttatcgtcggcacaagaggagaaggagcagaatttcctatactagtgtttattactggctttaccatcgtcgtcttcgttgggatgatgttttgtgagctagctgttggtttcgtggcttttgatggaaccggcggtgggatcttttttggtgtaggtatcggcgctgttcccaaagattgaccaagaggtcggccgacagaagttgaggtgaaatgttctgagggtgtggacggctggaatacagggagtggtgttctatcagaagatggtgcatatggaggtggtgatatctcggatgcgactgtcgtagcctttgaagacagattggacagggatgagggcacaggtgatccccgcggagaagtctgtgaagaatttgaatcagacaccgaagctgagttggatacctgatcgtccgagagtatcgttggatattcagacagaaccaacatcagtcctcttggagttggatgaatgttatgtgttcatagaagagaacagtagagggacaaaccgttcttcgtcccttcagacgatcatcgtcgtcatcatcatcagcatcattcacaacagctgttgaaggcctggtctccattttggcttcatcaatcatacccccaccgttcagaccggacctactaggcagtctactacctattcctttccctccatttgagggagttgtgatgggtgcactgcccgctttcgacatgttctcccatcttgatcgaagagaactgactggtgcggacgacggatctggtccttcttcaccctcatgtggatccatcccaagtattccccttcactgattcttggatttttctctttcgtattcaaataccacaaccctgtctgatgctttgctccgtgcttgtagactgttgaattcgaagaaagacagagcgaaaataaaagacgtgactttagaagagatgcaagaacagtaaaggcaaaggcggtaagaatgaagttagaagatcgctcacgttccaggctgacgtcagctcagaagaggtatgtcaccctgtcgagcaaggttacatgctgacaaatcaatccttttggggttacatgatcaagaagcccgcaattttttctctccttgacgcgaaggacttgcgatcgacacatttatgacgtgaaaaccccggtttcgtgtcctctgttttagacgtttgtctcacgccagctctgtggtctgtgtctcaaccaatataaggtgaaacagtttaacgctagtggagaagacagtccaaggagtgtggatatatggaggaggatggatgaatttcgttttgctctctctccctctcaaaagagtttttagtagatcagctccaactcttgaaggcagaggcgtttttcttctgagaacatggcattggatacatggatctgtgcattcgcactcgttcaggcagaggaagaataggcaaggaaataagaggaagaagaaaggtcgaagaagagaaaaatagcaaggaaaaagtcgaatagatgagggggaaagaaggaaggaaacgaagatgaaacgaatcctgtctaaatctaaggttagacacaccgatagcggagctaaaggtcgagataaaagtatcccaagaagagaagagaaggcttgtccaagatactggacaagacaagattaagctagtagtatgagagcagaagaatatcatagagtgaatcagttgtccgaaagttcaggcaaagatgaacaagtcgagctcggacgtttcgagggacacgggggggaggccctcgagtagaagagaagtccaccgtcggatgaagcaaacacacaacggaggaaatggacaacgaaaggacaggaacgagatgagagaagaaaaggtgaaagagagagcagttcaagatatgtaatgtcggggtaatgctggggatttgactaagcatagatctatataggagaagaagtaaagaggggggatataccgaatccaaaaaaagttcctagggtaatatatacaataaaagtaatcacaaaacgagagtcgaaacgaaaagaacgtaagagatgaagacatcagagcgcatataacgaggagtaagtcaatatgagaaaagaaaggaagtaaaagagggaggacgctagattcagcttatcgcctggaagcagcgtttcgggtgagcccttttcgtgccgttccggcaccagcaacgataggagcatcgccggccttcttcacacacgatttgttgtcccgaccgattgagtatccctggagactcgggaagacagatggtgatgttgttggtaagaaagcctctcgaacgtatcaaagggacaggggaaaggatagacaaacctcgacacaggaagcaaccacacatcgtccctcctcacatccgacctggtcaacgtgagagatagccgagcaatcttgcctgtgaccacgagaagaacaaagaggaaaagatgtgcatcagtttattgttaacaaggtgatgaacagcatatcgaatagtggcttgaatggtaaacagacataccctgtacccatagtgacacagccaccacagctcttgagctcggtctttggctcgatacactcaaacccgacgctgaaccagttggccagcgtcttgagctttgtgtcgctcaccgtcttctccccagcggccaagttcgggcaggcgagcggagactctgccgagcaaaggaactgactaaagttttgattctttgcctgcatcggtttctgcttcggtgaccgcttacccatccgacgtgacggggcaggagctcggggaaccacgacaggaccgacaggagtagcgtctgtcgaggccagcttgttcaaaccggcagctggcttgtgaaccggctgggcgaggacgagactgggagcaagagcgagcagaaggcaggccaaagaaaggacggtgatcttagagtagaacatctcggagaggaagaataggctggataggtgggtggatgaatgtagatctgaaaaagagattaattgggcaaagtcgcaaggaaaggaaaggaggacgcgtaaggagggaacaggctgtctgaaaagaaaggacgggtgctgaagagcttatgggagatgaacgaggacgaggacgagaaggagaaaggaaaggaaaggatgaatgtattggatgtgtatggtatgcgttggctctgtatgtttttatgtggatggatgcgaaagagaagagaagaagaagagagcgagaacaagagccatagccacaatcgatcctatcgagtaagcttttgggtctaaaaagaaaaacatgaggatggttacgcgtgtggattcgggctacgcgtaccgagcctgacatggctgtcgtcttggccttgttcggccgagcctgacgctggcccgagtgcaagtagaagagagcctaatgtttttctttttcgtttgctctttcgctggatgtgctgcggatagatcaaggcacaacgcgcagtgctcccggtccctggcgggtcaaggtctgtgccttatcgatccgctttgaccttttttttgcccctgtttcctcccccccaacaggcacgcacgcacgcatgcacctcctcctaacgctcagacctcctcccctcatcgtcctcgtcccgctcaccgacttctttgtttctgtctcttccaccttgcaatcccatctctaggtgtccatcctcgttctttcttctttctcctctctctcttcacggtagagaacgatggcacccttgacggcagtttggcgtcggttgccgacggcgacatctctcctcatcggaattctcgtcgggcttctgtttgccaacgtacgttttttctttcttttttttgtatatatcttattctgttctttagccatcttgttgtcgtctcatcgcaagtcaaatcgacagactgtatgcgtatgaacaacgctcacctatctcttccgttctcttcgtgccggtctcatcatcggcatcttcttctttggcgtctttgtcttcgggatcttcctctctgcttgtatccgttcgggctggcccttcgacccatccttcgctttctttcgatctgatagatcttctcttctcgacaggtatgcccttcatgtttcctctctgctttccgggtgataccaggcaagccacgtgatcccctctttgaataaagctgatcccattgctgtctctcacacacacaaaatacccttggtacctgcctccttgaccggcatgtcactgactcgaaacttaccaccatactcacatcttcggtcctaaaaggctccagctgcagaatcttggtcaggagctcgttcgaattctcgtccgaatccaggatctggtagagcgcctgcccgtaatcaacctagccttcctacactcgatcagcgacatcgagtccttgagcttctttctactctctctccccatcacactacgcagtgcacgcggcacgctcaacctatctacgtcgctcaggccctcaagcggtacgagcctttgtttgtgaagaaaaagtcttggaacagggttggtggctggctgtccggttggggagcgaagcctgtcaagcccacggggggtgagtacggcctgtcttccaaccgacagtatgataaggatgatgatgaaagcgggaggtcatatgtcaagcgagatctctctggtcaaaagcacaagtactttttcgcaatcaacttgtacaattcgttcgacgtcattcccgacatttttgcgactttgtttagagtggccgccatccttggttaccacaatgtatatgtgtcaatctacgagaacggttcgaccgatcagaccaaggcactcctcaagatctttgatgctctagccggcacagctggactccgagtcgaaattcgatcgtccatgcgaacgagaggaaagtttaaccaccgaatcgagtacttggctgaggttcgaaacgccgcgctcgtcccgcttcacgagctcagagagaacaacgatgaaaagtttgactcgatcgtgttcatgaatgatatccttccctgtgtggatgatttactggagctgatctggcagagtagacgacagaacgccggtatcacgtgtgcgtcagactacatgttccacgaggatatcggagcccccgtcttttacgacaactgggttgcccgagatatcaacggaaccgctttggagaacgagccgttcgagtcggtcttccaccataccgattcggcctaccgattccagaatcacctgcctctccaggtccagtcgtgctggaacggaatcgccatcatggatcctgcccctctctacatgatgccccctgtgaaatttagaatggcaaatctggactcgaacgagtgtagtgcttcagaatgttcgctcatctgtaacgattacaccaacgccggttatggtcgaattttgatggttcctcgagtgaagctcgcctacgacaacaaagtataccctattattcatcctgatcgacgaaacctgacagctatccgaggatacaagcgattgggaggtctaccagacgatcctcatacggatccacaggacagaacgtggtacggaccccacgaccgacttttcacacaggaggagacggatttgattcagtttgagaagaaccccgagtacgtctggtgttggggttgggatggagcaggagatctcgatggaccggatgtcgacccgatctgggaaaagatggaagactactcgttcacggaaaaggctgtcaccatcaagcacgatcgatcgttcaagatgtgatcgggcgtctgacttgtcgattggaaggtttagggatgagacgggttggtctcttaaaataggaggcaaggtgaaatatgaataggttggatgatatgaaaagagggccttatctgccaaatatgttttctttctattccgtgtttccttttctctgcttcttttttcttcttcttctcatcttccattacattgttcttaactgagagcttccttcccatcatcttcctacacttcctcataattttaacttcgtcttttcatctcgtcataatctcccatatccatctcggacgtcatcctctctattttccatcccatcaatcacccatttgcgtgttctgttgcgtatcacctcttttcagcctttcttcttccttttttttggttttcctctgatccgaatgtctagaatttgggcctgcttgcgttttctttatcaatttcctcgaactgtatccggattagccactttctctggcttgtttgcctggcgcaagaggagattgtaaagtgggatttggtgggaaacacatgtctagcgatcatacgagggtaacgacgtatactaacaggaggagaaaacaaaatgtgcaatggttcgggaggaagaaaagtatcagaagaagaaaaagaaaaagggaagggcagtgacatcatttaatagaattcaaataacaatgatgaaagagaatggcaggttagctcagaccgctgcttcttactcctgctcggtcacctggttaagggcggcgaagctgagaggagtgaaagcgtatccaccggccatataatgctttccgtttgcctcgacccagtgaagtcggagggcgtgcaagaaggcagagagaccttccataatgcaaagaatgacgagagtgagggtgaaccaaacggcaaacataaacaccaagaacaaggtcgctccggcgccggtcgatttagcgtctgccgggaaggcgttctccagcgtcatctggtagagaacctcggagagctgggcgtgagcgagcgacaaagcccacagtcgaaggtaagaagctgtgttggagatacatccaagacagaactcgatggtgtgaatgacttggtggatgatgatctccccggcatcatgaccgtgctcttcctcctcctgcatctgctcagccatagcatgaccattaccttcctcctcctcttcctgctcaatcgactctctgggctccgctccatcaccagctgatcggttggagatactttgatatccctcgtccttaggcttcttctgttccttgagcaaaaggtaaggcttcaagcacagcatccacggcacacacaccagagccaacaggagtaagaacacctgaaggggaccctggtacgcgaagagctgctcggagggatccaagttacccggcgagaggaacatgtagataagcatgttgagcagaccagggggggagttcattccaggctgagtccagtcggtggcccatttgtagatgatgcagatcacgagatatccaaagatggacatcatgaacaagacttggggaacaaactcggcgtagatactgatataatcctcgaaatgaaggtggttgggaacttgaagacagatggcaaaggtcatctagaaaaataaaaaaggcggtcggttagtcaaatggtctttgttgaatgagaaagatcagagaccacgaaagaaaaaactcacgtggataactccaaggatgatactcatcttcatcttgtatgagttagtgaacaccaacgcgttatcggttccgtgccaagcagggtccaatccgaagggatacacgcccgtttggattgcctcaatagtgccgtttcctttgggccactcccagccggactgccagatggtcattgacttggagaagatgtcgttgtacatcagaccagtgaacatggagaagactcccatcaaaagaatgatgtatcggccactatgatttcaggtaaaggggtagcagcagtggtcagatcgggtttacatcttccaacgcaccggcatcaaagactcacaagaagaaggtttcgaaaatctctcccaacccagcctttgagagtttcctctcgttaagaaccatgaacagcccaacgaggaaggcaaggaaaccgtgtccaagatctccaaacatgacagcgaacaagaaagggaacgtggtcacagtgaaaagaccggggttgacctcttgataagtggccacaccatacgagtcaatgatggtctggaaagcctcggtgaagggtgacgttcgatggaaagtaggaggcttctggtgagttcgaagctcatacaagattccagggactgaagtgttggcggtttcctatcaaaatcagaggaaaggcgaatatggtaagctcgagtgcgttcagattgtttgctcaaaagaagaagggacgaaccgcagcccttcgcaacgctagctggatagcggtgatgtctctggtaggacaccaaccttcggcaaccaaagtctgctttctggagtctcggctcatcaagttcatcgtctgatagactgccttctccttctggacagcatccttccaggcgttcagtccctcggcaatcttgctcaactcaacccgtctggtctgacttgtgttccaaacgaccgtgttgagatcttccagtctgccttcaacctccctcagtgcgttgttccttagatcagggttagagtcaacagggtacagagttccacccatactctctgcaacctttcggatcttggtcaagagctcggatccgtgggcgaagatgatgaaaacgttctttcgggtttcttccgaggtaatcggatcgacaaagagctggtcgatctcggcgtagttcatgtaaagatttcctcgaaggactcgccagaggattcgctcaaaggtcgccatacgggctcgatcgatcgttccggatacgaactccagatcataaccgtatccaccagcaacaccttgcgagacctcattgggatggaagtcagaagatgatcggtggagcaaaggggcggtaccctcgtcgttttcgaaagaggaacgaatctccggctgtcgaccttcagcctgaagtatccaaacaagaagatcgccacagtgtgtttgatgtcagctccatcgatcgccacgcaagatgggaggttaatatcaactgatagaatggacgaacgttttggaaaaagacagcggtttcccggagaacgcacttggcctcctccaactctcgttgcttcttgaccaaagcttcccacgagctgttcatctgagccaaccggccttcgtgctcctgcagcttgagatcgagctcatcgatggcctgggggcctcgaggcccaactgtagtgaagggaggaatggatgctagggagggaacatggataggaggttgggagacggtatcgatttgattactgaacagtcggagccgtcgatccatctcgtccagtcgacgaacgtcaccgacaaaagatcgctggaacgcgttgacctcagggttgagctagatttgaatcgaaaaagagagcatatgagctttccaaagactctcagttgcagagacatagtcaaacttgcggtaaaactctcttaaagcgtccaccaaaggccactctgtttcgtgaaaaatcatcacggattggagcgaagccgaaatagctcgactcacatccttaaactgtacgtttcccatttctcctagctcactgagagtatcgtgtaaaacctatatgggaagcattagaccggagagtgggtttataagcttcattcttcatggctggtgtgatcgacgagaaaagaagaaaagaaaaagaaagagatggcaaacgcacctctccagggataaagagctggatgagggacatctcttccgatcctgtagagtgtcacacccaaacacaaccatccgggtcagccaaaaagagtcaacagacacagaccaagaccctgagacgaacggaagagagaagggtattgagtcgccatgttgagaggtgcccaaaagtgtttagatgctctatgtgtgggtaagtggagagaagaggtagccgcattgaaagtctctgtcagatcgcccgcacggcaaagttcgtgggaccggccctattactgttagggttaacgtcaccttactagccatttgactgttaatggtagaaggcctgccttgatatcttaagtatagatacggtaaacagcgagcaagaaccacagcagtgatcagatgagaagagaagcaaggagacatgaatcgattcgaagtttgacgaggagaaacaatgagaaagactaacaacgagcaggctagccggatgacacctaagggtattcggtttacgtgcgctcagctgtttcagtatatgatctctgatacgatttaataggaactaagtcagcatgttttaacggtgtgatccaagttcgctgaatgaccagaacacagaaagatgatctatctctctctcaggtgatggtctgcccactccaagcaacggacggatcgacgcgtcatttacctgcagacgcgtctgacctgctcggacgcgtcgagacgcagagtagcccgggttctcttcctcctcatacctcgccttcttttatcttctcctctgctgacttctaatacctaaattgaacagctggctcatcaggcgaaccaaatccttcttggaatgggctcccagggctcccagggaccatgtgatccgttcaatttcagctctcagagctcgtcctttgaacgcgccctcgccgctcttcctttgtcccctccgactctaccaccggccaagcggacatcttcctcaaccagcgtgccgaccgatccatcgtctcctagtcctgttcttcctccttgctttcctgttcgatcagccgctcctttgccgctgttgaaaccagctggcccggtgctgacgtcaaaacggccactgaacaagttagaggagtatgagctcaaggcctacgctcccagtagatttggagaggtcggagactacatgaagaacaaacggatgaagctacagttacagaacagagagatcgctcagactaggcaggatggagtgcctcagatctttaaaggtctggctatatatgtaagtcattcgatctgtaattatttgcacctgcttctcgacatacgttgatctgatgccgtttgaaccataccagattaatggctatgtccagccttctcttcaagagctcagagatatgtttctctctcatgggggagagtatcacgcctatttagataagtacgtttgtcatacacttctgacatgtatcacgttaccctagtcacttagtgcgagagctgacagtcgtttctatctcagaaagagcttagtgacccatatcgttgcgaccaatctgacgcctgccaaggtacgcgtagtttcggctttattctcatcagcaatctatatatgctgacgagcggcatgagaacaaccacattcgcaacagatcaaagagtttcaacaccggaaagtcgtgacacccagttggatcgttgaatcgactcaggctggaaaactgtttgtctattcctgtagcgtctgccagccaaaatttgttgtaatggacggacgagagcattcacagctaacataaatcatcatacgtaacctatctagacttccttggtcgaattatcgctggaggcctgtacccctagcaacatctacgtctaactcccgacctactcaaccaagccaactgactactcaacggagtattcgatccttttctggtcaatactacgagccagtcaaacaacccctcaaaccgctgataactgagccatctcttatgtctccatcgcctgattctatcactgcaaacttatccgctaaacacaccctcacagttctcaaaaaacaatcttcgtcctcgttaaatcgcagctcatcctctttgatattggcgaagacggatatcagtcctcctcggacgactccctcctctttcgtaagaaaagagaagacaagggtgtctcaggaaatcatacgacccgtaacggacctggaggttgaggaggagttgcttgtcatggattctttcgagcattctagagactcacaagaggagcacgccaaggaaggagactcacttaagggaaaggggaagaatctacgacgcaagaaggagaaagggaagaaaaagaaacgcgctgatcctttctcttcctcttcttcatcctcatcctcagcttcggatgaagaagctgacaagagaacgaagagaagcatgagtcaccgtctttcgtcccagcgggttcgtctggagatgactgctagaagtcttactcgctctcagagagccgccgtccaaccaaacccatacgatgatgactttctagatcagcccacatctaaattaaaaccttcatctcgcccgacagtggctgaccggtctttacgtctttatcaatcattatcaaccgatcgcctccctctggatatgccccaaacctccctggtgaagacgcgtgaccagcccacctctactcgtgatcgagctagagaccagaatcgttcccaactttcaccacgcacaactctcgaattaagcaatgatgatcctcttcttctggtgccttccaataagacatcgatatcaactcagccaaagacctatcgctctctcaagactgcgcgtataccgtctactctcataattccctcagatcctcgtcctacgagtctcaaagagaactctaaaacaaccagtagagagaggtcagagcgggaggagggaaaggcaaagagaaaaaagaggacgaggagagtcagatttgaagatgaagtggatataggtatgaagcggacagatctcacgggggcccttaagtcaccaccaccactcttgcaatcaacacctttaggggcgacaaagtcccggtgcttagaggatcttgagattgagaaggaggaaaggagggctctcatgatgttagacaagatgagaaggatcgagtcagaccttatctctgaagagaaacagaacgatgggcgggcagtctcttctttcaaagcttcatcgacttctctccctactttagtttctccctcccctctctcccatacttctcatgctgagcagtccacggttccttcccggacttcgatagaatccactgaatctccagcccaacttccaactactcaccctcagcctgttctggtcggaatcgctcccgccgagaaggtagtgtcgataagtcacgttgataccctgaaatctcccaagagtgcgcttgtagtcaattccatgactagatatgccttgcatgaggagcatcctcaggcaagagagttaatgcaagattcagcgtggagaagagggcatacagctcagagcgaaacatttttggaaggatactatgggaaatccaggtttgttctacagggtttctcttcctaatatgtcttttgttgtgctaacgaaaaaatggatatgccatcatctaaaggctccatcatctttctaattggaaagctgaattgaaagttcttgtcgctcaggcccggtgtgactctcgctcgctccccgtttcgcgagttttagctcctcattctttggccgattcttttcttcctcgacctgcttctctcactacctctgtcaagcgatccggaagaggagagaggatcatcatgcattgcgactttgacgctttctttgtttctgtcggtttggcgggagaggagaggaaggcgttgagaggtagaccagtggtggtctgtcattcgctgacaggtggaagacagagtacaagtgagattgcgagtcctagctacgaggctagggcgtttggaataaaagctgggatgaggtttgtatctcttttctatctcagctcattcacggtctaagtattaactattgtgacgtatctctcgactcaaaatgactcttgtagtcttggacaggccaaaaggttgtgtcctgaagtgaagagtattccttacgagtttgagaaatacaaatctacctcgtctgtaccatgttcctctctgtttacatgctcacttcttatctcagtttaactaatgctagcggtatgtgatcctaccgcgcacttggtccggttagtctaaaattctacaccatacttctatcttacgccgacagtttcttccaagcggtatcgatcgacgaagccctgatggaagtgacctctcgggtcaatgatcttgctaagaatggcactgagagggctggaagagaattggctgaaagaattagagaagatattaggcaagctactggttgtgaaggttggcctttcgattttttcctaccggagagtgcctgtcctcatcttacacttcatcttgcttttctacatatcaaatatagtctcgatcggggtagcttctaacacgctattggcccggctagctactcgaagagctaagcctgcaggatcctttcatctgatccaggacagagtatcagagtttatggagagtcttgtgagcgttctatcatcaaagttctctatacccgaaagagtataaccgatcgtcctcttcaaacaggatgttgccgatctatgggggattggtagagaaaccaagctcaaggtagcatatcttttctcttcgttctactagatacagtaatttatatctacggtctgacgttacatatcctttcctttcttcacagatcgaagctgctttcaaaacgacccgagttggagaactcttgaagaagcgcctcggagaatttcagcatattctgggtcccaaaacaggagagaccgtgtacaacgcctgtcgaggaattgactcgaagcctttgaaggaagaatcagaaagaagaagtgtcagcgccgaagttaatgtatgtctcgtatttcaatctttctaggttatctttgttgacaaacaaatcgttcactctgtctttgtttagtacggcgttcgatttgagaagaattcccaagcagaagactttttgcagaacttatcggtagaagtctcaaacaggatgaagaaagttgatcgggctggacggatgataacactgaagatcatgaagagagctgaaggagccccggttgaggcgcccaaggtaagcttattcttatagctcgtagctttaaggtggctaccattttttctcaaccacctatcatttgcttgttacggggtgcagtttatgggtcatggaaaatgcgacgtcgtgaacaagagcaaagaactagtgggttctagaggaggcgcgacggacgaccctgtcgccattggaaaagccgctgtcactttgctaaagctgatggacataccagcatctgaacttcggggcattggaattgtaagcatacttaatgaatagtttaagactgcattgattcgcagctttatcatactgaatatgctgtccgtctgtaaagatgattacgaagcttgaggacccagtagtcatttcaaatctcaagaaggctggtcaaaccactttaactttccaaaagccagacgttgcctcagtaccaaagtcggcgcaaacttctatcctaccaccaccatcaccaccaacttctgcggctcccgccgtagttgctcctcccgttgacctaccgacctgtctggatcagtcgatcctggatgttgcccttgtagactcttctacatcagctcctaccaatgcagatcgtcaatcgatccatgcgatactcacaaatactccacgaaccacgaagaaaccctcccctccacctggaacccctctgaatttgctcccagcgtactctcaagtcgataaagaaacccttgcacaactcccttcatctatgatccgagagctttatcctcagtggcagtctacgcaatcgaagccgtcatactctcagcctaatgatgtgcctagtccatctattcagcttgtagattctccaccacccctcaggaatccatctcccgtcaaaaaatcgcgtgtagacgtctctcatattgccaagcagcttcgaccttcaaagaaatctcctatgcggaaccctcctgcttgcttcgcgccgcctgtagcaggacgatctttacctgctatagaatcgctccaagcgaatgcgtctagaaagcttgcgcccaaagggtctctagaggagattactcaactggccgaactactaggttgggatctgaatttcatcaagtccttgcctccggctgacctgaaagaaattttggatgaagggaggaggcaacgcgatgttcgagatcgattggtcagaaaaggatcaggcgacaaatccaacccgacttcagccttcccaccccgcgtcacttctcttacgccagaaaaagccttgcacgatagaccgggtaaccaattgatcacaatgatacctacgagatcgatggcgacgatgtcgagggacaaccatacgactgatcgatggaaaggcgatccaccagcaccgattcttgggaagaagaataaactagacccggaggttctagcccaaggccaatcgattgattgtctgcgcgagatcatctcgtcttgggtagatactgagggagcgactgggccttcgcttccaggcgttcagatggtaggtgattttgtggtggcttgtgtgaagacgaagggaaaaggtcataaagagcgagcgaggaaactgttgagttggtgggagtatgagctgaccgagcggtggcccgagaataaattctcgatgagccaggatacatatcgcaatgaagaggaggaagaggagggtaggctgaaaggcgcaggagcactttggtggggggcgctgaaggcatgtctaaaaagactgaatgaggtccattatttacccgccttgggctgctcgctgtctctctcgaaataaacaatttgtacataacgtctcactccatacaaacacacctacaccctcaaacattgcatagttgttgtacagtttttcttttacgtcatactcatctggatttgtttgcatcaggtatctggatccatagcgatcaatgtcttcttttccgttacttatatatgttatacttgttcatcattcgcgtacttatggacaggcgaagatacaagaggtgaagttgaggatatgtaattctgcctcgctcttgaaagcgacggcatgacattgtggaaagaagtaaacaacccggacttctttctcaaatttcaaaacttgtcgattcacaatgtacacttgctgctgagaacgttgttttgagatttatggaaacatagaatattgattgtttcttttttacattttgagttttttcttagttgacggaaacgagcttgacctcgaagtggagagtcgagttcttggggatcccgggaagggccttgtttccgtaagcgagggcagcacttgagatgaaaagcacgtagaagataggaaaattgtatgattagatatcagttcgaacaagatacaaaagatagagacgagtgaacaagatgaacgtacgggatggtaagctttcgctctccaccaatggccataccggcaacaccctggtcccaacccttgatgacctctcctcggccgaggttgaagacgaactagaggtaaacgaaaagaaggacatcgtaagcaccaaaacgaggtggaaacagttgcagatgtatagatgaaagaaacatacaggctttccgttggtattgctgtcaaagacctttccgtttccgagcttaccgatgtatcgcataccgaccttcttgccggacttggcgacaacaccgtttccgagcttggaatcctcgacaaccaatccgttggggtgagtgatgggtccctacgagtagtagaaaatgagtttaaggactgtcagtaaaagtccttgccttgtccgtcttgacgatcgatcagctgtcggctgtatctactgaccttcttagcggccttcttctcggcaggagcagccttcttctcctcgaccttgggggcgggagcagcggccttcttctcctcgacgggcgcggcggcagcagctccagactcggtcttgagcttcttagcctgcttcttcttctcggtcttggtcataggggcctcagtggcggcgggggcggtgagctcggcgacggcggcagatcgcttggcggacttcttctcggggatctcagtgatgctggcggtagactcgtcggccatctcgtcctaataatcgagtgacaaatgtatagtcagaacatgttcagacacagatcttctcataagagactcacatccatatcctcctcatcgctccagtcctctccctcagggtcagagtctgcatggatagaattgagatgtgattagcattgcctccgcaactttcggtagacacaggctatcacgtacaatcatcgtactcggagtccgagtcagggtcctggttggcatcaggctcctggtcgaggtagtttccagaaaggtgaacgacgctggttgacgacacgtgtaatggttgttaagctatataggatgatgcacatttagtggatgagccagaaacttacttctgtccagtgacggtgatgatgatctcatcctcctcggtgaaggtgaggttaagggtggactgctcagtctacgagagcgcagtaccaagggatcgtcgagcgagtagctgttagtcttgtatctctacaggagacgtgcttcccgcactgctcgcctaaaactagttcaaacaaggaaagacggacctttccggcggtcaagctggtaagaacaacggtcctgctgggaagctccttgagctcctcctcctcctcctcctcctcttcctcgtcagactcttcgtcaaagtccggtcgtcggagagccttctcgggaacgatctcgtgggtgagcttgacaacggatcgtccggtcgggtcggcaagatcctcaccgagagcggcgttggtgatgacgaagtctcggggaacgatgcagtggaactcctttccctgtggcggccaaagaagtgaagggcgtgggatggttcatcagcttggtccatacaaaattttgaacgaacaaatgcaagtctaaacgaacaggctcgataatggcggacctaaggagcacaaagacacgtccaattgaggattataaacgtcagcacggcagcattcctttctaccaagcgcaaacgccccaagctggacactcaccaaacggcgatcttgataggggacatggctctatagactgggatgaatgaaggtgagtgtgaacgaaagaaacgagggtgtggttgattgaagtggccaaaaaagttgaaagaaaatattaaggaaggaaaaagaacgaggacttattaaatcaaatataaaattcaaatactcaagtttatctaagtaccccgacgagttgctctactcgttctctccgtccatctttcgtccagttgactatcatctacaagcatctctatctttcattgtctttgtgtgtgtctttgccatggtatgtctgctggtttggtggttgggtgcttgggaagagctggatcatgtcggctgatctggttgggtccatcgggtttatacaggccaacgctcttcgtccttatttgtccgccgttaggtcaacgctcacagccgctcttaccttggagaactttggatcccaggtatgtgtttcagttgtcatggccgttcgtcttgttttggctgtcgaggaaacggcaactgatgtaagcggtctcatccggtcataccaatcttgtccaggtggtggagagacataatgttcccgagatcgaggctcggttcgtatccatctctccttcatccgccagtctaacctcagcctgatctgttgtcgtgctccttggtttgtccgtatctgcagaacatcttcggaagtcgttctgacccctctgacaataactcgatcggaatctgagaaagtgttgatcgagccttcggtcaactccatccgactctcgatcaagatcaagcaggcagacgacattgagcgaattctatgtcataaattcacccggttcatgacccagcgagcagaaagctttatcatccttagaaggaagcctatacccgtatgtccttcgcaatcgtgtctcctagatatcagtcatggaccctggctatttgagccccactggtggctcaacggcgataaggatctcatttaccatacaccttcagccctagattcctctttccaagacccactctgattctaacgcgatgatccaacattctcttgtccttgcatctcgcgtaaactataacagggctatgatatctccttcctgatcaccaacgctcattctgaaactatgctcaagcacaagctagtagacttcattattcagttcgttctctccttctttcgcgtcatacctcgagctgcgcttggatcttgtatcgtgtcgacatccatgttcacgttgatacctctttcttggttggtctctagatttatggaggaggtggacaaagaaatctcggagatgaagctcagtctgaacgcccgtgcacgtatcaccgccgagtcatatctttcaaccgtaagccacacttgtcatctcgttatctatcagatgaggcgaccctgaaaaaattcgacgactacttgggtcgatagtactgttaaatgtttaaaccagattcaccatcttctcccatcccctcaaggtccttcatggttgcctgttatacttttttctcttcacgttcatgacatgacatgacattcttcttcaatatttggtttccgagcttgtcatccttcttttcgtgactccatgtagaacaaaagaacgcgtctattctcggtttcaacatctatacaactcaaagatgcctgaaccgacgcgtctggtcgttctgtatcggggcgaacgatcaaccccttcaattggtagacaagactttcccttgaacgatcaggtggacgagtcggattgggtcaagtctcgctaaaggttggcccgacctagaaactgtgtccacacgtcgtcagtttcgtgcagaaagagaaaagcgagaacaagcggaaggaacgaaggacggaagacatcagagcgcaacccattagattagtccgacgaaactacaagaaaaaaaaagagcttcccatacgtagacttacggtgtgtcgaaaacaaatgacggaacgaaatcggttgagtgtccagcatgaggtaacccgttccctgagcgtctttaggatgtacaaccctcaaagaaattccacctttgttgagacagatcgattgattccattagttaggaaagctgtgtatccttgggaaaaaaaaagaggagaatgcgatttcttaccaggtaaacggtttggatctttgaggcgtaacatgatggcgaacagagggaaacggttcaacaatgcgagacagatgccgatcatcgcctgggcggctagcactgctgatcgcatctgagaactcagtatcgtatgagaaccgagggtagaagagtagcaagacgttgagaaactgcgagtcaacaagtgcaacaatagcaatgatatcgcgaaggacaactcagcaggctcaccaatgagaaacatagataataagccagaacagtcggaaacaagaatagggaaagagtaaaaagcacggtgcccaagaggagttgatcgattgaataatcaaacgaatcaagtcgattccggagcacattcttccttttacctagctcgaacagttagcatacatttcttcagcaagaccacagagcacaaaaatccactaggaacataaacaggagggaggagaaggaaaacttgaagagaatgaaattaacctcacctctgaagacatcgaacagcccacctaaaatattcttcattcctccaaatataaccgtagccaatcgataggtcacgtaaagatggaccatgcttagacttaacaaatcggataaaacggccagcattgctgtcaacccccctccccaaatgcctatcgagcctagaacgaatatcgtctgggatagataatttgaaatgactttcaacacaactgcagacgatacatacaaaagagagatcgacctgtaagtatgaacagaagcctattttacgaagacaaggtcattgcggaagtatcactgactgtgatcccatttagagatgataaaggagaaagtggatgcgaagaagagggataggtccgtgttgagtttgaatcctagaggccaactgttaagccattccatggctgattttgggagttctacagtatatttctgattggaacgacacgaaccgagacattgtcaatcatcgattaggaggatcaccgatatagggttggcgtacttttaaaaacttaagagctaatgtgcccagatagttttcgttttcacacaagatggatccaatagtccacccaaagatgaaatcgttcaggacaagccagatgatattataaaagctgtatagaagacaacgtacgcattccagagaaaggcaaaacagtaagtgaaaaggatcatggataaaatgaatctatcccaggacgaactttatgtatcgtgatctgtcataaacgttattgagttctggacgatgctcatgtgtcggcgcttgagagtgaaggagggcgatggctgaggctcggtgactaatctggtcaactacaaagagaaaaccagaaggtgttgaaaatgaaaacgttcgaacatgtcccaaaatcatagctatggcctcacctgttgtagacatcccctttatgtaagaggggacagccgaaacggagcttaggcaaattgactgaagagctctcgaacacagagaaacgctggatggtattgttatccgaggcgcgtaaaagttatgtcgcctcttagatgtaggtcgaccaaatgtgttgatctgaatcacagaacagaacaaacccaaaagtatcagtgttttcagtttaatcgaaaatgttttgaacaatcacaacagtatagactgaccacttcaagaacttggcccgtaccaccatcacttctaagcggcgatattctatcccgaccaaaaggtattcctacatcaagagggaaaagagagtacagatgatgcgattgataatctacaggtctgtacaagactacaggatgaattttcatcaaagacgttggttccatcgggtaaccagcttcgttgacgattagcactaggtctgtatttggttccagagcggcggtcgaaagaacggcgacgccgatcaggtcgtcttttgacacatcatctgaggacagggagcagacatgtgtcacaaccaagtgacctgaaggtgttctacaccctctaagaccatactggatgcctggtaggatccttggaggggggtacggatagaagagcatgaccgatagtgcgaagaagaagagcgacgttcgaaaggtggactttaggatgaattgataagataagcattggcgagtcacgtgtcatcgccatacccgcccacagcccagtgacgtttataataaaagcccgttcatccaagaggaaggcaagtttgaccatccgaataatcatcgaatgcaacactctttacttacccgattgaacctttcaacaagatcgtacaagcagatatatagcattactcgagccatgtccaatttccctcaaccctcagcggagcgaaccaacgaattgaaggatgccatcaaggaggttgaggacgatgtcaaggcaatcaacgataaggtcaatcgaaatatcatgaagaagctaatagtttttgacaacattcgctgaaacgtatcgtctgttcttcctcaaattcatcaccgaatggaaaaatatcgcaggcactacttgtagctgtttcgaaagtacgttgtcaaacaaatttttgattaagcaggaccctgatgctcatgatccactatctactaacacagctcaagccctcctcggacatcatggccctctataataacggttaccgtcactttggggaaaactacatccaagagttgtccgacaaggctaaagaggtgatcattctgcgaagggtttatcgatagtacggcgttgatagtaatacttctccttctcgatttatcagttgcctacagacatccactggcattttattggatctttgcagagcaacaaaggtgcgttcgtccttaactttatgatgccaggatttcaaagctaatcgagaagttcctattttcctcttctcttccatagtcaaatttgctactggtacgttgatattcgtggcgatttttgctcccgtgtaatcatgactcacacagagcgcctcgccacggcaacagccatcccgaatcttttcgttcttgagaccctggattctatcaagaaggcagacttgatcgaaaagtctttgtctgctgaaaattcgccccgatcttcccctttgaacgtatatatccaaatcaacacatcaggcgaggacaacaaatctggggtcgctccactatcaaaagcatcctctacagagtcaagagaaccgaaggaagccgtcgagcttgccatgcacatcatcaagtcttgccctcacattcatattcttggtctgatgaccataggttcctgggatgcctcgcacactaaggacgagaccaatccagacttcgttagactcgtcgaaacccgtgaacaattggtggctgaactgaagaaggctcaggttgagaaagataaagtaggcagaccgggagaggattggagattggaattgagcatgggtatgagtgctgacttcaagggagcgttgcaagcaggaagcgatagtgtgagagtgggaactaggtacgttctttccttggctgtaatctctgtattctgcgtcttattggtattgacgttggatataaatttttgctcctcacctttcctcgacttatagtatttttggtgcacgaccacctaaacgaagcgacggaagtcacatggtataagacgaccgtcgagctaccaatagacagtttatgtccaacttgagaggcttcctgtaaacgatcgaggatgcacgtagtatatatatctagggaagggtgttcaagatctgatcgaagaagcgccgtgcgttcctctcaacctcgggttgtacactgtacaagacgctcaattagacgtgtcttgatcggtcacattgctgcaccttccgtatgaacgatctcggttgattttaagagtggaaagcctgtttccttgcagtcctgtaagacctcatacttcgactctgtcagtcattctggagtgttttcttcgaccttcttcatctacattcaaagagtggcgaagaagaaaagaagagacagggtacaggaagttagcaccacgcaggagattcaagaggaaagaacgattcgagacctcaatcaacggaaaacgataccaacctgatacaaccgatcgagagaccagtccgttccctctggcacgtagtcaatctcggaccgagggaatgcccagtcgagaaagtatagaaacaggtgctgaactgagaaaatgatgaccatgaaccagccaaagaccttaccagtgtcgagaagtcttcaaatcaagtgtgtaaggtaagattattgatcaaacgaattctgggagaatttgtcgagcaggatgaaagaacggacctccacattcgatcccatgtacttcttatgaaagtatcttctaggatccctatataaacgtgctcggttcgttcagcaacctcgtcccaagagtacatctttctgactcggtcgtgcgctccgaacgggtcgtatgcgcctgctcggattcggtgaatcgcagatgagagtgcgcgaacaacgtctagttgaaaccccatcgaaattgaggagcagcggaagagaccgagaccgagaccgagaaacaggacttttcaggaaacaggaaggttgaaaggaaaccaatgataacattaatgatacaatgcataccgtcttcatttggttcggcaaaacagatcatatcttcgggcaatatttctggtacaccacccacccgggtcgatacgacgagcaagccggtcgcggctgcttcgatgatggctatcccaaatgcttctgtaagggacgtgttgagaaagatttgtcctttacagagtatctattgtgtttacaatgtagaagagagtcaagggttgtggttgaaggtagatagtcacaacaagcgatgaaacccaacagttaaagaaggggaagaagggagaggacgtaccgaccgaacgtctctcgatttgacgtgacctataagctcgatccgatcctgcaaaaggtgcttctccctcatctgctcgagttctaccatcttgggaccatctccacctaacatgtatcgagcgcaagccaaaaaaaacaacaacaatcatatacagtaagcgtttgtaccctcttgtaagtgaatacagcaagacgatagagggatattttacctatgacaaatcggacttctggaaagtcccgacaaatatgtggtgccgaagcgacgagcagatcgactccctttcgataaacgagcctagagatgaccactatcgtgactgtattgaccatacttatctcttagtctcttcactagaaacaataccaaaatagacaaaaaaataatcacgaaactcactgtagtcgggatcagcagacgacggcgagggaataaaacgggatggaacaaccgcattggggatgacatgagtgacaattgggtctagatcagcgcggagaaccgtgttctctcgtctagaaatcaaacaacatgggtatacccaaagtccgagagaaaatgatgggcgcgaacgtgaacattcactatcactcaaaataacgattgaactgcagaagaaggaccaatctcaccctgtatgactgacacagataactccatccacgtttctcagtgctgctctcagcaatttattcgtcaaaattcctacagcatctccaaagccgaagagactgtgatccgttaagacggttctcacacctaacataggtgcatgcatgatcccctcgtgcgccatagaactgagtgagccatgcccatggacgagatcaattctttctcggagaaggatgttcctcaagtagggtaaaaaaagcataaaattggggagagttgccgacgaagagattgttggaagagggagatgatagaccttgagaccagggaggaggtaccggatgccgattcgatccggcggatgatgatgcgtgatcactataacctaagaatcgaggtatccgaggcaaaagagaatatcgattgggttgcttttcaagtgcctttccatcaagcaaaatccctacagagtgctccctgattttatcagagacgatctcatgatgcaaacttactgtatggcctcttctgaatagcccgacggcaagcatgtatatgtgattctcgacgccgcctaccgacggatgaaagaaatccgagatcatcctacataagaaaacgagtaaagttcaactcgacgttgcgagtgctgaaatagaacgatacaatgcacgcacgctattcgataagaacggattcccttgtctctccgtggcttttcgtactgcgctagcgatgtccctccatctgaggccatgaccagagcaaaggtgaaagcagacgatgagggctgctgatggccggtcgaataagaggaagtagacggagggatggatgatcaactgtgggtcacgtgtttacacagctctgcaaccccgccacataatttctcaaagctcgttctcaccttcaacaatcactactgataaatccataccaaccatccaagtgctctcgacagctacctaagtcagatactcactcaattacacatacacaactatggccgagcaaggagattttaatgcgcccgttcagattgccgagtatgacaaggagaaaatcactatcgttcgtttgacctggctcttctcctgaagttctgcttacgaaagtatcttttcctttgcacaggtgactgatctaagctcgtttttattccttcttactaccttttgctcccctggaacctcgattctccacccctcctgcactcatgtgacggattgatcggttgggataactttgacatattaccctcgcgtgggctgtccaactagcttcccggtgcttccgccgacctctcggctgctaccttcaacatcagagacgaggaccacaccctaggaaacgccttaagatggatggtcatgaagaagtatgttcacgatccttgttcttctcaggccgggcctgctctatatgcctcttcttttttgatcgtagggcgtgctgagatattcctaacatctttctcattgtctgttggttcaatcagccccgacgttcagttctgtggatacaggttcgacctccttttccttctctctgtcatgtcctatcaccggattccatcattgcagaaatatcttagctgacactcaatacaactcttctcgcgactccttcttcaaacagcatgcctcacccgtcagaggcgaagtttcaccttcgaatccagatgtatggtacgtgccgcgtcttactagctcatcctcaaaccagtcgtgtttggtcctcctaacagaaactcatctctctctctctttcctgttttatcatatttcaccgcatcatgtagacaacaagtccgcagtgacgtgtctgctcacagcgctttctgacttgcgcaacttgttgaataccgtcaaggctggctaccaagactccctcgagtacgtcaaactctccttaccattgaacggatggtttgagcctaacgaacacgaaattctccttccttctcacttttttcttccttcaggaccgactcaataaaacgagttcaggatgttaatgttcgggccgaggtagaagacgtccttcgatcccacgccgaggctgttggtggtggaatggaaatcgattcatgatttaatttttcttctataaatccccaatgttctgtattcctacgcacgccttgttcgagttagctaagagaggagggccatcacatattattgtcgtggttgatgagcatttctacacaggctttatgcaacatcgacaacgccaacaacaacgatgttggaaaaaaaaacatttattattcttattgatctgtttcttgcgatttttggcttccgtttttctcgagtcggtctagtaccaacacctcagtagtcttccctaacccaggccacgatttcgttccgccttccaatttaacgcctggcggaggtcgtctgcccgatagcgtttgatgaacccagccggaagatgataatggggacaaatccgagaacgggggaggcagacgctagtttcggttgaatcaacaccatcaatatcaatatatcaagaccgaattcgatgcatctgttgatgaaagacttaccgacttgacgccctcgtattcaccttcccaaccgctcacttcccgaacgaccttgtttgatccaaacagatggaacaccctgacgtctctcaccctgaaaagaactccgtcaaccctcaagaaatgacgcaaaagtacaaacaaacaagtcggcatgaccctctgtttaaacatgagagcgacaggacacaggataacaagaaataggtaattagatagacgcgttcgttttcaacgttcgactgatgatctgacgtaccacacgcgccgagagagttgatgttccgttgtcatccaattcgctctcgaatagtgggatttcgtcgtagtacagaataggatccggtctactgagtagttccagatcaatgacctcgccggacgaagcgggtcgccaagctatcgaggttgacagcgacggtgaagacggtgatgatgacgtcgagctggtagagcaagagccattatggagggtagaatacgtccagtcgaagggtttgacaggtacagtgggtagcggagtctcgggggacaatggagaaggtcctgtagatctgtctcgttcgacgaattttcccaatcaaatgagtacaaacaatacagaaatcagcccagactggtcgtgatcttgatatacgtggcagatagactgacctagtctttccccattcatcggcatgcttgactctgactcctcctccttgttcatcccaccctgctccgaccttgaccttactcaaggcagggagtgcctgaaatgtataggtgaacccagaaggctcatgacgcaaggtcagatgattatcggcaaacgtcatttcaggaagtggaattgatagatgggtcgctgctctgtttgttgtttcgatatagatatcctcgaacaagttagtcagggcttacatcttgaagcgcggtgagatagaaaggtgcgatatgatcaggctgaagggattgtacaagaggacgagatacatactcgtcaatctggagggcattcatgatatgagtactgcaacaagtgatctcccagccgtcgatggtgatcgatctagtcggcggatgagcgcctggtgtaggctcttgaaccttgtagggaggaatctttcctggaaagttggagctcaacgaagaatgcatactgaacgagtgcttaatgatgattgtcgtgttctatgaagcgttggtctgaacgatgagattgatcaaagcaggctatttcgatggcatttaatgaacgcacgtgatggtcacggttggatgtgtaacctctctcctgtttgaagcgttcacctgatagactgactcagttagatcaacatatatagatatcaattaagctaggtatcaaatccaaagcgctcccaatctaatctacatggaggttgaacagaacggctagaagtctgctcagaaattatatcgagatcgactacgggaatcatcgatggcctgaaaagccaaagtttggtacggagaacagaatatatgtcagcgcgtgagatggtctcgtacgtttcgttttcgagacaaacagagaacagaacaatgagtcagcactaaccggccgtgagcgcactggaatgggaagagcgttgtcgacagttggtgtaacagacgtgtggtctgagcggtcgtcagagggtcgttgaacatgattgcgcctgttttgaagaccaaccaattcaaaagtccagcagaaaggtaagctatccgaagagaatagggcccgaacagggtagacaaccgaaatctacatacctcgacaagccttcgagtttattaaatctagcaacactcgaggacagaacctcatcgccttcatccacctctgcccagcaatcccgatatcttcgtcgccatcgttgttctcactagtaggcgcggcaatagcaaactctggatcgaaattgtctaaatcaggccagccgtctactccgtccactttcgacttggctaagaactctttgacaagttcggtcagctctaccgggccctcggctaaagactttctgcccagtagtcgacctgctacaatcttgggcacggccagcacgttgacctgaaaaaatgcttcgtctccttctccttccacctctttcgtaggagagtgagagagcccaagatgtattccccatcgactcaatgcttgaacaaatttcggattcgttagaagaaggaggtattcgtttcgggtgaggagaatgaaagatggttctaatggtcgatgaagcgcaaccccctttgagtcagatgaatcgacatcgagacctgccgacccagcgaggaagccctcgcctaattcttttagaaatcgttcgacccggatccgctcgtctgccgcatgttggtctatcagaacaagcatttccttttgctctcttgttgccgatagcggatttgttgacgagcctgatctcaagacgcatgctaggaatttttcgtctacttgcgagatgatagaggcttcgcagagactttccctcgaaagatgagcaggtaagtcatgtttgttgagccgagcggatttgaatatatttgaattggaaagagagcgacgctgttgagggtaggatggtagaggttggtctcgagacaaaataggaagctccacctgcggaacaaaagcctcgttacgagatgcaaatgttgctagaagaacaagaagggtcagatatcccgtggcaagatttttcgatggatcaatcgtgtgaaacagcatcggcaggacagtgactcacgattcgaccaaccctttttcgtttcgatgaaaccagttttcagacgagtcagctcaaccagagcattattaacttatcttgagtagagagcaaatcacaacaaaagtggagcaaataaaacaaactttcaaaacctgtgaaagccatgacggcaactgtttgctgttgcaattcaccacctcgtggtgatcacactctttccgagacccttgggcaccggatatctttggaccattcgcaacttgttcaggactggctatctctacaagcttagatgaggtagctagcatgttcaagcactcaatggcaggattgatagacggggcctcgcatatccaagttccagtcttgtagacgaacgaatcctattttgtattgagaaaaggaatgcgaggtcagtatgtcataactgtagtatgcctataatcagaaccaaagtgcttacttccttgaccgttcttttatctgtcacctcgctgcgagctctcttccttacggagggtgattttgagcgctctcttgagctgaaattaggtttttgaacgctcgactcatattcggcacccctgcttcttttaaatggcacaatcccagacggttttgaatatataggaggtgattgtacaggatcagtcaacaaacttggcctgcttgcttgaagacaaagcccatgcttttccaggaaagagtttactagttcgagaagaagcgctataatcgacgattcgtcctgtcggacatgtgatcagatgtttggtattaatatctgtgatctcggagatccataccagagaaagcaaaactcacctcgaactggactacagttttggaaggctccatgttgacgtcaatcatgttgggtggtaatgtgatgctcaaaacatacacagccttgcgctccatctttcgtatattcatcttgttcgaacctgatggaaggcaaagtgttcagtcgatgaagaactagacgatattggattctattcagaatcgaaagcaagacataacaaaactgacttctaggggaaaacatacccaattcaagctctggttgaagctgtatttgtagttcaagtggaaatcaatcatatgcctaacaaaagaggtggtggtgaaccgaggccttacagatcgcgcaaacccactctgttcgaatcgatcttcaacagccctgtgcagatctgaccatgatagggcgtaattatttacaactgaattaaatcgatgctccggacggtcagagttcagttctggctaacatgagcagatgtatcagcttacatatgtattgttgcgcctgactcaaatcgaatcagaagaggatgagatattgttgaccattgttatatgagtctgaaatatgataaagagaaagagagtgagctcactcgactgtgagctccgttttgagagatgaatccttcaatcttaatgtcttgtttggagacttgtagaggagtcacagactaaattatatgtgcgtcgtatactgatattgagtgccatatccaaagaactcaaataagaggtgcggaggacaaactcttatcatggccacaccgtggatttgtccgaacctagagatcattgtagatgtctataccatggaagggatgaaagtcagaggacaattgaaagagatatcgttcagagtttgcttgcgcacggctctcacagataaagctatcgagatgacatactttcgagacactccacattcttcctccctccttgatctgttccttttcaagatcatatagagagaagctaatatgaggaaataacagagacgccatctccacaacctttttgcaagccaggagcatgctggcagatgagggcgtggacgtccggcggatgggaagctgaacacatatcgcatacggaaccaagttagtatatcttgcatacactgaaggctagcaaaaaagagaataatcgaattctgagagaatctgtaaccacagtacgacaaacaaacaatcgggctttacattgaaaaaaagatctttgatcgtgacgatagttcctgatcttaagagacttctgccagatgggccaaattgaatcggttgactgccctgtagaagttcacaagccgtgtcaggtcagactctcttcagactctgtctactcaaagacgtatctctcatgatcactcagagtcaggtattcaggctagcacagaccttgatggaaaacgaccaagtatctttcgatcccactgccctggaaacaacttctagacggctgactgccgccagcgagctcagtgcttcgcctctgtagccatatttcccctcgcccaactctctggtctctggttcactcttagacgtcatgtatctatgtccatcccggagccgttcgatcccctgcctggaaatgccagtaccatcatcttcgacacggaggagccatcgggagagacttaggtagatagacaggtgcctggatttagcatcgagactgttctgaatgagctcagacagagcctgaggaagggtgggaacgatagtctgagaacggagatggttggccagcgaagaagggagtggcttgatgtgtcggtcagacatcagggtagagagaagtttgtgagacagatggttgcttgagtcctaagccggtgttagctaaaacagactatcggctttggccgtgagaggtagagtgaagataaaccggaaggcgccaagtcgacaagaaacataaaggatttatctatagcccggcagagtactaggtatgatctgcagatgtctccaaccagatcaaagcatgctcttgagcataaatgggatgaacagtggtgacgagaagagagattgtcactagatggagctcgtttcgaaagcactacttataatatggctttgttacagatcatagttaccctggttacacgtgctacagaatcgagttgacatctttatcgaccgttggcacttctattctctcgacagactttcatcccatcccctcctctcttccttagtctttcatctccatccctttgccacattcattatggcatcaatgttccaacgtgatcccagagctggtcagtagatcttttgtttgtttcgggtgtttctgtcctttgggcgtgagccggtagaagctttagcttacacccagtaccttttttctctttttttcccctaactgggatttcttctttgattgtaggtctcttccttggtggagagcgagtctctggagaagaagttcgaaaccagaacggttcgtgttgattgttgtctcggcttatgctgctcttttctgcataatgtgacgtatcagatgagaagctgacgcctttgcttgaggaattctcctgatgacaatagtcctggctgctcaaaccatctccaacatcgtcaagtcgtcgctaggacctgtcggtctcgataaggtaagattcgatatcctttgttggactatatcaggtacaagcaggccgcttctgctctcgaaggattcttatcaagtttgatctcactttatgatgaaacatgtagatgatggtcgacaacattggtgtaagctcttgtttttcttctctcactcgcaacctcccttgccttcagtgggctgatctcattgtatgctgtatacctccatcttcttcttcttccgctttctccaggatgttaccattaccaacgatggagctactattctcaagcttcttgaagtcacccacccagctgttagccattttctttctactttctctcagccaagtcgcatcctgactgaattctttcttctcttacacaaccaatgtctaggcccgaattctagtttctttggctcaacagcaggacaaggaggttggagatggaactacttctgtcgttcttctagctgctgaattgcttcgacgagcaaatgatttggtcaagaacaagattcacccgacaactgtgattaccggataccggttcgtatttttctcttgcttgctcagcatcgaccaccaaactcatgaaacatacctgatgacatacaaacgaccgattctgatttttgataaactactaaatagattggcctgtaaggaggcttgcaagtacatgctcgagcagatgtctactcccgtaagcaagcttggcaaggactgcctgatcaacatcgccaaaacatccatgtcctccaagattatccacgcgttcgtcatatcttctcctatactcagacgtgatccagcagggtcgtgtaaatatcatgtcaaaacacctaacgaatcttcggcttccctttggcatatacgtcttgtctatcatccagcgacgatgatttctttgcccccttagcagttgatgctatcctggctgtcaagacggtcaaccctagaggagagaccaagtaccccgtcaaggccgtcaacgttctcaaggcccacggaaagaatgccagggaatctatcgctgtcaagggttacgctttgaactgcactgtcgcttcgcagggtatgcgctcttttcttactacttttacttcaagtctgcttggtcctgattattttgtctctgtgtctcccctttctttctctcagccatgaagacgcgaattgttggagccaagattgcttgcttagatatgaacttgacgaaacagcgaatgcaccttggcgttcatattactattgacgatcctaaccagcttgaagagatccgacgcaggtacgaactcttggtcatcttagctcatttgtgtatccttttcattcaaaatcttacttgtttttcaatactttgttgttcgctgtagagaatctgagatcactctggagaaaatccgaaagatccttgcatcaggcgcgaacgtcatcttaaccaccaagggaatcgatgatttgtgcctcaaagagttcgttgaggctggcgcaatggcagttcgaagatgtcgaaaggaggaccttcgaagaattgctaaagcctctggagcgactcttatctcctccatggctaacctggacggagacgaaacgttcgagaaggagtacctgggttacgccgaggaggttgttcaggagagaatttcggatgacgagttgattttggtcaagggaactaaggtcgtcaacagctcaagtatcatcttgagaggtgccaacggtacgtgtcgctacatcttcttctgtgccacgatcgaatcgctatcgtgctgaaagagtaattctcttgaatcgggcagactacatgttggacgagatggagcgagctctgcacgactcgctatcaatcatcaagcgaaccctcgagagcggagccgtcgttcctggaggaggagctgttgaagccgcactctcgatctacctcgagaactttgctacaacccttggctctcgagagcagctcgctatcgctgagtttgccgccgccctgcttgtcatccccaagaccctttctgtcaacgccgccaaggactcgaccgacctggtcgccaagctccgagcctaccataacgcagcccagacggcttctattggagatcctaagaaggctctcgctaactacggtcttgatttgatgaagggtgaagttagggataacctgaaggctggaatcttggaacctactatctctaaggttagaagtttgaagagtgcgttggaggctgccacgagcttgttgaggattgatgatggtgcgtccactctcctcttgttctcaatgtctctgatcaggtgtactactatcatggttgctaacctctctcgtgtttgcatttcaacgaaccgttctacagccatccaggtggcgcccgagcagaaggcagaagatcctcacggaggtcactaaaggagcaaagaaatatctgtaaacgttgaactcaagatagatgaaaacaaaatcttcaattactccctttcactttcttcggggggggggtttttcattcaggctttcctttctccttgttcttgtctctaacttgaactacgggacaaatatacatctatcagttccacgcttgtcttgggtacgtaaagcgaccgaaaggatatttagagaaaatcgagaaaataagatagaagagaagggaaggagattggggaactagagacggatggagaataggatacaatatagcgctcaattgagacctcaaaatttcctctttaaacggtggcgcagatgttttccgctttctgtaaagcctccaccctgtttgatgtaatcgaatcggagagagaaaagaaaaggaaaccccgcggcgaacagtttagcgtatgttcgtcgcagacgacgaagggattggaaaagacgaaataaacttacatcttgacacactctcttctgcgctgaacgacaaactcggactccttcatcaaatcgctaagcacgtcgggcttgtacagctgtcgaaattcggacaggaagtcatcagtatcagtttccacaaactgctcgtcgcttctgcatattgctaccactgtgttgcagaaatgagactaacctgctctagaaggactcgctgcaagttatccttggattgctggaccaatgtgtaagtgatagatttctacaaagtatgcgatatttctttagtcagtgaccaaacttcctcagacaatcttatgtcttattcttaaattggaaagaatccccggacgagtagagaagatgaactcaccggcaccatatcgatcatctcccgcttaacgatgttgaagtaagagtgaatgaggagctctattcaaacaaatggaggtaaacaagatcagatttacgcatacgagtgaatattctgaagaagagtacatactaataacttccgtctccatagtctctcgatcgctaagtgcagtctgaggtcgaataaccggcggaggctaagagggaggacccagtaaaaccaaggcaacactcagttcctttctaacccaatcaacaaggtattgctctagcaacaaagataactcacagtgtccatgacagagacccccttcttctttggcgcactcttagaaccagcggggaagaaactgctgaagaagctcggctcctcctttttgatatcaacctcaagatccttgttgttgttgagcgaggccgcagtgatcttctttggatcaaccttctccacaggcttgttggcgttcattcgatctgtcacaagggacatagccttcaaagttgattcagaaagttaggaacaggcgactttaacagtttgtaaccaccactatttgcacgtctatagctgtaacgattacaaaccttgtgaccgttgaggaagtcagggtgggtggtgttgacgtagcaagcctgcattctacaatgttgcaagagaaaaacgagatattggttaaccaatgcccctgcctaaaagctgatcgattgctctgaacagttccggtgcgcatcggacgtactggaccatatcggtcaccaacttggtagtgggaaccatagaatcccggaagaactggataacggtcgcgttgaactggtccttgagagcaggatatcgcttgaaagcttgctataaacgcagcagattggagtgaagagatgcattagcacaggtaaaagaggatatattcaactgagcgtttcctccttgcccaagacaggggtgctcaaaagaggttgactcacaatcttcgtgaggatttgacccaggatccgaatcaactcgtcgtacaccaactgacagcatttaagactgggctcttctagtcgcttgatctgctgtttcacaatgacctcgaacgcagcagtgcccacgaacaacgaaggagtggatccctgtagaacgaatgatcaaagacatatcaaagaaggaaggggtttatcaactggaaatatgagagggctggcaggggtgattgagagttgcaatactaacggaagagttgtaaaggattgttcgtatgtcgccatccttcacctggtcgaacggatcgatagacttaacaccctggttgaacagctcgtgataaacaaaactgatacgagctcctccagaaagctcgtttacattcagatcgttcgatcctccgtcgatgattgttcggaactcggagcagaactcagtaatgacagacaaaacaacgtttccctgtagagcattgataatgtttgaaacaggaccagaacagaagcgcgttaaaaaagataagcgaacgggaacaagaaaatctgaaaagaacacaggacataccccagattgctctcccataggacctccaagggaggctaactcagtctgataccgagaaagctgagcagcaattcgagcctttgtatccggcaaagtcgctttgatgtggtgcataagaagctgaatacgccattcagaaggagattatttcagctaacttgtccacagaagctatacgaatacattcaacgcaccgtgttcagccgtctggccaagtaaggagttccacagtactgagccttgttcttatagctctgatggttctcgaagaaatttcgctcggcctctagtgcggcagagatagcagtcttttgatcgatatctcgctgtcctcggtttacaacagggacgtaacccagtcggaggggaatgattcgcccagccaggatatcaaccacatcagttccttggtccctgcggacgagaaagcaaaaatgtttcattagtttattaagagaaaccttgggttgcgctgcgttcggagactcacatcagatcaactttggttaggacaccaatggtcctggttccatcgggatcgacacttcgagccaactgaagaccatcagagttagccaaatctgtgttggcaccggtgactgcaaggatgacagcgttaggcttggaaatgaacttgaggagcatgtctctgatctgcttctcgatatcccggggttggtctccaacaggaacctgaataacgttgtagaaaatggatatacgcgctcagcattcccactagagtgcgagatgatggaatcagcagcaacaacagataacaaaccttggtaagaccaggaagatcgaccaacgtcaatgtgagcacgttaggagagtaaatcctcaagttgatggggtttggcgagatacctgtgaaaacaacatagaacatcagatcgctcattcagtagaaatgtggcaagttgtgacagatcttgcctcgttcgatacatggtatgtgtgaatagaaggttcaatgtactgaccagcgttctttccggtgtgcctctcagtgtctctgacgatctcatcacgaatctttgaaaaatcgtggaacttctctcctggcaaatgcaagaactctccccactcatccgggttgttctggtttaactgttgatgctctgcgccctcggcaggggcaggcgtgttgttagctcctagcgaggcgttggagggtcggtttatgagttgaaggatctgagaggagatgacgattagcgatgatccaagcgtagaaagtcacattttgagaaacttacgagaggtcgtcgagtcacaataccctgagagtagtacagatggatcagatgttgttgacctatcgatagaagcaggtatcacgcttcagacttacagttcctctaacgattatcaaagacaatatgagaacaagacggtaagcacccaaggatcgactgacatctcatttcaaagacggatctcagggaaaactcaccgaggtaagaaatcacgtccgacaatgttctgagattaaaagcgagggatgaaagagggatcgtcgagcatgttgtcagaaggaactgtatgatttgacagggtggcagtcgaaccacagcctcgactattaatcctggttccaacacatacctccaaaaccgaggactttccgctgtttgaaccggaagaacattacaagatcaatacgggagcgaggtcgttgagaggtggataagagagcatatgtttcagacaacgcttacctggattgggaaccgatgaccgcgatctgcggcaaatcctacttgaccaacaatcacatagccctcatggtgagctctccttgtgcgaacgaccaaggatcacaatggcaaagagctcggatgaacatactatcgggttggtgactccaatggaagcaaacacgtcttgaagctattgaattcattacagtatcgatggttgagagtgaacaacaagcaagtcgaagagatggtgttggaagaggggaggcgagtgaacgattcaacgatgacccaatgggtgatgtcagacctctcaatcaagatacaacgcagaagagaaacacagatcacgaaccttgttaacgaggttgatgagctgcttgtccatcttgtgtgattatatgtgttcgtatgaaagacagagaagaaagagaggctcaaagaagtatggaaagaaggtgggtgttagggctaggaatgaaaacgtctagatctggcccatctcattcatcaccgcctaccgtcatcctttttctcgtactcctacttttcacaaccacctggccatgtcaatcttttctctctgggttatcaacaaagcaggtggtctcatctacgacaagacattcactcgtatgttcgctcgttggcttctcgtttttttttgtttctctccttgtggaagagcaccgtctgatagacagattcccctatcaatccttctctctcttgtttctagccggtctcgcgtctgtctctcaaaacgatctgttggttctcgccggaacattacatggtattcatgccatcaccgctaagctctctcccgtagatggacctgcagaaggcttggagatcatccagggcgatggtgtcaagatggtcgtcatgttgacgttgaccggtacgcctagaatcactgctgatatcgctcttctttggctgaatgtgtattctgctcacgcaaacattcccgacatatgtacaggcacaaagtttgtcttgcttctccacccatcatttccaacacctccgccgcctcacccttcttcgcctgcaaagatactcctacaaaagatctacgaagcctattctgatgcggtgatgaagaacccgtttcatacgccggagatgccgatacgaagtaacgacgcgttcgacggcagggttgaaagtctgatccgtgcagcgatctcccaaacaagtggaacgagtgcctagagggagagaaaaagagtgttcatctgcgccataaagacagaatgaggtctgtctgtatgcatatatgtgatatttcgtttcttatctttctgtttcttgttcttagacctgcagaggtcatcggcgtggtataatatattacaaaatcacgaccagaagagataggtatacaaacagccaaagatcgttcgaacagatgcctcaacagaaatcaactcgagcttgtcggcacagaaaggaaacaaaatcagagaagtaagagagatgtacactagagtcagaaagggaacctccatattctggacgacatcacgtcacagtctgcaagctctcgtttcgttcgtgcccgtttgtccggacaaataccgaatgcgtatggatcaccgactcggccgtcgatgtacctaacgcccagagactcgatatatcgagtccaatcggagacgagaacgtttccttgattgatcaaacatatgagcagatatgtgagcccagagtgagctgtagagatggaaagactctacgccaaaaaaaaaaaaaaa

SEQ ID NO: 2153 - DNA, 14764 bp, Xanthophyllomyces dendrorhous
aaaaaaaaaaaaaaagaactagaaaatacgcgagaaaagaacggaggatggcgacttaccggatctgtcagagaagaagattgcagtagtccttcgagctcattgatctcttccttgatggctcgcttagaaaagtctctaaattcattgatgacgcccatcgtgattttcttgagacgacgaagaattgtatgaaccacggaagtcaggaccccatggggcattattcatcattgctttgatatacaaacccgatagagaagacttccgagaaagaggaaaagtaagaactaaccttgaatttcgaatcaatcttctgaacagcgtcaatcgtcagaccgctcggaacggcctcagttgcactcatgttcccaccactagcgagtcctgcattggctccggttactcctccgcttccattacttcctagacttgatgctccccagccagcaccgatgttcccccaagcgttcgccaagttgaactctgtgtttgacaaagaaggttccgaaggcgctgtccctctttcggaatcacggttggcaaggtattgatcgatagactcggccaaaggaagaggaaggtccggagtgattgaagtccaggaaggagaagattgatttgggaaaagtaggataaagagcttccgatatacgcctatcagggtatcgaaaaatgtctgcaaaacttggaagtaatctggcacaaagggctttcgaagagaagaatcattgaggagaacgatcatcagccgaccaacacaaacaaagtaatttcggacgattgtgagaaacctaatgagactaagcgcgcccactcacaaagctagaggtaattagaagagattccccaatggtatctacacctggtcccgctcctggtccgccgacatcacctgttcccgccccagacgtcccggaaccgaccgacggtctcttccccgttctcgacgtcgtcttgaacatgcttcgcatctttacaccagtccctataccagccgcttccgaagcagcggctccgacgcctcctttgccttctgtgaacgcctcgtactcgtccagaaccttgagtagagctttggtataatccatcagggaaggaatatcaagaagaggggaaagagacatcccaagaaggaagaaggagtatggtctattacgcatagcatatatatcagtcactctgaatgtgacggcaggacactaaattgattgtacatgactgcatacctggtcttgaaagcctgagggtcaatagaggtctcaagatctcggatgttgacatacatggtgtcacaccaatacatccgcctgattaaaaccaaagaagcatcgagtttaaaacgatctggtctttctgttatccggcgagcaaactaaagatatgtacgacatatgttagaagacgaacccttgatgaccagactttaacagatcccatgtccctagccttttcttgatcatttcctccaacgccaacttgacacttgattgcccatttgttcctgttggagcgtttgaaagcgatgaaaacgggccgttcaggaatacgctggttgaatttattgtaccagcccctgtagttgaggatgaaggagcactctctgagaagatagagtacgtgtctgaattatccaccaggtctggccgacggttcgagctggtctgtgttgagttatgggatggcaaagaactggaatgagaggaagactgagaggagttatttgattttacaggaggcggaggtgttttaaacgcttgagtcaacaagttggaactataagcagagacacgacagcagcaatagcagaagagggagtcagatataagagcatatcatcatacaaaacaaaagacaacgggaggaaacaaacgccgaagactttctcctgggaaccagacgagacccctggcctgaagaatgtattgaattcggcatttggtttgactcttctgttggctttccacactatccttccagaagagatccttgtttggccttggtctcaatgtagttgtgtgtttccggatgagagggtgtgagcgggtgagcggttgagtcgcttagtcatcatggttcctaatcacgtgtcattacccaacggagaagtccgatggctgtagtcacacaaggctgtgcactgatccttaaccctaacctccgaaatggcctcatccggtcgtgccgtctcgacgaattctgttgagcgcttttacagttccaccttgaccacttttctttggacgaccacatcatcaaacatgggctctgctacttcttctcccgctcctgcttccaagcctgccgctcttcctagcaatccgagtctgatcactgaactaaacccggaaggactcaagccgttcgtttagatttcctctctgaacactctcgtttgctatttgaggacacgtagaaaatcaatcgtttgctcgtgctgacgtatggacctttgaccgggtgttctatgtgtgaccatgtcgatccgatgatacaggtgctgcgcttgcccggataccaaatcagctcgagaccagtgtttcatgggatcggaaaagcctgagatcgagtgcaagcagttggttgaggcccacattgcgtgtatgaaagggtgcgttcgttgtcgttgtctttgtcatcaagtctctattctcgatttatgatgtaataaccatccggactgggtatcaatttctcttcttgatgtccttgatctcttgggcaatttttttttacagttacggcttcaaggtttagatgtttagataataatgacatcgaagagtttgtgccggactattcatttacgatcgttccccgcttgttgcattcgcgatctgcctatttgcaccattgaccaattctgctgatggacctgtgagccatttgcgcgctgaacacaatggaaagacatatatctattcgattctagacctctccttctccctgaacagtggcgaaattcagagtttccatccttcccttgcctttcgtctccttctgcaacaaatcggtcaacactcggaattgtccgggatcgatgagcagaatctgtgagagagtaaggagaacgatcgtcacagacaagatatattcagctcaacttgctccttgaatgacactgatgtacatgataggtttcatgaatggatatttgaggaaaaaaaaagagtgaagaacaaaactcaccacctcccattcgtccgatccaaactcatcctcctcaacctcttcagcagcgctaacaatttgttcctttagcctcttcccatccttcgtaggcatcgtgattctgacacgcattcgggctcgctgaatcggtaatgtcgagtttgcctgcaaaatcttgatgcattccaaagccttttttatttttattttaatgaaatttgattgtgccagcgattgatatgtcaacacgttttcactagacagagaaactacgcccgctggagcaagagtcgaaagattgcaagaaagataaaactgggacgaacctgactcttggcgctcttgtcagctttcacactgaatccaacctcacccatagctttctcaatcattgatacactgtacggcctctgcgtcgatggatccacacatttttccgctatctgagtggcgatatctttgtaaagattttggttgttatgcgaacgttccttctctcctacttggagttcacctttcattagaatctatggaagagcgatgggacgcgttcaataagtggtcttccagagaggaaacggaaacagacgcgtcgtgaagaaaagttactactgacttctttgagacattcctcttggtcagtcttgccgaaagccttcataagctcgtctgtcttggcagcctggcctttcgtcacattggtaaagaccctttcaatctggacgacctcatccatgtctttctccaccccggctctccactcctgaactttgttcttgtaacatgcgatctgaaagagaaaaagatgatgcaccggtaagcctgtgcaagaacgtattgaagactatgggtgttggtgtatgtgactctaaccacagacgaacctcgaatcgtttgccacctttcttgagtctgacgatggatacgttcgtgagcctgtattcccaaaaagagagggtcaaacgatgatgaatatcggagtcatctgataaaagggaataagcccggtcgaccctacttgatctgggttccaggctgatttattttactcatctgatacagaagacgatctaataaagtcgagtcgggttgagagttgagtttcgataggtgatacagaatttctctgagagaccagattgatgatgctctaggacttggaatccaacttagctaagcaagccttcgcgtaaccacagtacactgtaaatcgtttctcgaccttctttctccactttgctctctccgttgccttctctcttgacccattcactcttctctctcagcccactctgcgaaggatttctaaaagaaagatacgatgtcgcaacccaacaaaacactctacataaataacatcaagttcgtcgttccgaaccgattggtctccttataatcctggccggatagcagaaagctataatttttcttgtactgatctaactttgcatcttaacatctttctttctttcgtggttcttccaacgaatccgtccggttcatagtgataagatcaaaaagccaggtatgtctatctcacctggccgcgtctcgtttatcattctaggctggtgggtcatcgagaatgacggtaagctaacctacacgtgctacctttttcttccaaaacagagcttcgacatcagttgtaccagcttttcagcccgtacggacggatcattgacatcactgccttgaaggttcgtcctttagtcatctctatttgttctagtggttctcagataccataggagagaacgatgggtgtatatcctgagatgtcgcgtcaaagctaggcatctgacgctgcgatctatggaacgatttctttttgatcgatagacttcaaagacacgcggccaggctttcgtagcattcgtggatcaggtggcagcgacaaccgcgttgcgatctttgggtggagagaccttttatggaaagcctttggttagtcttcttgtgtttgtctggcggctcataagagttatgtcgttgtcaaagttcgagctgtaaagactaaacgctcgtgtattattctcttcctttaaacaaaaaaaaaaatggacaatctcgtgccatccctactcgccccggaccgacctgttctttctacttgatccctatctttacgtctgtgaccaccgtctctaattatggctgaatacgatgaaacagaaaatcgcgtacgcaaagtctgtctcaaacgcgctcctgcctccgtcagattcgaccgccccgccggcgagcaaggtcgtcatttcaaacgctcagagagaggctgatgacctgaaacgagcgagagaagaggaagacacgattgcggagaggaagcgaagtaaacctgatccggatgctgaggaggatggagacatggccgtggatgacggagatggtgagttctgttctattttgtgtagtgtgtttttacacgcatgatggctgatttccttcttctcaatttcttggtcggcgtcctcacgaatatttagaacctggacctcgccctagttaaacccgttcacgtttctgctcaataaaacacttttctcatccctattttcctactcgatatcccctgtagaaggcacgatccatgtactacttgcttttacttgtcttttgctgtacgccgaacgttgagtgagatcgagatcgtcgacagaacaagaagcaagagaggcctgagaagcaagagagagagagaatgctttctattactgtggtcttcagacatgtagagaccaaacagctccatcgagagcgttctctactccaagtacaccaagactcataaacctatatccgatgactgtgtctcacagttggttcaaccaactttatgatgagactccactgacgttttgcttttgggtttgtgcataacgagagaaacaagatgacggtcgcgccagcgggatggacactctatcaccgatctagtcgggtaggtatgtccaattcttttttaacaatagagaacgagcctgctccgaaaggtgattgatatttatataaagaaacaagagaaggccacgtgccctatattgcgctttcttcatcaggcttggggtaaacccgatagagccggtgggatctcgtgcctctgcttgtttttcttgtaaagaccttggtctgaggtcatttgcatcagttatacatctatccatcatcgtcattcaccacagaagcgggacttgtcatccattacttggaaaccgatcttttcttcctcgacagaacaggatttcttggatatcgaggaggactcttgcttttctccttcattcacgattctttctcgatcgccatctctcagggatcatttccttcttcttttgtttcttgtgggcaactagaccatgccttgggctgatgatccttgtgagtcttgtatttaatcgacatctgaagtgatgcgaagtgcggctgatcgtgtatgcatgtgtgtatgtgtgtgttttggatgaaactacgcacgatacagcaaagacgataaatcatgatttatatgtgtctctattcccgctgacggaaaaagagcttcgcgtcgtacgtttgctttcatcttattttggattgcacagcccttggtatgatagacaccgctggacatgtacttgaatcgagctgagcgcgttctcttttgtaccgaccgacacagaccgtagcaaagtgtgaccggccgttgacattatttcggacatgtacatcgagtcaatcgccgatgttggaagattgggaggtaactcaacgatgtgaaaaggtgttggaagatctccgggcatgttccgaacgagtactggcagaggccaaaaagaagaaaagtgtgggcgcgttgggagaggaacggttcatgatgaaaggtgactttagtggaggtgtctaagtgtaggagaaaccaaaagaaagaaagaaagaaagaaaacggggagtctgtttggaccacccagagtgaagggggtttaatgacgaggaaaactaaagttcgacgtgagttttgatttgatttgatctgatcgttctgttgcagatgtagacccaattgctaaagttggttcctctttgttagtcgtgatgattggcgcgcaagatctagagcttcaccagacctttcccatcgtgatacgatgatacccctatgttgttctaccttacccaacctaactttcaagcatactcaccttgcctatgacttcctattagaacctacctggtctttcctcctcccctctccttatctctctagagctatctattcatccatctttgtattccctttttgatcatttattcgggactccttttgtgtatgtataagatacgggaaaagcagatcggaggagatgatgaactagagttaattaatcgatcaatctacggccacaatctgatttgctttgaatggttcagggagaacagagtttgacgagtcttctgacgggctaggttcttatcgtccgctttgtaaaatggatacagtaaaagacgcaagagagaaagaaactagcgctgatcacttcggcgaggcggtgtcagcaacgacggctacattcggaggaaacttcctgagtgttccttcacgtgtacgagaagaggcagcgtagaatagagcaaagaacctagccggaagacgaaagccaaaaaaagggactaggaacagaaaccggcacaggcacaggaacgagaaaagaactctaaggaagtcctatgaaaagccttatctcttccggacgaatctctttggaaccgagtcgaccctttggatttcagggtggtctacgtttagagcctagggatagtgacgttcacttctgtcaggctgatcccagacccaagcgggtcatacatcagcctcagctaaagatgtcccggtacctaccatagtctcgaaagtggtcgaaaaacggactatcctggctgtgcaaaatgatcgagatcaagatcatgtggagactccacatctctcagcagccacacgccaaaaagcccagactatcgctgacgacgtcaactctcctatcgacattggagcgttctatcaagttataaagactcgctcgttttcccgtgcttctcactttttttcttcccttccttaaagatatatacacattcacagatcgagaaaccattatccactctctttataacagaaagaacaaacaagacaacactctaaacactttctaaacatgtctgccttcgttcgatccaccgtgtctgccgcgtcgaccacccgatctgttatctccacatcggcatctactcccgctcgatacgtcgtcccagcctgtacttgtatgtgctcgagttccgtctttcgcttacaatatgtttcagagaatgtcttcctgactctttgttctctctctctcttcctcggatacaaacagccggagcaaacgctcctgtctgccgatcattcaccatgtcgtccccccggttgactcgagctagtgtcggacacagtgggatccacaagtgtgtgacaaagactcactacaacccatcgatcgcttctggctgcctcggtgagtgggctaagtaaagttcaatcaacgtgagtttcttctctcctttcacatctgctcctagatatcgcgttgccggtcaacaagcttatcttacggtgtccgttgttttaatattcagcctatgcatattgttctcttcaattacgcaccccactctggcgctagtcgctagccgctagctttgtatctatagacttcctcatgctgccatcccaataggttcagaactcatttgtatcatcccatacctcagccttgccatgcatcgaagccatctcactggccatgctatgattgtcattatcaaatgtattttttcccagatataaatccaacgttgtttcattgtgatagattgcttatcaagagaaagaaagggaatataatgtacaaggcagatacagctatctgggatagattgtcaattagtgaaggctaggagtgcaaattgttttgtcatagtgagcaaaaggtgtattgagctaagaatgaagggaatgtcagccagaggccaaagtccccgtgggacaagttgtgctgacataatgggtggtatgggtttgagatgaaagaagcaagcaagaaagaaagaaggaaagaaatgcacagaccaagaggctaagattgaacaaatagctctcctccttttttttcttcatctcgcccaatgcgaataatgtccgggcatgcccgcttcgcatttctgacaatctggcttagggcccatcgagaacatatttggactcctcggcggtggcggttgtaacggtcttctctccactgtcggcggttgatcgaacgtgagactcgaagtcgggtacggaagatgagcgagcgggtttgaccgggggtcaaccaacgcgctatcgatggcttgcttgtaagcggctgatgaatgggaaccgaaacttgatgaactaccaggcagggccacacgagatgataaccggggtgagtgatgtggggttgacgccggtgtaccagacatgtacaacgacggaggcttttggtttaaaattattatcattatttttaatttttgaacaaggggtcacataatatacgcatatacctcgggtcagtcgggctcgtcaaaacgtgatggtctgcactttattttcgtcgtatacggaaaggaaagggaaaaaaagggaaaaaaaagaggactcacgagtgaaccacctcggtgagcgttccagttgtgtgactccaagcttgaagatacgtccatcttgtttccttcgcctgctccactcccgcctgcgctcaagctgtccatactcatgaacgaatcactcccgttggctaaacttgagccgatggcaggggcaaaagatgtgttatactgctgccgtccacgactgtcgtatcctccgatcggtccgatcgaaatctcatccgggtatgattgaggggacgatagtcggagggaagatgcagactgaacaaacgaccgttccgaattgggcgtcgttggcacatgtggtcgtttctagggttcgtgagaatgaaaatgaaaatgtttcagtcgataacacagagatctcagctttgtacactctcactagactatcactcacaggactaggctggtttagatcaaactcttcagcctcatacaaaggagaaaccggtctggaccgtttgtttgaaaactgatgggctagctgtggcctaggatgatatatcgatgaggcggcggcagcgccggaaggaaacgtagggtctacactcgccgtcgacgacatctgcggccacaactctgcggccacacttggacttgggtcgacttgcatctctctccggtcgggtcaatctatatgaacgagcaggaagagcgtgggtgagaacgtatgccagtcaatgtcaagcaggaaaacccaataatgggttaagaaaactggggattcgtccaaataaatctagtaatgtttagactgaaacagcaaagaaaaatccgggggacaaaggggttagggttaccaagatggctactgactacgcgtaacatccgcagcaagcgccgcagcaaattacacgcgaccacgcgacgcgttccgatcatcccgtcagatcgttgaccgaaagttctatgtcccctttctcggcctgctagagtttcttcaaaccctcggttactgtagctggagcttgttctatgctccctctcatccgtcctttcgttcttgttccattcgctcgtcagtctgttcgttcgtccgttcgttcagttcgttcgcgttcgccagctaggtcgaaattttcttcttaagaaaggtacgtccacttcagaggctgcctgtagaattctccttagctgatcgttgtcgttcaatcgatcgcccttcctcattcttctctctgttgtaaaaagctcgagcaaaaaaaagaaaaccaaacaggcccagtcgatccatcctggctcgactctgagcgttggaaacacttacatcaggcccagaagataaacctcaagtgtaagtctcattcaagatcatgcttaacgaggtgtaaacatgtgggcctgaccaaagatatcaaccatccaaacggtcttctccgatttctatcctgcccagtccgacatgatccgtcagactctttctcccctcgacaacgggtactctgcttatggccatccggtcgccggtcctagtcggtcgaatcaacacctatacccccagcctagggaccatatcgaaccagggatggagtacctgacctctccgttcaacactcgtgatccctctgcatcaaacaacaccatctcgttcaaccagtcggcgaacaccacatcgacaaactcattatccgtggcaagagtgttgttggaatccccaaacaaaggaagcctgtcgacgtttcaagcaccggcagaacatcctgtaccaaacattctactaggaccggtccatgaggaaggtcgcagatgggattatccgaatgcttcggaaaccggacagagtccttcaacagaaacgctctcgggcacatggggttcagggccaaccgagtggccgtatgggagcattcggaaagagagaggaagaggaaggaacgcggtcatcagggaagagtatcagagtatcgatcctcagatgctcagtgcacctccttctcacctcaggccccatccttccaacctaggtccgcactctccatctcattcactacaatccctaccttcgccaccggctccacctcccactcagctgtctacacactcctggcagcagagaccaccttcccatgctcaaacccatactcaggctcgcacttccggccatcgaaagtccatttccgagtcctactatacaaacgttcatcctcctgctacgccagtgtcctatatggcacccaccttgtcccaacacaaccttcctccgctctcgccctctcctcgtccgttaccatatcaggctacggactgtccatccccgatcgctcatcatcccggatgggatgacgctctagataatttcctagcttacggaccagccgagggtcgaccgatcgatatacccaccccgccagtcaaatctaattcgtccgtttccttcaacgaggtcaaactcggacatccctatatagctcatgggattctctttggcacagagggcacaccctcgttagaatctcattccgatctctcgcctgacttttcccagccgtctcgatctcagcctggcactcctggttctttcactcaactatacgcgctcgaccagatggtttctacctctcagcaaccggccccgttggtatctcctaccccatcttcgttctcctaccaacctcactatcagttcagaccgtctcaaccgtacgaccctgccatgatggacaactattccttatctaccagcctggttctccaacctttatatccaacctctccacctgtcgaaacatacccagtacctcttccccctgcggccgacttcaagacccacaggcggatcatgtcaacagactctgactactcgactccatattcccaaacaccagtcctggatgagcccacctcgcctgcaaaacccgagttcgagcgagctcttcctgttgttggagagctagaagaaagagacgattacgcgctgaatgacttggtgaatcaagtccatttaatctcttactctggatcttcttcccggccttcttctccttttcgtgtacaaacacaacgacagcagccttcagcgtctctctttcatgacaactttgaatcttccgaccttcagtattccttcactttggatccgcctacagaacaaccactacatcatcaacagcagcatcaacaacactcacagcaacattccaaccaattgtcgtttcaattttctgaaccagtaatccctcttaatgcttacaactatgatgcacagcagtcttcgttggtggtaagaccacctacaagcgtgccctctggattgactttatctcactctctagatgatacccccaagtctaagagggcgctcaaaccaccgacaaggcgtcaatcgatgccagcctcttcacttcctccctcttcgcgaatcaagttaaagaaagagcctactatcacagctaatatcatccctaacgacccaggaaccccaaaaggaaacaaaacacctctctcctcgaaaggaagcttgcttgcaatgataggaaggaaactcaagcctggaccgaaaccaaaggttacaaagtcacctgcgaaatctcaccagcgagcccaatccctttctagcctatctataaccgggatcgtcccccctagcgatccctcccggccggttctcagatccaaactaggaggcaccccgacgtcttctcaaccacatctccaacctcggtcaacttctatcggattgtactcggctgaacattcacccgatcataggcctagttctcctagttcggtctttctccacaccgaccagtcgtcccctcagtctgtccgctccaacaagcggctaccgttgaccaaaggcaaaaaggccgcgtcggagaaaaacacgacagaggagagaccatcgttagagatcactcaggcgatcatcacctcactttacgagcccattcatccgtccgataggtccagggtcgtttcatcgatgagcccagaaccggaaggtccggacgacggggcggatagaaaggctaagatgagggggaaggaggagatgagataccggtgcttggttgccgagtgtgacagagtctttccaagggtgagtctaacggctttttagatcgatcgagagaccggcatggattgccctaaactgacgtgcatcgcgtgtttctttgactatttcagaaaagcgctatcatccaccatatccaaatgcatctggaggataaaccgttcgcttgcgaagctcctgggtggtcagttctcggtttcttctgtcttatcggattttgactgttggctgatctgagcgacttacctccaacaacacagccacgcttcattcgtacgtcaacacgaccttcgtcgacatgagcgaatccatagcgataccaaaccattctcttgtccttggtatgtctaaaaacatcctccttagtttcatcacaaccctcagagcaccaacttacccatgctttggtatcatttttctcaaatctttgattctttccagcgggaaaggattctctcgaggagatgccctggttcgtcatcgacaacgtgcaatttgtattggaggcaccccagataccgcgcctgtcagtttgaaacgtcggcgaggcgaatgacaacgtctggttgcccctcagctcacctattgacatatcctatctatctactcatctttgaatcctcaccattcgaacactttgttgtccgttcgtgcgttcatagacttctcgttcatcgtttagaccatcaattccatacgtcactcgtctttcttttcttctgatcgtcttatctctgtgtacgcttttgttcgttcatactcgacagtgttcaaacgcggcattctccatctcattctatttgggttctttcctttcagtcactgcttctgtttatacatctataatctaatttcgtcatg

SEQ ID NO: 2154 - DNA, 2249 bp, Xanthophyllomyces dendrorhous
gctgtaacgatctctctgtattcgattctctagcccctttgcctatctcttctgttatacttacactccgtcccgactttccgtcatcttggttactttgtgatatctcttttatcgctgtgttgatgttgttttgattcgtgttcagactgaatattgacatcgataatagcgtgtgtaaaaaaaaggagaaaaggatgaaacacattccggatgattttgtgatagcccataagaatggttatttatccgaggattccggcattctccacacggcttcgtagagctggaacgtagatccgatcaaaaaaccccaacttcctaccaaagtcaaggagatagaaaaaaaacccgggatgtatcagcactcagtggagagggtttgaccaagatcagaggggtgagggatgaggataacaaaagaagaaaaagaagaagaaatccctttcgggaaaggacgaaccccaataagtactcatatcggattgccaaactgccctgctatcaaccgaatatccgagcgctccgcaaagacagaaccctacagaaccaacgaggttccatacaccaacttgccaaccgatcgtcaatggcttgaggtgataccatcttggttgaacctcgatggtcaggatgagagaggagatgatgaaacctagacctcccaccacttgggctacgcgagaacagaaccggcaaagccaatcaatcacagagaaaataggtaagcgatacattcaattgaaacaatgtgtttagtgggaagaacagaaggaaggacttacgagaccagaagaagacgtcaatgatcgcacgcgaacccgtcccgtcggctaaaccggggatcacacctggcaaaccagtcagagttgatatccaaaagactgaggcggcgaacatctggacggcagctgctatatatcccatctctttccatcgaggcttcggcctttgaaaggagaaaggagatagggagggtcatgtcagtttcaccccaagagacagaacggatagaagagagtggacggaagaacaaggcgcttacatccaggagaactcggagggttcatggtttgcggacgacttaggaaaatcatcggtagaagatgagaccgaatgagcggatggtttgttcccccaaataagggactcaaaagaggatccaactaggaaagtttgaagaaaggacattgagatttaacaaggaagacgaaaggtagttggcgaggaggattcgttaactaggcgagtcaggcagaagaggaatatccccctccatcaagcatcacacgtaagacagaagaggacgaacaatcgttttctttgcctctattaccagcttccaacagtcctaagtaggcaccgaccagaaagatggttcctccgatgaaagccaaagcgctagctgtcggagccatagcttcggaatctgtcgagggtctgacgactggtaaccagacgcaaaacccgttggcgacccagacggctgatccccaccagaaagcaacagccacccagaagctgaatacgcttgaggtaagacgctagtccgtccgtgatgcatcaactaggggaaacttcaaagaggaaaacgtacgtgacatcgagcttcaaatggggtttgagcttatcccgctcgccgtggtgggctactctgatggatattgtcgaagttgggtgagattcaatcatgccggcatggtggtgggaccgtaagggaaaccgtcctggatgccgtcatgagtttcgtgatcgagctagtgagttctacggactcgaccagaaagaggcaaggaatcgaacgagaaaaagcaaaccttttctggcgtctcgactgttgtatttgatcttggttctcgaatccgagttgggatgttcgatttcccactccagatgggtaggattcagcctatttcctcttcgccgaggcctaacttcatgtccgctgggagttctagctggatgaagggtcggatggctgagcgtagagctggcagtagaggcagacggtttcttgaaaggcattctcgaaaggacacaaagagctagctcctcctttttctattctcagatatctgggctatatccaaggtcagtccagcaagatcaacggtgagctcgaacgatgtgcagcaggtgagtgtcaagagcgaacaagagcatggctaagagaagagaccatggtttcggcctgttggggttttccagcagcagcaggtaatttaagaataagtatgacgtgtgtgggg

SEQ ID NO: 2155 - DNA, 4282 bp, Xanthophyllomyces dendrorhous
gtgcatgtatgcacgtgagaatctcgccactaagacggcacgccgccgtagccaccgcccacacaaggttacagcatggttacgcccacaaagctcgtcccatcaaacgtcccagttcttttgctctctctttcttctacatcccatcccgtttctcgtccttcaacgatgtccgtccctcttcaacccacgactcctgcagccgagaaaatcgtcgtccctcaggtgtcctacctttctggagttaccgcgctcctttccgggttcgccgacccggttttcggacagtacggcaagctgcacaacttgcgaaatgatctgttcggaacggtctccaaccctggaaacgtcgagtctttgggcaaggatgtcaagagttagttttgtttttttacccttatttttctttcttgcagagcaaaagggacgtgcaacaatgtgtaaggtgagggaaggatggacagggccattggaatcatctggacatgtgttggcgtacgtggccgatcattgaaaaagagaggttacacggataaagctgaaaggataagagggtgatcggacttaccaggatagctcatcaacaaccaagcatcggaaggaatttatttctgttcgatattgctgtagaggagagaacagaaagaacgatgatgaaccatctcttgcgatcacgatcggattcatctgtcccatatcgctgatcttacattatatatcttttttccctttcttccacctcctcctttttctccatcatctagtgacccacttgaccaacttcacgttcgatggagtcaaggctgatctcagcaagagcgtctcgatggaccctgctttccaggttcagcactcgttctccttggccaaggcggccgagcctccgagctacaactttggtgctgtctttgctaagaaagatgtgcgttctccctactactttctcctctgtcccgtcttttctaaacctcgcgatagaaagagaacgaggcaaagaaagactgcctccgacatcagaggtttctcccaagccttcaaccaaggctcatgaaacttttcttttcttttctcttctctcgtacagctcttcttgcagggaagcatcgaccacgagttcaactcgtctgcccgaattaacaaaccctggaacgactggagtgttactaagatgcaggctcaggttggtgtttctctctctctatccaaacctctagctcttatcccaccttctcgtcctgattgtctctgctgtactctttgtttcctatactagctctctcccatccccggccactcgatggtccagctcgagcaggagttttctcttcccggtgagactttgaccctcaaggcgatcaacccgtcgttgaccgatggaaccggcatctacatcacctccctcctcggagctgtgactcctcgattgtccctcggatttgagaccatcctccagaagcccactcccgagatttcccagtctgttacctcgctcctcgccaagtggacgtcggtgttgacccccggaaacccaattcccacgccgatggcccctaccggcactcctgccttccatgagtggaccgctaccgtgcaggctcagatggccggtatcgtcagcgcgacctaccaccaccgactttccgacaaggtcgacgtcggtgccgatttgaacgtcgtcatggccggtggccgaagggaagctaccgctaccgttggtgcaaagtatgatttcaggatggctaccttccgagctcagttggactcgaccggaaagacttcgatgttgctcgagcagcgattcgcgcctacgttctccttcttggtttccggagagatcgatcacatgaaggttcgttccctctctctctctctctctcttatctttcgtcttctacaagcttcgtatcggctttcgcgcgtactcaatctctttctctcttgccttcgctcctctcgataggctggtgccgcgaagtgcggtttcggtgtcatgctcgagactacaactctcactcccgaggagttaggaatggtcccccaacctgctatgtaaacaaaccactccttccctactcctaccttaagcttatggaaaagaacgttaaactcgaagggaacgagaagcgattggaattgaatgggtgtgtgaccagttgggacgtaaatacgatcgttctttcttcttttctcctctgttttgcttctcttctcttctcttcctatttcttctctatccctttcgccctcttacaaaacccacaaagattcaaatgaagactgtatcataacctggtctagtccaggaagaaaaaaaaagccgagctgtcccatataactggaaactccttgatggataatcaaataggaatacctgtaacaaaacaggtctttctagcaaacaaagagagagagagagaaactgcggtaatattagaattggtcttgttcaaattcgacaacccagagtcaaaattgtgcacggaaggtatcaagagaaaatagaacaatatgaaattaaactaaacaagaccactgaaaggaacacaggatggatgtgtgctcttgaagacaatgtatagacaacaatagagatgaaaaagtcaatgagcaacgcttttaactaccctcgtcctcactctgaccccccccccctctttgatggatgaccaatgacagtcaagtcaattgatcagtgtcctatgaaccgttttgacgagcccttctcccttctttgcatacaccagcagataaggattcgcgttcgtcccactcgtatccgccaaaacttcgtccctgctgactttagtgaccgtctgatcgttgtacttaaaccattcctctggattttccggaagatttcgctgatacaggaagtctgtgaacatatgcgtgagcgcatgaatcaggccgcagttccatcacgtttcgagaggagaaagaaagagggtaaacttacaatggccaaacccggcttcaccttgagatgtaggtcgaaaaccacagaagcaccatagtcagtctttgtacacaatcatgtatgacaaatggtgggagccatggagaaggaaggaagaacagacctcgatgcatgaatacacttgtcaattcatactcttgattcttctcttccgcccacatcgcttctacatcttccttgagctcacggatcttttcttgactcgactggatcttctgctcgatgtcgacttttctcgcagccaaatcagctttgaggtcggcatcaacatgtgaggatgagagccagtcaggggaagtgaaaacgtcgtccaggagatgagagatgctctctttgtatgatgtctgctgctagaacgtaagaagccggtcgtgagacacttgaaatgacgggctttttgaacgtacgacgatagacacttacccgaggtggttgaatagcctgtaggccatcacgtaattgacggatctctgctgagagtgccttggaggcttccgtcatcggtggattggcaccttcgagataacgatcgaagaacagcgtctccggaaactcgacaaaagcgttactcttgtatgcccgagcagtctctcgatcaaattgtgctctctgtcgagccaaagaaagaagaagaagggttgagcgttttgtacgttgaaactgcgaggaaacaaaacatgtacggacttgaagttggatatgcagcattcgaggcaattctatcggaacctctaccaaggtggccgttttacccgccagatctgttgaatcaggagcgtagtagtctgtgagagcgtcgtgcaagttcttcgaagttccggtctcgcccacattcaaaagtatatgattgaacacaagttctttgtccctactaggatctgattcggcatccccctcgactacaagcttttgacgagactttccgtagaacaatctgcagaaactcaaacatatcaagatgaatcgtttaaatcgcacagagtaaagaagtgctcaacttactgcttgatgatatttgatcccaagtcgcttccacgttcgagtttctcgggattcaacgcagcctcaatctggaacaaacaattgtcgagacactcagaaacatcgtgttgttttccttttggaaaaaaatagaggaaaaaaaagggcagttgcaaaaccgacgatcttcagtttaatcaacctcaaggtaacatgaaccgagacgcgctcgagcaaatctgcttaccaaacatcatagcaccatttcctacatctttgggcactaccatcttgttcctaggtggtagaggaggtggattggaa

SEQ ID NO: 2156 - DNA, 11353 bp, Xanthophyllomyces dendrorhous
ggattggaaagagctgaagttttttgcaacccatctctagtcttctggctttccacaggagcataaggatgtacttcagcctcaggttcgacagtcatctcccgatcagctctcaacaacactgtcgatcttctccggggcgtctttcggggtgcggcgtcatttaaaagagaggaatgaatcggtaggggtgatggaggatcagttgagacttcggttgatacatccgaaggcccatcagacatcgcagcatcttccgataaaggaggttgcgtcgaaaacatcgatcggtcatccacatccattttactaggttcctctcggtcttcgctggatcgtttgcccagtacagacgaggtcgacgacatccgactaggaggctgaggagccgataaaattacctgactggtcgttactgaagcagagccatcctctaccaacgtctgctcggtatctgaagacccgtctcggatagctgtagaatgaaggggcgggctctcatcttcctcatctttagaggtgaccaatgcaagatacgccagttctaattctggagcgattgaagcaacttcactgagttccaagttcaaaaacaggccagacaacgcttcggtgactagataggcacggtgatgacatgtttagcacctacaatttgctaaagggatacgacaaagaacttacaacggatggatcgttcgacctctttgaatgtcactgcccttcctcctacacgcttttcgttgagtttctcgacgactcgaaggtcttcctgatagagctgaaagttggtaactgtgtctcgaagctgagcaattgtgtaaagatactagatgaacaaaaggaggcaatcaatgcatcagcttatgtctgttcactcaagcatttgcatatggatattgtacctgaagtagtgagttgagataacctatcatgaccagaaccaaccgacgaatgaaaagatgtcaacaatcaaacctcaagaggggacaagctgatcaaaacacgtacaagtgtttccaacattgatcaagccgactggccgactactagacacaggctggatctctggcccagactcgactatttggaaggaaagaaagcaaatgaacaatcccatgtcatgtcgaaatagaagtgttcacaatgcgtcaactaacctcgtatgcctgtatcaacgtattttcttaacgttgcacttcctcgagcatcagcaattgcccgtaaagcttctttgaaatcatcctcttgcccaggcgcatcaataacctgcgattggagaataaagaccgacatcagaacgtggtcaataccatatcatgtaattacgccagtcaacagcacaacactgaacgtactcggatatcatacagcctgcacagagacaaccatcgagctcgaatcagcgaacgaaccaagtttcgattcaaacaaactctgcaggcaacagaagtgacactcacgacgtcaatagctcctcatcgatcgattcttccgccccgaacatcgcgtacgctgcttttgaatccatcggctctttctttgcctgcaaaatcgcgtctatcaataccctctgagtctctgtttgatgctttctgctctccgcgatgatctccatggattccatgatctgagtcctagctctcgttagatcgtctcctccagaaggatattgatccttgacgctcttgagtgcctcgaagaatttatcagtgatataggacggcggaaattccgcttgatccacacaaatcatatcggcatcttgcatggtaagaccgggaatggattcgtaagcggcgttgatttcactttgggtattgtgtcccttggagcgctcggtcacctggagtagttgtaggtcgtccctcccagtacccataaatccatcgacgacacaaccaagagcctccaaatagaggggcctgtagatacgtatacataccacataaagttattggaacttccttttctgcaagaatgattgaacaacgtcaaagagatgtctagacttacgtgcgaatagagtcgtaacgtgtctgagctgtgtaagcgaacaccagatacgccgatggaagagcaaactcagtgttgacacccagcgttgtaagagcgtccttatactcctgcgcgtagggtttgacgattcgatttcttgggactgtatatcacataagcgtttagatacaaatttggttatctgcaaagggacacctagatgaaggcaggaaccactcactgttggacttgagtgcaccaatattagcagcaaatgttccatctaatgggttcctgagcccaacctgcccagaatgtttcaagttcgaattcatcgaatgtagatctggaacatagatgggtcaggatgatcgggacaagaatcagataattgatgaagagaacaggtagaaaaatcagttgatggccaacagacgcatggagtagacgataactcagcaaacatattaaataagaaaatagatacttctaaacaaccgataatgttcgagataagcgttgatttcgacccaggccctcatcatcttttgtctgacattcaaccacttctctagatccattggaggggagattaatacggaagaatcatcggtgccttcagggtctttggtgatcatgaatccaagctgtttacaaatgtcttgactgatgctcgtgaaaatgaagccgaaactgtcagtcaagaggatcgctctcacaatacataggatgaatgcaatcactgaccttttttgatcccaaccgactttgcggctgaaatttgggttcatcgatctgaccgctcgaaggttgtttccaaacacggcattggagatcatcctttgggcaatccagacacatgtgggagatgacgggtttgaaagttgaataaggagacgagtaagaaaaagacagttaagggaagtgggatgaaaatacacctacgtaagaagaaccgtccaggctgcatctgctccgttagtgccaggtagcggatcaacgtttctcgagatcgtaaaatcatgaaccagcttgtaatctaacacaccgggcagcgatgtcttgggtacaacgacccagctagcatcatttgctgacacatacagatctcctagagtttccgccgatgtcatccctacatcatcctcggtgatttgaaggaattgattggatttctcttcggaaggcgagtctgcccccaagggcacctgttcctcattcaaaaccatatctacatcatctattctttctaatggaatctgctgcgaagcttccatcaagctgaccatcgatcttgaaggagctagacgatcgctaacttctgcctgaacaactccagacacgcaatgatagtgcctagccaaatctaaaccggtgtcccatccattagactctagcattcgttctgggattgagccagcacgagcattttctagaatctggagtagttttgtcacttggcccgctcctttcgaagtcaacaaatcaaacggaggaattccctctccggatggaaagagccaccattcgaacgtgtctgtatcgaacacagctgttccagcgcccggagggaaccaagggattgatcgacgaacttcgtctattgacggtggggtaacgtttgaggccaaggaaaccgaaggagagggggatacaggccggggtggtctggattcatctatctcaggcgcaggcgtggcagatgtagatgatcgagaaggctgagattcggtcgtaggttgagacggggacaaaggtgtagctcccatgcgctttacaggagaggacgagggtagcagagtcggttctggcagtttcaggatatcaatctcccagccggtactcttacaaggccagaccggggtttcaaggagaactgaggggagcacaccgggtcctatttgaggataatcggcagatatttcccattgatcgttctgattcatgggatctgtctcggctggtgtccaggaatccacagcagttatctctttgacggaagtattcacctcgggcgggggagttaaggacaggacaggttctggagagctagatgtatgaagaaaaggaagcaagaacagtagacgtcacatttcagtcaccgaggagtcgaacgcttggtcgagttatttgataggtcttcaagacgaaccggtattttgaggttgtatcccatcccgaatttgccatatctgatgtttggacagaagttgaccatgaaggctcataactaggtggttcctcctcaggttgtccgctcaaccttttgctgacgctcataacctctatgtgctgagcgccatctgtgtttccttcatctgtccatgttggagacaaggggggtgtacgaatgggattcgacagaccgtctgccgacaagcttgacgtagccggtaggaacgatgagacatcagtctgtggacgagtttgtggaaggtatgaggaatgagatgggtttgtttgagaagaggatatctgccgagagggaagaggtatggactgttgttgctgctgctgctgctgctgtcgacgatgatacagcgagtgctgggaagaggtctgagcctcaggagcgagggttgagcttgacgattgggagatgctgggattcgctactccatcggtcactgggctcttgtgtaggaccatctcctaaaagacttgaacacgtctctgtacgactaacattcatcgaaagaaaccacacgtccgtgaaaactgaaataggtatgtttggatagattgatctgatggagactgacccttggaagatgcaaacgaactaatgataaacggagctgcacgtacgacacctctctatctaaccgagcagatcgagcggaaacgaccctgaatgaggaaaaagaagtcgaagacttcttgaagacagactgtaaagtattttccaatagaccctgtcgtatgtgcgtgagagaaagattgaatgaggttatatacgaatatgtcgaggtcgaggtcgaggtcaaggtttggatgaagtctcggttgtgtcttcatctatgtatccatgagatgaccaggggttgacctcatatgattacacgcttagtcatcaagccaacatcgtttcgcctagtgaactgcgactctcatcccgagagatccttacgtaattcataaccatcaatttggaaccgtaaccagcatccgtgccatggcctcgcctgccacccaatttttctcgttgttctttcttccttcttttcttctttctttttttgctcatcgttcataaagcaatcgtttagaacaatgtccgacgtaaggatgctctctctttcttgctcgtgggggtgtcgatgctgcccttgtgtttgctcttgacttatctgtctggttccttgcttgttgctttaatctcctcggttttggttttgctttatgtgtctggtttcttgccctttttttttttttcttgtatctttcttctcgtttctctccgcttccatcgccacctcgacctcattctttgctggtcaccggctgaaatctttggtagtccactattccttccttcaagttggtcctcgtcggtgacggaggaaccggaaagaccactttcgtcaagcgacatttgaccggaggtacgtgcgatgtactttggaccacgccaatagtcagatctagagagtggtttacgtatgtaaataatcgagctgatgaaccctttcgttcctgttcactctgccattcttctgtgcccgttcatcactcttagagttcgagaagaaggttggttcgtttcaatttcaggttgatcaatcagctatttgctaacatgtatccacgaaaaatgtaaataccgaacaaagtacattggtaagtcccttttttagtttggtctcgccttcctacagctatctagtcatcttacaatatcttcgccttcttcgatccatctctttcagccacccttggtgtcgaagttcatcctcttcagttctccaccaactttggtaccatctgcttcaacgtctgggataccgctggacaggagaagtttggtggtctccgagatggatactacattcagggacagtgtggtattcttatgttcgatgtgacctcgcgtatcacctacaagaacgttgccaactggcaccgagatcttgagcgagtctgtgagaacatccctatggtgctttgcggaaacaaggtcgatgtcaaggtacgtggagtttcttgtgatgattagtcgagagtcgaggtgcttgttagctcgcctacacattgtgggtgtatgctatttggattgtattctgatatgccccttgccggtgttttcctcccatctttttcgacaaatgagtaggagcgaaaggtcaagaccggcgccgtcactttccaccgaaagaagaaccttcagtacttcgagatctctgccaagtctaactacaacttcgagaagcccttcctctggttggctcgaaagctcgtcgggtacgtgcctgtttgaggatcagtgtctctgtccgtattcttcacgatcactaatttcaaccccttttcatgatcttctagaaaccctgctcttgagttcgtcgccgcccctgctttggctcctcctgaggttgttctttccgagcaggaccgagctcagctcgatgccgacgctcaggccgccatcaacgccccccttcccgacgaggtaagtcaaccgcgctcatttgcgtctatatgtttattttggaacatgctgacgataatttgtccaaccgatcacttttctcggacggattacaggacgacggagatctctaaaagaacaaaatcatcagattatctctacatgctttagcttccttcgactctcctgtccttaactttccacctctttttgcttcctcctctttccctccatcacgggctctttttttttcttctgccgccccatcctttgcgctctataaatcaatatgaatgaacgccccagaaagtctgcttgatatctgtctgcctgaaatagagagcaaatgccggctttaatggccgaccgtaaggagtacgcaatcctacgaggatcaatgtttgtgcaagattgcccggaacttaaaaccaagacggccaccattagaaagattcggggaataccgggaaagaggccgtttcttggtcttctataaatattggtaaactcattgcatcatatgtgttctgtaccggcatcgttcatgctcttcccatcacctccgagatcattgtcacaatctgcctcgttcatttatgtgcgtcgacgtgttccgttcttataaaatgaacctatcgtcgctactctttttcaactcatctctctcccacctattcacaaaaaagccataacattttctagaatgagcaaattccttcggtctaccacaactatcaagcatgccttgcctacgattcaaccaaagccaacaacgaccaccttcgtgtttcgttcgcttggaacatcgtcctccaaatcctcggccgctggttccgaaaatcctatcaatttccgtgcgagtgtcgtgggatcagctctaatcggtctcggagctggtattctcatcagttccctcgatctgttctcttcctctcagactgcatctactattatcgacgcctcacgttcaacttccggcgaacaacagacttatccacctccatttggatcgaaagaagattattcgaatggaatccgcgatctcagggattacttcaaatcgttgggaagggaagatgacgtttcgaccgacaaaggtgatttggagacacatggtatcagtaagtcctgttcgtcaacgactttcgagaagattggtcactaatttcaaactctttcctccttaatacaaaggcgaatggtcgtttcataaggaacacagaccgtctgtcgttgtttggcctttgacgtacgtcgaactcagatggtctgtaagagacatcagtttatcaaacgagaggtactaaccgatattccggggtcttggtcgtctacccggaattctatttatctttagaacggaagaagttcagaaggtcgtacagatcgccaaccagtataatatgtgagtcgtttgcttctattcctctcatatcagggaagaattaaacattgactaatgaggtccgttcatctggtcactgacaggcctgtcacaccctactctggaggtacctccctcgaaggacactttagcgcggtacgcaacatcaaccagcctctcttgtctacgtcacgatattctgatattacatacatgtgtttcgtcatatggttggaaatctttgggtcgcggttcttcgaaccaagcctcacggaggaatttctatagatctcaatcgaatggataagatcatcgaaattcacggtgagttcgagcgtcactcgttcattcatcttggtctcttttcatctatttgtccgattcaagaaattgcatttgcattatgtacatcaacttaaaccgggacattctctcttttagaggccgatggagatatggttgttcagccaggaatcggatgggagaccatcaattcagagttgaagagtcgtgacatcaaactattctttcctgtgagtacagtgtgatatagttctcttcgttttttaggtgcgctgacatatgctcgctcgctatccttcatgctactgtcgtacaatccctttagctcgatccaggacctggcgcaacaatcggaggaatggcagcctgtggatgttcgggaacaaacgccgttcggtatggaacagctaaagcagaatggttcctcaatttcacagtcgttctgccttctggcgaggtcatcaagactcgtcagcgagcgcgaaaatcctcggctggctgggatttgaccaagatgtaagacattttattaacactttgatatgactttgtcaaaaaagctcatagatacgtcgacacgatttgcgctcatcttggataggttcatcggagctgaaggcaccttggggattgtcaccgaaggtaagatttttatctttcgtttccgttctgtctgtgtcagtttgataatgatgatccaatttctctctttctttgccatttccacatcagccacgattaggctcacacctcttttgcctactcggtgcgctgttgttaacttccctaacgttaggaatgcagtagctgctgcaacagaagtgtatgtcacttctttctgcatctcgctatctatattcaaccttgatgccccacctttatctctctactgatagaaaaaaacatctgggtttaattaaatatggaattctcaagtgtgggacatggtcaccccgtccaatgcgtggaatttttagacgatcagatgatgaaggctatcaatcagcagtcaggatcaaagtaccctgagcgggactccctcttcttcagttcgtgtcctctatcatttgtttttcttgattgtttccgaagatgagaatactaatgctgttctataccccctgtcatcttcaatcagaattccaaggctcagacgcgtcaatgaaagaagtcgcacagagtgtaagcgcggtcgtaaaggaacatggtggtcgggactttcaattctccaaggatgctgccgaagccgaaagtttgtggcagagtcgaaaagctgcgctgtggagtgcgatgggcatgtatcccgattgcaaggcttggttggtccaagttttcttcctttcacttttcttttatcaacgcataccctgccgcccctacttgggattggagtttgatggatatccaagctggaaattaatttatctgatttgacgctggggatcgcaaggacaaccgacgtttgtgtacccatctcgcgcttgcccaaactggtagaagagaccaaggcagatatcatcaaccgagggctttctgcgtgccatatggggtaagtatttctcatctttctctcccaaatcaaatttacgagtacttttattctaaagaagtttgctgattgtatattgcgcttcaatgactttccatttttgtgtgtagccatgtcgggtacgtttccgttcaagtctcgccaatctggttcctcactctttgattctacagcaaccatatcaagcagtatttgacttttttcttcttttgacgttttctttttgcttctattttcgacagtgatggaaatgttcacagtgtgatcttatttaaaggtgatgaggaactcgcaaaagtcaaggaggcagttcatgagatggttcatcgcgctcaacggctagacggaacagccactggggaacatggtttgtcgtcgagctttcatctatttcccctgctctcatattgatgtaattctgactggtgtctctaaacccatttttattactttttttcctcgcccaggcgttggtttgggcaaaattgaggtgtgtttcctcttgtcgttttcttcttttgacatttttcaatcatctaccaagaagcagaacaaacattgattcaggaaactgctgtttcgtttgatcgttcgccttcaatagtacctcgaagcagaactaggcccaggtacagtccgaacgatggagggaatcaagaagcaccgttcgtcattttttgttgtctcattctatcttcgtccctttcctttcaagagccaagttctcctaagctctgatcccaactgacctgtatgtttttggtgacatttctggtgttggttcatacagtggatccaaagggattgttcaatcctggaaagttgtatcctaacctgggagcaaaaccagatttttagattctgaattgatttggtgattcatgtcttttgtactttctagtttatgactacacatcaagaagagcaaaggtataacaatagggcatagaaagcatgtacaacaatgaaaggtccacttcaacatcgagataagctggagctctaattaaaattgacaacggaagtgagacatgtaaaagttttaggcatatggcacaacatattcataaagactgatcgatacaaaagattcatacatgacaaacagaatttcagaaggaggaaagcaagcacaagtggttgagagacattaaatgtaaatacgggaaagcgtgagctacaaaaaatcgcatcaatgtcctgcgcctttctcaaagactgtgatcgactcaacctcatcgctgaaacataagagagcgagagattatcgaaaaatcagctcatgtggcgcgcagaacgaattaacaaaggagaaagacagggaaaaaactgacaaatggtagagaggctcgagtttggccttcttgtcacataaaaggtatcgtctgaagaaataagggagggacttcttcatttggtagttcgcatgggtcgcggtcgggacggcaaatacatagtcgagttcttccaa

SEQ ID NO: 2157 - DNA, 832 bp, Xanthophyllomyces dendrorhous
  misc_feature (313)..(322): n is a, c, g, or t
atacagaatgcaacgatgttgagtccagcgtagaagccgaaagcaccgacagagccaaacacggtcaagagccgagggaaggtgattgatagcacggccgcccaacccaagcaggtcgaaacagcccaagccatacccaactctcgatgtgtgagcgggaagacctctgccgaataggtgaacggaacaggaccctctccaggagagtagaatgcagcaaacaagaatacgaagaacgcgatgagaccaaggtgtgctttcgaagtttcaggaatgtagaagcagaacccggcggccagaagagtccaggccnnnnnnnnnncaagcaggtcgaaacagcccaagccatacccaactctcgatgtgtgagcgggaagacctctgccgaataggtgaacggaacaggaccctctccaggagagtagaatgcagcaaacaagaatacgaagaacgcgatgagaccaaggtgtgctttcgaagtttcaggaatgtagaagcagaacccggcggccagaagagtccaggccatattggggaaagtgagcagaagcaaagctcgtctgccaaaggtgtcgatcgtgaagatagcggggaaggcaaagacaaagttgacggcaccgaaaccgatagaagcgaagagcgcctgcttgtcagagtacccggcgttggcaaagatagtggatgagtagaaagcaatgatgttgataccgcacatttgctgagcaagcataacgacgaatgaggccagagtggctcgtctgatccgggggacggtgaagagctcggtaagtcggttgaagtaggtccttccattgatgatatcgtgctcttc

SEQ ID NO: 2158 - DNA, 23717 bp, Xanthophyllomyces dendrorhous
  misc_feature (23269)..(23278): n is a, c, g, or t
catgtacagcgccatcggctgagaccatttgtctgaaaaggcagtgacgaagagatgtatcagcttattcaatttacgaagagaccgaagaaagagaagaatatgaaagaaaagctctgaactcacgggtgatctctcgtctgaggtgatacctgtcctcttcggtcaaatccgattgtgtttcccaatctttggggttctgcgccaagacagctgccttctgaaacaattcttcgtcctgagaggggcgaatatatggttcgtcatattgctcttggcttttcataatgactaaatggataattcggactaaccggcatattgtgctgcgagactagtttcttgactttgtgcctcagctcctcgcgtgataatccatagagcggattttggattctatcggaacaagaaaggaacgcagctcggtcaattgcgtccgttgtgtatagcgaaggccatctgcgcgctcacctagcattcactgataaaatcgagagtgaagagcaggattgggaagaacgttctagttaaacctgacctagtttgtgcaagtcagatggagtttcaactgaggaaggaaaacataccgttatgggcgagatcgacatgcctagccggccgttgagtctcgatgtgcgccacctcggacaaatcgcctgtcatcgcctttggttcgtcaaacttgtcttcgagagtcataatgaggagagaaagaggaagtgataaggtatgggggagtgaaagaacgaaaggaaaagtagaacgactatcgaaacttgagcttaagtattggtcgggtcgtcttgtcagaactatcctgtttgatatgcacccggtcagattgaccggtaggatggcaacagaacctctttctttcttgcttctctctttgcagtatacccgtgtcagaacagcttgagagaaagatagaacgatagaaagagaagaacaatgccaagcatcttatcgatcgaggagaacgcttccgatctaaaagcgacattgtcaaggactgctttatatcaggggaggtagaagcgacagattgaagccgcgagaagaaagcgaggagcatagaattgatatgaaaagcaagatggttacgaaaacagcgatttcacagtcagttgactcggtcgacagcaatagaacggcttgaaaaaacaggggacactagaagttgatgcttgatgagttgttgtcgtttccgctaagaagactatcgaccgaccatgtttttaaacatgacgtatctgttccctacttccgaggacacccgcagggatttttgatcctttcctcggacctatctgccttgtcttctttttcatagtccttgcttatacatgcttggcagagagacaacatgtggccttctccggagtttctcatcattcccctctttcacgattcatattggtcgaaccctcgttcatggttctcttgtgctgggagcatcagtggcaagagagctcaagctgtggatctgatcagatccaatggaaaaccactgaactcggaccgtctggtcttcattgtcatacttgaaggaccgaaatctatctgacctacaacaggactattagccagtcggttaggtttaactggagacaagcgtgctgtagaagacgaagcgttcgctcaacggcgtaaatgcgccaagcggttcagaagaagagatagagcgaagtatgaaatggccagaatctgtctcggatcgcattctcttcgacatgaagacttctattaacacagtccgatctcgcgttgaacaacctctctagagatgtctctctctaaaagatcatatagaacacaccccgacgatagcaagacggcctcgaccaaaagaacagacggtgcctgattagataataccgggtgatgtgacgctcgcggtgattcaaataatacacatgtgcctgaacgagccatctccgttcgatcaatcttccactctatcaatcttctgacttttccccacatgttgccagctcgacaacttgtatcccatcttagtctttcccatcgactgtcttctgtttgtccgatctctccctttagactcttactcgcaactcgaacgatggcttcttctacttccatccccactttcgatcctacagctactccctatccgaaggcacgaagggatgaagaccatgtcgacatctatcagagtgctaagcgaggcaaagttgagatcgaagatcgttcgtaattcgctctcctccatgttttctttcatctcctccgttcttcagctctctatatgctagctagttaacgatcggttcctttcttatgtgtgcaacctcatcgtcttcgctctccctgtcctctttcttataaccaatccgccctgacagcctatcactggctcgaggtccctccatccgagtccgccgagactaaagcctgggtcgacgctcaggtcgagttctgtgaacagaccatggctcagaacccagaccgacaggctttcaaagaagcgcttaccaaaaattggaactaccccaaattctccgctccagctcttatggatgacggaagatattatatgtcctacaacactgggtccgttcacctctcactcacacttactcgatggttgatgtgtacctgatctttagtgtccacagtcttcaaaaccagtatcctttctatcgattcaacaaaagcgagctacctaactatggttcctccgaaggcccgtttggagaattgttcttcgatgtgagtatgatctttcgattaagacctgaaccgaaaagctgatactcatgatatctcgtgcgcaatcatcccagcccaacctgctctcagaagacggtacaatttctctcgcagccagctctttctccaagtctggtaaattctgggcctacggactctccaaatctggatctgactggtacaccgcttatgtccgatcgaccgagggctctttcgagggcgtggacgatgccagaaagctcggcgacaaggttgaatttgtcaagcacagctcactgtttgttcccgatctctgactctcttccggctcgattagtatttctcgactgatagattcatgtatacatgcacctccgtttcatcaatacagcacgtggacgcacgacgacaaaggcttcttctaccaacggttcccccaagaagtttccgacgacaaccttggcacggccactgcgtcagatcaaaacgctatgatctactatcaccgtttcgtacctttgtttagttctgaatcgtcagctactctcgatagtctgctcatctatgctgtccgttgtttacgaacttcaacgatcggatgacaataggaattggaaccgatcaatcgacagacatcttggtctactctcgcccagatgagccgacctacatctttgggttacaagtgtaaggaactctcttccttcatccaaactgatgtcgcttctcagctcctcatcttccttgttctacttgttcacttgtggcaaacacactcatgccctagcacgacggatggaaagtacgcaattctgagcacggcaagggatacatcaaccagtgcgcttatgcacgtcgctgagcttggcgatggaggcttaaacggcgaggcctataagaacctcaactggagggaaatcgttggagaatgggggtcgatttactcttggtcagctcttctctcacttcaaatataagacttttattctgcgccgctactaccactgattctttcatttatcacttctcgtccgcctatgtttgctctaattgttccctcatatcagttttgccaacgatggtcccaaattttacttctctactaacaaggacgccaaaaactacaagattcagacgtgtgacatctcaaacgacaagctcgtgttcgaggacctgatcaaagaagatgataaggccgtgttgagcagtatatccgcggtaaacgagaattcactggtgctcgtttactctcgagatgtaagtctcaacctcgcgcttgagacggaactaaaatcactttcctgtcaatgcgctctctaagagtgtgaggtaccaaaacataccacttacgcgcgattgatttttcaaccaaccaaccaggtcaaggatgaactttatttgtacgatcttaagggaaataaaatcaagagactgcttcctgacttcgtaggtagtgtgtcgggtgtgagatgcaagcgacagcatgacaagtttttcctctccatctgtaagcgcctcctcttctatgaaaggtgcatcggaagagcaggacaacatctcatgtggaggttttttcctccctatatcttacagccagttacacaaaccctggtgcggtgtatgtgttcgattactcaacaaagggcgagaccgaatccaaggatgttgaacttttgaaggagacaaagatggaattaaagagcaacgatttcatctctgttcaggtgagtaatttctcgatattcagtaacattgcccctcaagctcatcgtgtgtgggtctcgcttgaaactaggaattctacgagagcaaagatgggaccaagattcccgtacgtcatatctttttcatcgacaactctgggaatattcctgctaactatgacatccgtcatgatttgcacacgcgaataggtgacaatcactcgacacaaggacgtcaagcttaatggatccgccccactgatgctctacggatatgggtaggatctgatctctaaaactggacatacatctagagaagtattgacagacctgatcttgtcgttcttttctcttcctatctaacaccagtggttttaatatcagcctcgaccctcgatttagcgtcacctggatgacatgggtgcacaagtaccgaggtgtcttagcagttcctaacatcagaggtggaggagagtatggtgacggctggcatacggatggtgtgctcgacaagaaacaaaactcgtatgacgattttttagcagcagctgagtacctcgtcaaagaagggtatacctcggaaggaaagataatcatgaacggaggatcaaatggaggactcctagtcgctgcttgtaccaatcaggcgagagacggactaattggagcgagtgtggcggacgtgggtgtgttggatctgttgaaattccacaagtggacgatgtatgttcagagattatacttcacctctgttctttcgtctgatgtgttgactgaacagttttcgatcgatcgtgttctattgatgttatccggcgtagcggtcgactatggacatcggactatggaaatccagataagccagaagactttgactttattctacctatctccccagtccacaatatcgatccgaaaaaggttcttcctccgtacttgatcaccactgccgatcgtaagactttcctctctttggatgaagataaacccgttcatcagatcgattctgatgatacacttggtgtgatatgcatatagatgacgacagagttgtgcctgctcattcatttaagatggcagcgacactacagcacaccctggcagagaacccaaacccgttggtgatcaggatcgatgtcaaggcaggtcacggaggtggaaagccaacggcaaagatcattgatgaggcttgtttgtcccctctcttttgctcgtttcttattcttttggctctttaagtttgcttagggtaattttctgatgcaacctgcgtggtgtatgattttcttgtgctctgttcttgattgaacccgtaggtgacaagttcggatgggcttcgtatcagctcggtctcaaattgcacgagtgaagaaaaagacagatgaggtgttcttggttcgccttctctttggtcggttggttaatcatgaagatacgatgaaaggctcgatcgaacgagcgcagatggccaacaggccggaaaactaagagggggctaagagaagcagtggctcgaaaagagttagatgtatgtaggaatcatcaagaaaatcaacagcatccttaaaggtggaaatagatataatgaaccgtatccaaggtgaactgtaaagactcgagacaaaacaagtagtagaaaatattgaaggggaagatcgattgatcaataactacgatctacattgtctctctttcttcccttgggggatcattgatcccacctggtgttcctctggcacccgccaacccgactctcgtatatctagccacaccaggcaaaaaggttctgaaaccggcagaaccaggtaccacaccgggaatgggtcggccagaaggaggtggatcgaggttagtaaatcgggaagtgtcgggatgatccggaagggtagggtgggatggggtcggtgctaatttcatacgctggttcgaggctggtttgggttcgggagaaggtgttgataggtcaacgataagcgcgccggctatatataaattaattgtcaagaagaaacgtatggaaattgagagtcagcaagacagcccgacttcaaaaagaccgaaaggcaaggaagccccaagagaaaggaagagagaagaatacgaactatgccatccagaagcggtgatgccaaaaacaaatttgccggttccgagtccagttccgatcccatctggacctgccgttttgggctctccaaactgaacgaccgtgggtgtatcgactcgttggactgagatcggtcccaagcctagtgatccagagtttgcttggccaaacgttgatagttcacctttagctgtcaatacggcgacatgataatctcctgatcaaggtcagaagggcaaattagaaagacatagttgtttgacttccccgaaaaggttgaaactaagagaaagctagaagaaggagagacttgccgagggcaactttgatgacgccccttccctgcaattctttcagcacactcggtatgactcctccagacgattgggacagaagctgactcttcgttcccttgtaaacgatcgaggtcgagtagtcgctgtcggctgtaccagggtaatagacgaagaatgtctcaaaatgggcagaaacgtgggtcattcgagtgatgttgtaaggttggtattcgtagtcatatggctctaacgttgggcgaggcgcttggggatactggaactttgggtgctaaaagaccaccaacgacatagcgaacgaacgttgtctgagatcagtttgaccgtgaatgtatgggttagtcaagagagcaacttacatgttcccatatctgtcttcgattgcctgtactcaactttccgatgtcatccactttacttcccagccatgccgtccaaacctcacctttctccgttaatgccaccagaaaactatcaccacatgcgatttgaacgattttgttctcttctatctctggaagcatgaacatgggtgcagacgaaactgtaatccccagagggatctgagcggccgatgaatctgaaagaggagagggaggtggtgggtttggagcttcataatctggccaccaaacgcgaacacgtccgcttgaagaaagagaggcgctgttcgtccagcctgcttcgacttgtacgatacaacttcggtttcgagcgtataatcagttaatccgatcgatgatcgcatgaacaatattgaatgcagaacaggtgacaagacctactcgtttgatgacgactctgaatcgaacttgagagctttgccccaggcagtcaactcccagatactaaacgcaacattcgaatcagaatttgaatcaactctggtagaagagactatacgcgtgagttgattccatgctcacatgttatctgcgtccagtatcaagacgtgctttctaccacaactgatgctcaagactttactcggcacgaggatctggagtgcaccacccattcgattgacatgagtatctgcgctcgagactttgctggtcgagaaagtgtcaaatcggaataaacatacctgatgaggctgggtacagactgttgctggatccatccaattcagcctcgaagcagtatacgattcaccgtccagtgtgcctacgaagaaagtagatggcaaaccccaaaagtcacaacccagtctgagcaccgagccaagaagcatagttcgtatagagttggaacgacgaaaaatctgcttaccccagcaccatatccgaccttgactatcgagtccacaaaacccgtaaccactcgcttgaaggtctaccattccaactccttcgttcagaggaagaagtaccggtcgattgatcccatcaatccgagcagtaaagtccgccagggcgggatgagacctaggaagtcctaaccgtccattagaaagtgatctgtagatatggccgaagaatgcaatcattgttcttgagcaccattgtcgatctctctttgaggagggaggcaaaaaaaaacataaaaatccttacccccagacataaacagactattcgatcagatcacagaagcacgaccccgaggagacgataagcaaagaaaagagcagaatcagcatttgtttctgcttgaaagatattgtagtattaacacaactccaaaagatacagaccggtcttctcaatttcaaatacaagtctttccaaccatcttctctcgcggtgactgtaagtggcagattaaagtcctctctaatctttcgtttccagaatgtctgactatagttgattgggcattgacaacaaataatcctgtgatgagtctgcgaactggatacggaacgagagaataatacagaaagaccgactcttgaactacttgtttgatgtgtttgttcactcgggacaacgagagtagatctgtgagaggtagtatcgggagaatattatcgaggaaaagttcatccctgatcggaagttgattgatccctataggtcagcaaacatggtcttgggcaagaacgagattaaacatgactacatatttacggaaggttgtccaggcttgacatgatgtgttggctgatggtggcgatgggtgatgacggtgatgatgtagaacggtagttgttctgaatttctcgctcatctccgatctacggactcgccacgtttgtaggtgattgttcatgtgcatcatgtaactggtacaagtgaactaatgaaccaacatgatattcaaaaagttctagagcgtacaattcgttgaaacgacaatgcaagatagtaagaaagaaagagcagagcggcaaaggtgataacctgagaaaacgacaactcctctcggctatctagcaaacattaggctccatcatcgatggccaacaaacctcagcttcttctcctttcgcaccaacccctgattgtagaattccacttccggtgctgaccgacattcccatactcaatccatgaggttccatatatctatcattcgaaagactgaatgataccaggccggtcgatggagtgactgtgtcgaaagacatgattttgacttctggaacatcccgagatatcgctaccggcgtcaccctggagcttcctgattcaaatgaggaatctgtttcatgcgcggagcttggagatgctacagatgagctagataagctggatgtgtcgattgtgttgattgagggagttcgcgatctaccggtgaggcgagtgatgagcccccctaacggagaccgaactttccgaatcagactcagagagagtgtcaaagtcggagagtaaggtgtctctgaggctgtgggcacagtgggactacatgcgagctgtatccgaacaaacgagaagaagacgagggttatatattgaggaagaagttcatgcttcataggtatagcaagaccagaattgtcggaagaaaggttcaaaagtactaacggggaagatttctagatttggattatggttcttcaagcgcgctaatggctgttgtttgttcatggcgagtacatgcatcatgagcaatcagcaacggccttgcgaactgttgccctgaagagaaagaagaataactggaataacgtacatgaaatgattccgccatgttttcaacgtcggtttggcaacacaaatttggctttgtctctactaccggtttaacacccttccagccgcttgttgagacgttcacatggtcactcgatatgtcaaatagctttctacgtcgacgtatgctttgtgcacaataaagataccatgcagatatggccagtagaactagaatcggtaagaggattcctagtagaagggcgagctggtgtcgttcaggagcgtcaactaggtggctggaggttgtgtttgcataggtggccacctcgatagattccatcatgcgattcgatttggatgataagagggctggtttcaacaaattcctttattatatcacctaatgagcctgataactgaagtcgtaaacatttggaactcatctgtggttagtttacgtatgacaagttcgaatttttgtcctttgagatgtcgccaacttgatgatgaagctgacggtactaacacaacggttgcggaggaggtagattgatctgtcgagtaggttctatccaaagaagagagatgagaaaaggtattgcaaaatctcacgaccgcatgtctatcaatccagctatataaagatgttaacaaagctgatgcatgcacgaacagaattcatgtcgagccttgtcaaggtgcatactaaccatgtaatcgttcgctgagccgacgtacgaggctggtaaggcaatgaggtgacacagtcggatattaccaattgttcaggccgttcgatccgtcggtcagtcattcgatctgcttgtattacagtcccttatctgacccataggatcaaagtcgagctagtgattcacatcagagtcagcaagatggtgagatcagtaagagatgggaattgatatacaaaatgatcaacagagataagataagataaatatagtcacgtcatcgcaatggcccgggtttatctctcgatcgaagagttttcctatcggctgcgtggaaagtaagcgttgagactcttgatcgctcgactcttagccattgagtttcagttgcatcttgtttcccaactgtctcctattctattctgttctattctatcctaccccattctcatccttcaaccttcagatacctttgatagtcgtgatttaccagacgatcgcaaaggatgtccagctcaaatcagtttcttcggacgcagaatcaagcgttttagtaagccttgtcgcgtccatgattgctttacctgccacttcctgttcgcgagtatgtccaggatgaatacacgttgatcaatgattgaactctgcttgattcaatctagtgatgaatacgatcgaacggtcgtcttacgaggcgtcaatctctgtgccaaaaatcctttgggacatcgcgagtctccttctcttggcgggctggtttctgaattcatcaaaaccattcacgttacttaccctcatattgagaatcactttggatacatatagcctcccatgattcatcttatcatctgggtcttccgtcctctccagataccgcgggccagattagcttcgtaggcagccctttcaaattggaggacgcagaggttcatatcgcacgtctgacggcgtgagtgcctgtttgtcgggattccccttccccccatggtttgtgacgagatcgagctagcactaccttccagatgaggctgaatctatggtgccaattttctcatataaaaatctaggtgggggttccgggctgtccgattggccatctgttgggaagcgatcgaacacgaaggaccgtaagtcccatacaagcctaccgagaagttcgatcgtggatattcaagctggatttaaatatatggtttgttgttatcagtggaaaatatgatgaggagtatattgactatgtcgtcgctctcctccacaaactcaaagagggtggattccgagtttgtgagaactcttctcccatccggctggtctcgacgaaagggtgttcctgacattgtttcatacacactcattacagtcattgatcctcatcaagattgttggtctcgcgcttcaggaggctcaggggcaccttactggacacttgtagcctgtggattggatccgaataggtttcagtcgacccaggctactctagcccatggcttatggaacggatcagatggaagaacaaaagatgagaagtggcctgatatggttcgttctttgttaactaaatccaaagattttcacccagactgaatctcatcctccttcaatttggttgatgttcctcagatttggcaaactaacactttcaagctagcttgcttaacgttgttcaccctcttctttgcgggaagaacgttcgcgcccaagtgtattatagacggaatcaatattcaagactggctgcatgaaaaatatttgaacgcatttggcaggtcagcaatccacgtttactttcattcctaagtatttcaaccccctctgactattgtttcttacaactacagattagcggatcggatcgctgaagacggagaattaaacgacgtctgcgttatcggatgggactcgatgtacgttcgttttgaatttcttcggaagagcatataacgggcaagcgtttgactttgttggcatttcatatggctatgtaacttagcaacgaacctcaagaaggatttatcggaaattctgatttgagtgtcctaagagaagagcagtcattcaggttcgtctcaccctcttcatcgaaataaggtcatgtgaaggatcgaatcatgctcagttgagattttgcaatgtgcaggacgggacctacccccactgcgtttgaggctctcaagttagggatgggccagaaacagaagattcagaagtacaagttcgggtcggtgcgtagctcttctacttcaagttacttcaaagacctggcgccttctcgatagccattttttctcatttgtttctcagcgtaccttgaagtatgtatactgatcaatcaatttgttctcgctgacagactggatcaaagtcagacggatatgttactgtagatccagaaggtcagacatgttggctcgcgccagaggaagaacctggaggaatctccaaatggggttggaagcgagacgcaggttggacaacaggcacttgcatatgggctgtacatggggtgtacgtattatgatttcacaatttctcgccctttacgctctctcctcgaatctatctgtagctgatagtctcttcctatcttggcgcgatattcagttgggatatcgagcaagccactttgcttcagccagattacttttcgaagcccgtcataaagggttctgaggaggttgatttcttgtccgattattgggttcctcattggaagctgtggaacgctagaattcggaagtgcgttcttgtttatgatgcactctgttctgttttcatcctgactaacacctcttccttttggcgtagatcgcatccgcaagctatcgcatttatcaatccaccagtctttggacatcctcccactttggacgaagcagatgagaatggacgagtttgcttgtctcctcacttttatgacggaatgacactcattaataaacggttcggttatatgaattcaataaaacatcgaacagtttatgaacactgacatatgtgacctcgataccctgtgccttcttcaggctacattcattcaacgcggatgctgtaaggatgaatatacctgtcatatgcactaccttcattttttatctgatattgatccatcaaactcttctcggattaggttgggctcgcacgtaagacgaccagtgttcttggaggagcatacctagggctcgagaacattaaagagtctatgcggcatcagttcggccagctcactatcaaagatacgagctccaaaaacccagacaacgggctttccacggataaacttaggtcataccctgcagtcttaggcgaggtatgtcgtcctttttgacctatatccatcagcgcatcgagaaggttttcttatgagctatccatttgcctcttacatgaattgatcatgcctacgtcagattggtgtgccgttcgattttaagaagacggacaaactctttgggcttattgctagaggaggcagtcagcacaattatcgagagcaagaaaaggcaatggatacctcgttaacaggatgcgatggcaagaacgccgttggggtcagtacctgctgacttattttcctttcatgacgtgtggatactattcttatcatctctttgttttctgacttgccgatcgtggactagtctttcgtttgggcttacgattgccacaatacaaaggagaaaggcgatggctgggttcgtgattttccatatctagtaactctgtgtactgtgttggttccaactaatcccgggtcattctgctttgaatcagaacggagaagatctttcaatcttttgcaaagacgattataggacaaagattcctagtatggaggtccctcggtatatgtatgacctactcaacattggggctcgggcccaaagggctttctcaagagtgagtcttttacagtatttcttatcgcatcagactagatatacacttgtttctattgtgtattcggagatctgactctgttctttcgtgcgctctcaaagccttatcctatagccttggttggtcgacttcgacatctcgatttctcgatggacaagagcgagttgactatggaggtagaagaagaaactcttcctaatccttctacatctacaaatcggtcatctccggtctggacggaggtctaccttccctatatccacttcacgccgttcaaactggatgcaggcgccgatgagattgcctctctgagtcttcaacccgaattgtcccaacaatcgatcgtctttaatccaagctcgattttagcatcttctgcatcaactcccttctctgcccatctgatcagtgcgccagaaaaagaccctcctttgggcctcgagatctggtcagccgagacgggagcaagacccaggattgatatcaaggtccatgttcatctccaagaaggtctcccagctcaatctggcggaggactcatcttcgagatggttgcagtcggacagatcttgaaatggaggtgggtgaccgcagacaaagcgaaggaagtggacggcgagcagacaaacagaggcgtggaagttaattcaaagccggtgaaggaggtggtcccgaaggagggaaagctgagaaaatattcgatcaagattgaaaagtggttggggcatggattgtctggcggactagctcagaagatctcgcaaatacttccttagcctgtctcatgttatcaagacaaccgtctgccttgaaactcttatgttttcctttctcattatcatagttttattccttttccttgtctgtatttccgatcttgagtctaattgactttttaacctgttcatgaaattttgtccattctgaccatccaaacatcatgacaaaggatggcttaaaggtaaaaggacgagagacaattgagaatctgaagtgcaagagaggcttagaaccccttggcccagctgaagtcaaggcgaacgggtccagaatagagaaaatcgtcgtcagcaggcttcagtctgttttgcatacgatgtacctgaattaagtccggaagtctaaaaagaatactcactttccggcagcgtagaagtcctcgacctccttgatgatcttctccagagcagaaagccactggtcaagctccttctcgactgagaagggggagaagagggacgaatatgaccacactatcaatctacaagtttcacaacttcttgtgcttccccctcgaaacagaacgtaagcctgctttacttaccgacatcctggggcgatccaagcttggcgtaaaagtcttttcggtatgggcatgccttcatcgcaagctattcaatccggctcaggtgttgatttagcatacaaatacatcgaatgaagacatacgagatatatggtcaaaaactacgaacagcgaagacaggtcggacaaacatagagtggtactgcttcaaagtactctcgtatgacttagtgaaagaaacagtaagctcatccgacgggttggatagagagtgtcgcaaagcggtcgcgttgaacttaagtcctctgtattgaagcgcgttgagtaaacaaagaggtttgagctttatcgttggacacacataattcgagtatgccaagcgagaggacaaaaaacagtggtgaagttcttaccgaatgagccagagaagaccctgagtagccgttcggttcttatctccgggcttaccctcattctgaacaagagactgcaaggtcgccgacgatccagggctggcggccaatcgatcttggactttctagattgttcaattatcgagaggataataaagcgcccgagatgtgttccgtgtgtacgcaatttgaatatctcgtggcccaatgtgatacgtattggtgtacgagaaaacagaccttgatgtttccagtgatatcagacttcacaggagtaaaggcagcgtttccaaggacgtctatttgagagcattaggagcatgaagtagtgatcagctcagcagggcctgaatgaagaaccattgaaaagacttggtggatctcgttcccgtccttgcagttgagatggggccctgtgcctttgatagaggctcaaaagtggacccatctcttggaagttcgtcgcatctgttgtttagattgatacgcatccaagaactcaccgaagatcttgacgagtccctcggaagcctggcagaaggaagcagtatcaatcccaggggtggtcgagacgtcttggaatttctgtacggggcaaagaaacgtattgattgaatgattgagctctttccactggttcgacacggtcacaataaaaagggtcagtagataactcacaactggaatggtctcgaagaactgaggagaagacatggtagattgatggaatttgatgcaaagaggaagaaaagagaacaaatggagtcgcttggtcgaggatgggaggaatgtaccgagatgttgtcctggcccgggaagtttcaaaccgttgcgttttaccgtttgccgaagatatcgtccgaccctttgctcactcgtcgtccatcatccatcatcaaccactcacctcgtcactccattcatgacggcgctcaacaaaaagaaacatacttcatttctcctccgttgtcttcgcggtctaccaggttcggctgcgtcctatgactccaatcggtcggttcaataccttcatctacctcttcttattcagcgagcaaccgcgtttctgagccatcaaagaaacatttctgtactttttttattttgccgggatgggaatgaaatagtttgactctgtcgtacttccttcttgcatctctagatctactaggaactttgttcgaagcaacagatcaaacggagcgcaacgggtggatccaatgggtgtgggatcaacagcttcgtttgtctgactctactgaattcgttcatctcttgtccgtcgttcgaggggcgcaggtttgactttggatacgcatatatatatttgaaaaagctcagggtggtttcagaggatctcctttcacaggcccatggaaggagtgtggaggaacagatgatgatggacagcctataaccttagtgagtttccattcgttcgcacctcctaatgatgcactccatacttatcactcttgcttcccacatccgatagacacctactttatcctcaaatcaagctcatttggcttcgacatatacggcgctcctagtcttgtcaattctacgagctcctttggataagctcaacagaccgggattggttgcatttctgaggtcatgccagtttgaggacggctcgtatgttgattcctcacctctagaaactcaagtctttttttatactgatatatgaatgatatcaattctgaccctcatattgaccttctctatacatactttcgtagattttcgccattaagaaaggagatgaacgctgagagagacgttagaatggttctttgcgcttgtgtgatttcggatctggtagccgattggacaggagtcaacgttgaacagtccgaacgatttgtccaggcttgctgtgtcaggccctctcccttttttgtgttctttctctgtaaccggtactaatgttgctttgaccacagtcatatgacggaggattcggtcagagaccacagcaagaatctcaaggtaacaacaacctttgctaatttttctcatagcgtgccttcccgcttctgagactgcttgcccattcatctctacccattcgtctcaaacaggaggaacaacctattgtgccctcgcctcactacatcttctgtcttccgtgtcgcccactatttcagcaccatcgctctcgactcagccaaccatctcatggcttttacacaggcagatacaacctcgggacgttccgtttcaggctgactttgatgaggaggatcagtcaggtccaaaaaccagatcaatcagcggtggctttcaaggcagaccaggaaagctcggggactgttgttattctttttggtgtggtggcggactatcggttcgtcgacgtcgtttgcacttctctcagctgtcttggtagctatatcggcagctgaggaacttgtaaaagaactaattatcgtgtgtgcttgcttggtcttcgcaaaatagattttgggcgctcaaagtttgatcgatgggccagccaataaggcgttcctgctgcgttgtcagtctattgtgggtggctttggtaaagctcctctcgaacgaccaggttcgtccgtcatttccacttaagctttcaatctgggtaaagaaatattcgacagttttccaaaggtaaaatgatgactgaacccccgtccgaccctcttcctgcttgattgccatttgttacagatccgttccatacgtactcagctcttgccgcgctttctctgtttgcaagcatagatgacaaagaactcggcaagatggatgcattgaggaacatgagcaagagcgcactcggttggctagagagtgagcgaaccaggttgggctggctcaactcgatatagaatcatgctatcgagggtatatatatgtgtatgtgttctacccaaatatctagcgcaaacaaagggatcgctctgatggataggagaagtcgcaagattgagcgctcctgtgggtatcaagtaaagagtggagacaatgcacaacgctagctagtgtcattatatgatatcagtatgagacgaaggagtagcggacgatattggctctcaaccatatcgaaagtattcccatccaacccagttcgcaatgatgtaactagaagcaataaaaagaatgcatcagttgtctgtacaaggctgtttctttacgttctactgtgatggtaactcactaggctccgactgggacgagtagaggaaccaggtacttgtagtgtgtgtccatacagaccatagacagaacctattgacgccagtgaagaagcacattaacggttgacatgaccgtttcgatcgctacatacaacaggacacttgaagtaaccagttctagaactcaccgatggaaacctatcgggttggtcatttgtcttgaccaaatagcatccccacggttccaaaagaagataaactacgatggcgaatgaggttgacagaagaactataccaggaaggatctttgaatcgaccggcatgtgtgcgtgttaccttcttattcttccatgaagcggatctattcttcctcttcagagatgatggatgatggcagagagaataaagggttgtataccgggatggatgaatgaatggtcaacaagctgtgcacgtcaacggacgagatggcgaagtgtcttcatctcgttcccactcctggtcatcaaccatcatccggatcattcatcatcttatactaacacaagcagagctttcctgattgaatggcatcctctatgactagttctcattcggaggatgatctagatccgttctccaccgtgtccgagacaccttcgcctaatcctcgggacgtccctttaccttcgccatcgcccaccgatgctgaagcctcgtcctcttcaaatcaaccaaacacgtcgacctcttctgatccttcatcgacggtgtatcagcaagctcctcctcttccttcttctagtttgtcggaagaacaggtcatgaatagtagagcgtatcatatacagcgccctaatcagcccctctcacctatcggcaagtatttgcaggaggacgggtgggtgattgaggtacgtcggaatatagttaattctactgggtattctttgtccaaagtcccgatccgatagctctctgactgacacttttcctctttgacttcgtccgttgttacccctccacagatcatcgatgcatacaaaacgactgaggcaaagtcgacctacatcgtctatgtgattcgtaccgatgtgagacactctatcgtgtgatcatttatgaagattgctcctagagcttacgtttggtctttcgaattctaacatcttctcagatgatcgaggctcggcgccgatactctgagtttgaggctttgcggctatcgctgtctaaattatatcccacgctcatcgtgccgccggttccgtccaaaacgacggtatcagagtatgctgtcaagcagagcaaagcgaaggaagatgcagtggtgatcgcaaagcgaacaaggatgttgggcacattcctgaaccgaatcggtaggcatcctatcttgggaaatgaacctgtgtttcatcggtttctcgatggtggagtctcttgggtgggtctctctctagtgctcgttatgttcttgcccaattgtctcggaggatttgacatctttctttgttaccaacgacatggctacagacggaaatctcccattcgcctcccatctctcagttacccaagaacccactcaaagtgccggttcataacccgacggattggtcgttcactgctgcatacgcgtcgttaccgaacccgccagcgaattactcgcttagaaatccagaccaaaggtttctggaaagcgagaagtttacgaacaagtttgagaaacatctgagcggaaatctggaaaaggtcaatcggcggattatgaagcgatggggaggttagtccttatcgagacttcttattgatgatcagatacggacgtcgcaggatgccaagttgatacttttcatgggagattgacaatgtctctggttccattttgcttcgctttcttaagaaaattcaaacgactatgccgagcttggagctgttctgaatggattcagtctgactgagaccggctcgctgtcggcggcaatcgagcgtacgggccaggctgtggatgcgacttatctgtcaaccaccaatcttgttcgttcattcttattcttctttcgctactattttagctctgatatctgaaacgcgcttgtccgattaaatagctatcgcaatgggagtctcaatataccgagcctctttcagaatacgttcactttgggtcgatcatcaagaaacttctacactaccggctgcagaaacaaattcagttcgagctcacgatggaacagatcgagtctcgaaaggcatatctcgaagggttggaacgagcggagaacgaggctcgtcgattggaaggcgcattggctgcggccggtctgggagggagctcgagcggacccgatcgagatcgtggagagagtgggggtgggttgttggatgggaacagagatggtgacggagaaggggaaagaaggaaagtgccggctagctcgacatcaatgagcagcttatcgacgactggttcgagcgggtatgggtcatcgttcttgagtgcgctcagtcattcgataactggaatgattgacgtcgatccagaggcaacccggcggaataacatctcgaaaacaaaggatacgatttcacaggttagagggaaagacatgttgttgttggtggtagaaatattgtgtacgataatcgctaacatagcactgttttatgcacgctctgggtgggcgcgtgtaacatagctggaggacgcgctccatctgacggcacaggatcttaagtatgcatcccggacgatccaggctgatctcgatcggtttcaacgtcagaaggttgcggatatcaagggaatgagtatcagtctggctcgggcccaccgggactggtgtaaacaggttagtgttgtatctgggtatctctgtagggaactcttgtgcataaacttactggaactgagtgggaaacatctatatttctcatcaacagaacctagaggcttggaaggaagcgaaagcggcggtcgatgctatcggtgagagagaatcaactacttgcctccttgcttggtgtctgtgcatagagatctaaaatctgttggccttgctatcgttcatgattcagaaccccatccggcccgagcccctcctagtggatcacgagtaaatcaagaagcaagtctgccctcaaggccgaacttgccgcaaacgacaagccaacagccgcttccgagagagcgaatctcgcctggaggcggtggttcgggtacgtcgggaaggacggctagcgatcctctcggaggcggttcacattaggatttctgttaaacatgatcggtccttcctcatcttcctttatttttgtttttttttctccagactgtctatatctttctcgcttgcttcccattgtgatttgtatagtttgtgacgaaatcgatgacatacctatctgtcattagtaggaatgacagcaacagtgttattagtagcaacaacgatagcaatctcatcaccagtcagcctttgacgtagtctgaaaatactcgtataattctcgactcgcggactggtttcacaaaaaggaaacagggtttacccggccaggcggtggagctgtcactgcggacgaaataagagcggtgagaaggcagggctgctgcgcgcgcttatgtcactgtttacgtcatttgaatgaccttgcgcctgacgaggctagaatccccttggctcgagtggggctcccaagatcggagagaacgagcgaggctctagacagcgggaagcttgctgcgcgattgcctttgcccaaaaacgtccagagcgtcagggcgtttttaacttttgatccgccctgagccttggccctttttataaagactggttcctgttttaactaccgcctactctcctttcttcttcttcttcttcttcttnnnnnnnnnnctctctcgtcacttcttaatccatcctgctctccagatagagaaaagagaaaacattcataacacagatcataaactcatcggttctgcttgttaaactatctacttatccttcctaatcgacatctttctctttcggatcccaagaagaacaacccaaaaacaaacaccaacacattcaatatgccttccttcgctgccttccctggttgtaagtgtgctgagctctggatacgtcatccttgtttctatttctctggtgtgtgaacctagagctaaccacttatgtatgtatgaatgttttgtgtgaccttcatagtcttcttcgcgttcgccgcgatggtcttgctcgtgattgtgtccgtatccgtaccaatctgggactctgtgagtttgacctttttatatatatatatattctttctcggtctgttcaatac

SEQ ID NO: 2159 - DNA, 30973 bp, Xanthophyllomyces dendrorhous
tcggtctgttcaatactcttttcttcacaacactacttatctattcgctcttttgtcttatttttcattctaggtttatttccttaaagccactctcaacagtgagacggtcacctttggaaactggggttactgtgttcaaggagggtcgtgcacttcggccaaatatggttatgacctcacctctactttgatcagtgattccaccggcagtacgtctcgggctctgcactcttcgtttcagcgccttgttcgatacgttcttgctgacatcattttcttctgttcttctcgatctttattatcgaaaaagaattgagcaacgctctcagcaagggccttacctatgtcttcatccttcaccccatcgctgctggactctcgttcattgctgccttgctcggcctcatcggtacatttgcctcatcccgagcttcgaccatcctcatggtcattgcttctctcttggccttgctcgtgaccggagttgcttggatcatcaacatgatcgctttcggaattggtatgtctttgatcctgtccagtcgtctagatttcttttcgcttacctgaatctcatgcacccttcgttcgtgtcgacagcccgaaaccgagtgcgaaacgctggaggacaggctagctacgagaacggagagtggattcttctcggtgctttcgcatccttggtaggttccgtccgtgctgatatctcgtaacgttctgtcgctaacactatattctcattctacagatccttgcctccttctttgctgtttgcggatctttcggtcgattccgatccgaccgaggagccggaatccctgctcgatactaagcggtttatctatccgcctttaatgagtattctcttttacgataggctttctctacttagttactgtcgtaatctttaccggattccttctttgccctttatgactctctgttcccctgctccgtttgtgcttagtaccagatttagctagagcccacacgtgcactgtatacatactactttattaatttctttcgccttgtcatctctttcgttcgaagaaacacgttcataaagatagttcctcttaatttcgtcggatggatatcattcaggacagcctcctaatcttttctgtttgaatctgtgtgaatctgtgaacatgggatgaagcaccatggaacatatgtatgctgatagaaaaacaaacgacgtgttgagcttcaatggaggctgtattaaccctaatcgcagcaacccagcgttctactgtttctcatcgtacgcacgcttacatgttttggctctctttcttcctcttgttctcatcttctcatctttctacatcttggatatcaaactaaccgaagggaaggtcaaaaacgatggacgacctgaatgacttagattggtccgtttcagctcaacagacttcaaaaccgagccctttccaatcctcgttcgacctgctcgctagttcttcttcatctacttcgacttcttcttcggctttctacaactcaacccgaactgtctccccacagcctcctcctctcgcccctttcggagctgccaaaccatcgatatctcaacaaaaacctcagaagtcaacggatgcgttcgctgatctcttctctctaggcggagtcacaagagcacccggctcgagaggagggggcgcctcctcatcgatggctgaggaacaagcgagactcagagaagaagccgctaggaagaaggaagctgagcataaaggattcgaaagccaaggagcattctggaacagtttaggaggttcaggactggctggtatcgaaccgtcacaggcatctgctccttttcatccttcggtccaacgatcgcaacaacagcagcaacaacaacaacaacagcagggatccatccgattagggtcgacaacccctcttgtcccttcacgaagctcgactcctcaaaccagtcgtcctcttgcttccacctcctccgcaaaagcaccatcacgaacaaatccgtcggacatctggtccgagtttgatctcctgtcttcatcttcgaatcctggtcctcctccatcatcctcaactacagaccagcgcctggatgcacaaagcacaccttcgttaattcttacgcctcctagttctagctctggtaagactggaccagcttcggatccgttcgacttctttctgaatcagacccctgtgaatggcaacgggccctcaggctccaagcaagccacagcagctaacaaggtgcaagcctccgcagcccgaggagatgaagacgactgggagttcaccgggaatattagagagggaaaagagagaggtggtcttttagaagacagtgaggaggacgacttcatgtctgctttcaacacgaaatctgtagaggtggtgcgtcatagatctactatcatttgcttctttcttcactattgtttccctgacgttttcttcttcctctcgcggtccggttgtcaaattgtattttgttctccttagaaggctactactttgcgcccagctcaatcatcttcatcttcatcctctcgtcgaggatctcctccaccacacatcgtcggccaactcgtcgagatgggcttcaccccagctcaggcccgacaggcccttggttcgacagagtccggcctagatgtccagatggctgcttccatgctgttgagcgaaagctccgatcaaagcaaacatattgatcgtggtttcagcgatcaagacggtaatggcgacgatgacgagagagagagggaccgacttcgtctgatagaagaggcggcggcggctgaaaggcgccgaaaacgaagacaaggtccttctcgatcatccgtagctactggcggcgcctctgatctctcccggtcggcgacgaacactcctccgaacgaaggagcaacgacacctcttcaagagcaagccgccaaaatcctcgctcagacaaacttacttgggaccagtgtcttcaacagggccaatgctttctggaaggaaggcaaatctcaagtccagaaagcttacgaagagagaacagcagctgccaacgcaggaaatagtcggtcgtcgacgccggcgaacgatggaaggccaaagtggatgacggagaatattcagaatgtcgacggttcggacaaagaggagccgagggcgcagagtcattcatctggattcaaggatggatttgcggatgagcgacttcaagaggacgctcctacccataggccacaaagagaacggccggtaaaccagaaaccggcaaaggcgattgagcaaccgagtttgttattgtccgctgcttccaagatcgggagcctgttctcaacggcagaagacgagcctaggtcgtatgtgtcccccaaccggcgaccgcctgctcgccagtcttcaagctctctgacgacccccccagtctctcgtccgagcccatttcctcctgcgaaacctctgatgacacggccgatcccctctatctctacttcttccattgaatctgtctcagcacatcgaacgaagggtaatgagttcttcaagctcggtcagtttggtgaggccgagggcgcctatactcaagcaatcagtatccttcctgatgggcaccctcgatcaattccattgtataataatcgggcaacttctcgattaaagaatggcgatcatactggatctgcttcagattcgaccatggtgatcgacatggttggtttggattaccatcctgataaagaggtccctcttccttccgatctctcagatatcaatcttggagacggactggttaaagcaatcgtcaaacgagccaacgcaatggagttgggcgagcggtggtcaaaagcaaaagaagactgggatcttgtcggaaggttagaaatcaacgtaccaggtgccactaagattgccgccatggatggatccagacggtgcaaaaagatggttgacctgatgaacggggtgtctgctcctgccattgctccttcctcttctgcctcgtcatcgtcaacgacgaagcggaagcctccgcctagagcagctccgtcatcgtcgacaggagcagcgtcggctcttctgaaagcgaccactgccgcgctcgaatcagaagatctccagcgagaccaacacaaggatgctgtcgacgcgaggatccttagttggaaagcaggaaaagaaacaaatgtccgggcgttgatcgggtcgcttgagaatgtgctttggccggaattagattggcaaaaagtaggactacacgagttggtaacggataaacaggtcaagataaagtatacccgggcggtcggcaaggttcatccagacaagttgaacgcgggcaatacgacggtcgagcaaaggatgatagcgaacggggtgtttgcggcgttgaacgaaggtatgttacaagtctttagtctcttaactctctttcggctggaccctattcccactatcaatgtttatgtttgattaaccgtctcgtgtggttgttctcaaacgcatcagcttggaacgcgggtcagaagtagagacttggcattcaagaactggcaacgtcatccattgtcatgagaacgtgttgtataccgatttgacgaagaatagagcatggacttttaataatgaaccatagggaggaagggcttcgatgaattcttcctcatgcggttaaagaaacggctgttcgcttacctaatcgacttttcgctgaacttccaacaccttcctgcagactcgtcgactctcgcgcgtcttcctcattcatcctctgtctttcacgtctttctcatctgtttctttctgttcatctccgttcgcctactgtgtaaaggctaactagaacatcgggagcgactgttcatccgccatactaatgcttatccgttgaagaaatgctgacaatttgtataaaacaccatgtttcgctaatatctttcctgcccctcatcacatcatatcaaactgacgcacactcatatctcctcgcactcaccttcacatattctatctccttctctatccccatcgaacaatatgtcttctcttcacggatcttatatccaccgaccgactgcaatgcttggctctcgtgtcgctcgtgcgatccgacaagctccagttgaggtataccctctattcgccgtcgttgttcgtgtttcttctcttctcctttctcgttcttcgtctcctctcttaccgctccaacactaagccgcgctctttccatcatccgttttctttttttcgacttgactgatacacgccaggctttctcattgtcatttatgacctacaccgcgatccatacatccaaagacgcaacggacgtctcgtttcatccccagtcgaaccctcgaccatgggaaaagctctcaccagagtaccttgaatcttataccgttcgagcatcgtgtatagctcctcatacacctggacagtgagtacatgtccttctttgtctttttatctcttcagagggagttcttgtcggatgttgatcggataaagaccacgcgggttgacgattttgaaagctcctttgaactggtatatcagccctacacactacccgacttctgatagcttcttcgacctcaagttcaaacctatacattagacactgaaggagaaaaacgtttcttgaaaccatcaccaagcttctctagtctaccagagatcattctctgcagttcttttccttttatctgccttgtattgtgatgtttatctttttctgttatctagttgaattttgtgtacaccgtttgttgtaaaaatggattttgtttttgaccgtcatggtttgttttctgaataagcttcctactgacagtccttttctgatgggcttcttgtttcggaaagaaggatgtaagtgctgtgacatgtacaaggcctgtcgttcatcaccaacacaagacaataatcctgccatgtacccgttcttgttcttcctcagcggtttcaaaagatgatctcaagtaattatggtcaagggtcatagatcagaaaataagaatgcttagcggggacgcttaggcggactcgtttccggcgacggtgagctgcaagatgaaaagtttaacaaattaattttttttaaagcttgaaaagagagaaagacaaggagaaaactcacgagatcggaatctccggcgtcggtgatgctcataactccgactcggaagagcttaccggccgccgttccgagggtagcgttggtaccctcgtatcggtggacagcggtcttgctgagcatggcgtagtactcaatctcggctcgtcgaagagggggagtgttcttggagaggaggataagcttggctgtaaggggagaatgaaagacgaatagggaatgtaatttcgggtggatggttaaagtggatagattgggttggaaaaaattgtcatgacgacggatacggaatgggaagatagtcagtcatttgccttcgcagcgtgtgaacgctccagccagggagttccacaaggtcgaccaggacgatcccgtgcatcgacctgttgaaccctcaagaaagggggaagacccaagggccgcggggaaaatttcaatgcttaccctttccggatcgcatcgacttcaaagcggacttgtagccaagggtgaactttcctaaagaacgagaaggaggagagaggatgagcatttacattctggttcaaatgaaaaccatgcaagagaaaaaagaaagaacgaaccagacttgacgacaagctggagtcgagagttgatgttctcggagttcttggtagccttggacttcttagtgggagccatttctgaaaagcaagtgaagcagacctgtcagactgatgaacggcggtatactcagcactcaatctatactcacttgctttgtcttgacgaaggatggatggagaaacgaaaccattcgagtgtgaggaaagaaaagaaaagttttggcgtgttgtaaaaagctgtgcatcgtgacttgctcgttaccatgaatttcatactccgtccttttctccaacaccttccacacgctgggcagcatgtacttgcgcttgtcctctgtatattgatcagatcaaatcaatagattcaatttctatacagatgtggaaggccaaatgttctgtgatttttttatagacatcacgtcgttgatactggctgctagaagtctcacttttcatcgattaggcatagaaataggcgtagagagaacactctctttgtttatcatatggcacagctgtccaaaacagaacaacctcagacaatactatacatccgtctaaaagtgtatgcaatgcgtctacaatagttcttagttgtctactggtttttcatccggcccggcacatctacgaagagagacgatgaacctcttttaacccatagcccgctcccacatctcgtctccaatcaatccacccattcctgtcggacccttgaggcaattatataaccacagcttcagcatctctccgtccactgcgcacgctcgaaccattacagtccgtcccatccctggcacgtttctggcttccagcactgagagcgaccaaagaaacgatggagtgcgtgggagatgattgatcttggtttcggacgcctgaaggtcgagtagatgggtgattaatgactgagtcgccggacctgttaggattaaggtaaggaatattttgtatgggtacaaagaagatgcatatgacgtttgattggacgttgtcgataatgatggtgatgatgaagacggtggtttcaatcccgatgcaggatcttgaagagtagtgtctgccgctccagaagtaggcggtgctgatgatgagactggtagagccgattgagctagcggagcagaaggtggaggccggttctcatcgtggaggacaatacgttcgcctactcctcgggttgagccccaccatacctcactaaagaactcgagcctctcagcgtcccatacttcccctattgttaaagctcctcgtttttctcgtccacaagctgattatcatcgaccgatacatcgaaaggagataaacagaataaaaagggcaacggttagtctgaatccaattcggcgcgctatgctattgggtggcctcagacaacgtaaagagagataaattgggactaaacgagcaggaactcactaaaccaatcgagaacgatcaggttagcggttccacaggtcggcagatcgaaacgctgtcgttgggtataccgagagttctcgaaacatgcggttggcgaaggcagatagtaaagagacgcatttggctggagcgtagcgatcgaggtttggatagttgtcgaaagacgtaaagattccgatggggatggatttgagagagaggaaagtactgtaggagtcgctaaccggacaccgggtcgtctcttaaatactttggttgttcccttgaatcataatccgataatcacgtgtttgacccggaagaaaagaaggccgccatgattagcgaaacagacagcgattgatacgaatgaaaacactctcacctgagtcaacacgagaagagctgcaccagaatcgacatctaaattcagccagaccttgtccccactaatcagtcctccgccgtaggaaagcacatagattgtccggagacccttgggcgaagacgcgagcggagtgggtgagaggagtttgagcgggtatacaaacgagagatcagcaaacagagcggtcggtagtaaatgtgcacgccctgtgccggctggctgaggcatgaggtagtcgagactagcaacagaaagatggtaagacggtgatgaacagcagagatcaagcgatcagccagaaaacgaagatgttgttcttgcttgttagggttgtgccaagcgatcgcctcatcaccatctctcagcatcccagcatacatctctctgatactgcttgagctcatctgataatcttcccttccctgggcagacagatacgttgattcagcaatggatactcttccagtcctgcctccagaaatcttgcttcatatattgtcttatctgcctctttgtgatttagccaggtgccacactatcaactctacatggctcgaccttattcggaacaatcagcaaagtctttaccgaagagtggcagataggaacctgaaggacagtgacctaacgatgagcgactggctggtacatggtgtctcagaatggaaagagttctgtttgtgatctagttcaccttgtctttatccagtcgaaggttaacttggattagctcaaacaatgtgcttgtctacctttctgtaggccggcgtagacacatgagccacagaaattggagacaaggcaaccacttgtcgaactggatcagcccaccgttaagggatgtatggcggatcaagattgacgaagagcataactttgttatgacgacgagccggctgggttggtctatctatcttccttctttatgcagtcgcagtcgacactcgcttactcacctatctttcaaacaggaaacatatatgcgatggattccaggacatcagaaatattagaagtcatagtgggagtgagagaatacgctcatcttgagtatgacaaaggtttcatgatcttcgatacccattgtaaggaacaactctcactctcgtccaacctccgtatgcgcttatcccgctaatacatattggaacccactgctcttcctagtcggcaacacccttgaggtatggagacgtaccgaagacatgtcccaagacggtcaaatgtcaaatccgactgagaacgaagcctctcaacaagtctcgtccaccgcgttctcgacacgaagcctctttagcttgtatgcagagatcagatgcccggcctcgattcgagcttataggtgagtgcgcatttccgttataggcataatctaccgaaccaagtctgaagaaagatcacaacttcatagattcgtatatcctatcctgctcattggatctatgagttctcagtcggcgttcctgtgggacattcctgaaaaaaggatggttgggtccatcgacatctcctcagccaacatggatctcataaactgtgagctcgtgtatttgaatacttctgggtccatacgcgctaacttttagggtctcaacagatgttgagaaaacagaacgccatattcttatcctaggcctgcactatatgtctgtcttctcgttatctccccacctggatccgggaagacagctacaccccccatatcacacactcaacattccctccgtccctccttccaccgaatttgttctcgacctttcgttagattttttagagctacaatgtctaactttagaaacaagaacaagaagaaccagacgatcgagacggtcggagggccacctgagcccaatgaggaaggcaatcgtttgggagacggagggcacaagagccgaaggagccatctttgcaagcaccatcgattattcgttcacagcgttcgtgtctcttgatatttgatatcctgtcgagtcacgagtgactgatcatcctctctccttttctgatcaatagcgcccacgtttcggaaggtgatctgatcctcacttctagactaggaaagatttttatcgtcctcgattatgctagtgtctttgaggatccatctttagaatctctacacacgatatgcttggatgtgatcgagcccgttttcaaccttactttcagctacggttcggctgtattctccacggtttgtctatctgtcttttgccttccgtgtcgcttatctccatcgcagataatgttttaggcttatattcggctatcaccaaccactccatgcgtagcgaacccaagtcctcatcattccttcaggttcccttcccaagatacaagacatccgagagtcagtatctaggaaggaggctggcttaccaagcttgccgctaaagatagagatatattcttgtagtaatgtctctgccggagcagcgctcgaatgtagttcggtacaggccgatcggaccagggcgttagtcacctttcctcggtcaatccgtttgccttgttgtaagatgactatgttgactcgacttaaatttattaggatgtttgcatacaacacccgagcagaccctgctttgggtaagccaatcactttctgctttcataacttttgtaatctccgcctatactgatcgattatgtgttctgacgagaatattgtaaacctctatgtataccagatggattctctccgcctgaaggtacgcttgttgtctgtttcttcgttccgttcatctcgtggatctttggtgcccattgtcttgtcttgcgcacgatatcctgaacctgaaaatgcgattcccttgttactggtagcgcgcacacattccggatactctgtcagagtgtttgactttacacccccgctctcatgaggagagctctgtatgattcatgtactatatacaatgacctcacgaagcttcactaccccttgataagttgagagatgcgatggaccccccaaagagaaatatgttgcgtcagagtttatggtatataagcaccacatattatcaaaaaatgcgggtaagaaaaagcaaacgtcattgattccgatcgagcaacaatataaagatccccatcgagatcgcatcctctttctctcttctcttcatttacattcacatccatccatctctttctttcagccgtaacaacacatcaacatacacttcaacaacatgtttgctcgatccatccttcgatccgctcgaccccaagtcttgatggctaccaggccgatctcccgatcagtcgtcctcaacaagggagccatggattctttgcgtaggtcatctttcttcttctatcacaccacacacacatacatgtttgactgatgataggagattcttcttgtgcatatgtttgtaggcgaaaaagcatctgatgttgcgtccaaggtttctgatgccaccagctcagctgccaccaattccagttcgtctcgtctgaccttaattccaaataatacaatctttaggataaggctaatcattgttttatgtccgcgcttctgtttttccatctcacagacgccgatgtgtccaacaaaagctctaccagcgatatgccccctgagttggccgagttgaccgatcctcacgccggtgagaaggttgataaggtccttcgggcgcagggtaaggatctcggcaaacatgagggggacaaggcctcggacggaaacggacacgtcgttcctggaggacaccaatagactttttcttgtgagtgatctctttatgattcatactcctcaatagtttttatggctaactggacttggtttcaatctttatctgttgtggttgcaacagtgaaaccaacacatgcatatctcattgattcctatcgttctccccgttcaacgctgtacccattacatttcgtgctgtatccaataagaattgcctagctttttcacacatcgatcagtcctgcttgcaagaaaagatgacgtatcacggctcctcgttttgtggctttacgaccccaagcaagacccgcaatcttatcgtctcctaaagaaagcagatgttctcaatggcagtacagatttacacccagacaggatacttgtcagtttgagagaacgtcacaaaccaaggggaccgtgaagtaacgagcgcgctaagcagacatcaacagattctgaatgcagttagtggccttgagagattttaagagttacctatgttttagagcgttctatcgagatcgctcattaaaaaaattgcatcggagcgatgaagaatgatgagaagagatttcgaagcgtcggcctcatcaagatggcattcatttcgctgacaaaagctttagctcggatagtcctgattgaataggcaaagctcatacagatgaatacattttgtcgaggtcatggatcgtagccaacttattcctgactgagcagtcttgagcgaacttcgtcgtataggtatatatatgaacacacaatctaagctaaacgataaccttgctaagtttagaaagagctgtatcaagaaaaaaaaatgcagatgggtgatcgaccattgtcagaaatctacgagattgaaggaatcacatgcacctcaaggattggagtatcaagcaacatacaatttaacaagagatcgccctgcttgatgacctgttcatattgggcatttttcttgtctcgtcggcttgtcataacaataccagagaccttatcgatcgtacagttcaatcgaccagacgagatcaaccgagacaaatcactgaaatacaaacgagagtaacatcaagtaagaaagactgctgagacttgagaggaaacgctagaacaaacctatcaatgaactctgggctgacaccgaatgccctggccatgctatcaagcgttagactcttataacttgccaggagctgagcataactgataattcgcatctctctgacgaaatatctagcatggggtgacaagatttttgagggaaggaggtagtcttgctcgatagcggcttcaagatttcattccagtacaacctatcagtacatgtttgaagaatgactgaaagcaagcactgtccaaagaaaaaagaaaggaagaaagagaagaagcaatcttggaggacttacccaaagacttgaagaatttggcgtaatcacagttgtgtaacgaagtagcaaagtcttccaagtttgattgagacgggaaaatctggcgaatttcaggagagttgatgatctaaagcgagcgaattgatcagtaacctagcatactgccaaaagtgaacacggaatagcctagatacctttttcttgatatccacccgctccatccagaccatgcaacccagcacacacactccaacaaagtcatcgtaggccatcaactcagtagccgtgaatgtcgagagcgcgtcgatgagcagctcgccgccctgtttaaagtccctgataaccagatagtacaatccctggtacactttcaatcggtttcgtcgatcccaatctcctccttcgttcacgagtctgaatgatagatagagagacgatcaggtttggaagaaacaaatcacatgacgagaaagaggcttacacggaggccttcggaaggttggtggtgataatattgttgtcgttgaagaagaagccaactcggatgatagtaagaacaatgtcgatacgagctccgattccaggagtcttctctagagcaagctctaaagcagctaatgatcgctcctgacgtacaaagcaatacacgaatgacatatagcggtggttaggttttgtgataataaatcagagtaaagagaaagagagctgatctaccttgtctccaatcttagtcaagtaggcggccttctttcgaagtacatcgctgacctctgtctctcccatgctatcctcagcctccttgatctcagtctcaaacttagcaagggccgtctcgttggcagcttgaagtttggagaggagttcagccgaatcggttgagccgatcaccgagggtgattccttgattatggtttccaagaacggagccatctctgtgagaacgaagaagccgtaagtcagcaaacagtagagaatatgtatgctcctggcgagtaagaggaagcaaccaaaaagggagaagaacaaaccatcactggtgatgccattgatgagatcctggcgtgccttatcatgaagatgggagaacgccggattactgagtacaaaaacggcctgaggaagagcaaggttggggataggcaaaggagcctcttcatctactggagaagacatatcactgagagaggacagaactgatgagaaagagaaaaagagatgaagattgttgatgatcgttggtggtggtggttgaaggttgagggtgaatcaaaagaaaggagaaatcctccacgtagcgatctccaactcaaccactgcccatcatcaatcatcaacccatcaacctccatccttccatctctctgtccaatgtcgtctcttctgcaacaggccaccgatctaatccagtcagatcccaggcaggctgaggaacagcttatcgccatccttgattcaactccgggtgagagattctcgttctcgttctcacatatatcgtcattctttgttgcatctactgatcctcctctttctctttaccttgcttctcgttcttctgccggttcatctttcttctctctctctctatcttctctgttacagccgacgaggatgaacagcacgaccaggaggatgccctgttgaccctcggaaagctctacagagatgaaaagtatgttcaatatgctagcctccacctccgaactctcgcctttcgataatcgcaaacacatctgagcacaaacacaagttaactgcttgctcacacccgctcttcaacctgttttattctatagaaactccgatgctctcgcttctatcataaagaaatctcggtcccagatgtcgacagcggctaaggctaagactgcaaagctcagtaagtctttctttcaccttgtcggtctccgagaccagtactgtttccaataccgcggaagattcttggcgtgtcatcttgcgcgacggaaggctgactcctttggcttcttgaatcatatgatatctctagttcgaaccttgatcgatttcttctccgatatccctaatgctcagaacgcccaaatcgattgcactaaggatactattgagtgggccagatcggagaagagggtcttccttcgacaaagtttggagaccaagctggcaggcctgtgagtgttcggctcaccactttctgtcgtcttcatgtcttgcttgtgcagctcaattgccagccacttgacacgctgatgttgtgttctgtctcataatggcgatggaacgggatctgatgtacagacaaatcgagttcaaatcataccgtgaagcattaacattgatcgaggccttgctcaaggaggtcaagcgattagacgacaaactaatcttgaccgagatccatctgcttgagtctcgagcaagttccgcaacagccaactgggctaaagcaaaggtttgtttcttctgcacaatctgtctccatccgatctctagtagtgaacagaattcttaccctcgcgctccactgtatatctaggcggctctgacggctgctcgaacggcagccaactcgatctactgccctcctcttcttcaggctcagcttgacatgcagagtggtatcttgcatgctgaggacaaagactataagaccgcgtccgttcctgttcctgtatctgaccctgtcactctgctgtatgccttctaacctatatacgtctgaaccgcctcaatccaggtactcatactttttcgagaccttcgaaggatactcggcggctgacgatgaccgagctctcaaggctctcaagtacatgttactttgtaaaatcatgctcaacctggttcgtattatctctgttacagaagaagagagaagtacccatacacaattctacatacttagacatctctgagttctttcttttcaaccacacaacagcctcaagatgttacatcacttatccagaccaagcttgcgcttaagtactcgggcaaggaggttgaggctatgaaggctatcgctcaggctcaccaaaaccgaagtttgggtgaatttgagcgcgctttgaaagaatggaaagatggtacgtagttctttgctagactctcttcctgtatcttttatttggacagaaaaatgttttctgattcaccgaaacgattgttgttatcttgtatttttttacaacagagttgtcgaatgatccaatcattcgatcacacttggccgctttgtatgacacactcctggagcagaacttagtgcgcatcatcgagccgtattcgagggttcagatcgcccacgtcgccgatcaggtcggccaacctgttcaggccgtagagactaagtgagctgtctctgtctgttgtctacgtccatatattatacactgtttcatcagtagatcatagactaacagattctgagctggttttgctcttgatcaccctgaaggcttagtcaaatgattctggacaaggtgttttttggtgtccttgatcagggagccggagcacttctcatctttgacgagccgaaagaggatgtacgtagtttttcttatcattatgtcttcgcttttctttaaccccaagtatttaccttggctaacacgagacattgcttgtgttaatagggaacatacaccgcaacattagagacaatgaagcatgtgggagacgtcgtagaatctttgtatgaaaaggttcgtcctctctgttctttccatgatcgtcctttcacaggtccgctggtgaatgctctttctgatcaccggtttaatttttgtaggcaacaaaattgtcatgagtgatgactttaggagtagaaaagggtggaaagggaaaaaagccagcagggccaagatcccgtctatatgtgttttttttttcatgtatcgttcgttcgttcttcaacaaaggcgcttaacgtcccttcgacaatgttattcgagagagggcaaaggacaagaacaaaagaaaaaccgaagacaaatgcatatagcaaaggtaagaaagataaacaaggaaacagatatattacagccagttagatcgagagaatgtttttcttctttattcttcttctatggatgagctggtgatgacggctctttaaggaatacctgttgatttgaagacatcacaaacagaaggcctgtcagcgtccgtgctacacaagaaagagaaagacagaaggtggcggtagaggtggcgcaagaacataccttgaaaccctcactgtagagaattggtttatcgaatagaagacatggttcaaaccaacaatcaataaccgtaactttcgagcgacgcacgtgggagcgaaaagaaaagaaagccgaaaaaagaaaaagatgagaattgaggaaaccactcactaagctagccaactgagcgcattactcggcacatatgtcactaccctaggagccaatcctctggagaaccctttgaggccttccctagcccagacgattcgaccggcttcaaagattccatttgcttttcggattcgttcgtctgctgacgttcctctagtttgcaatctacgatagacgaaatcgaaaaggaaatggtattggcaagcaaagagtgagagaagttaactgctgatttctggtgctgcgcttggagaagtggagtgggacgaacaatgttttgaggacatccaacggtgtgctgatagctgctgcgattgctccagccgctccaccagctatgatgtgtgttccaggcgagtaagatcctgaggggttgatcgtatccttcaagtactcataagcggtgaactggacggcagtaaatggaacggtcatcatgagcgtcgtcgggtaggaaacatagaaagcagagattccttcggctttgtagactgatcggaaggcgtggccgacgttcttgtaggttgatccacgaagctgcatacgctgcttgatcacatcgaacggattcatgagcgcatcggaagcgatcgtagcggccgctcctcctagagcggtagcggtgaactgatgacccggcctgtttccaccagccaaatccttcacaatctcgtaggttccgaaatatacggcgtgagccggtccagcgccaaggatgaccgagttgacacctttccagagagttttcagtccctcagtggcggacactcgggctatcgagcttgagagcgtattatatgctgtcgaggccgaggcgacagagggaaggatctgcattcgggtctagaggatgataggaaaaccgaacaacatacaatgcatatacgaggttggcgactatctgataacaaagattgttctagcgcggtagagtagaaacgagcttcataccttgatggagtctatcggaaacatcacagcgtgctccgaaattcctgcctattatcgttgaagggaaccagtcgatcaaccgattcattgatttcagcatacacaagatgttcagtacttttgtaagggatcggcatgctggctggttccgtctatctcagacttatcgaagaaaaaaaaagttatatttaccaaagcgcctgcggccatgttcacacccaatccagctcctatcggaagagcttcgtagtcctctacttttaatcaaggtggcatcaaaagaagaccaagcccgatccaacattctagtcagcgctcagagtatcgaatacggtagaaacaaccagaacgtcggagggcaagtgttcatggagagagacgaaccgacgtgttcactgatgatgggctcgctcatgttgaatcgaaagagaatgtgagataggtgggagatattttgaggtgtttcgggcaattgttttcacacgcgtacacgcttgaacgaggaaagatggctaaggaggcaagggcggatagggtataactaaaagattcaagtctatcaagacgagacaaaactgaacgaatgggaggggatcagctatgtttttttctctctttcttttccacttcataacccggagtcacagagaagttcaaagatcggatgtaaacgcttggtcggacttgagatgtcaacgaacgaaatgccagaccagaaggcgaaaggaaggacgggtagaacggagggggcggagacccgattgaagcggatgtggtccagccatcgcgcctttgaaggtgaacatagacccatcctcaatctaacagcgagtgggccaccacggcgaatgaacccatcaactccaccaagggaggaagaagactctgttggctgtcatcaagaagacagatatatgatttgtgtttccggtggcgacaagcaaagagagcctcgtagcgtgcgacgacaagccagatttgggacatccgaaagtgatgatgctgaaccaaagcggtcggctgattgacctctgcgtgcctagtctgtacatccgtctcaacggtccatcgtccccatcgttctctttgttccacagaccgacatctcgtttgatagctcaatccaagtaccttccatccggaagagacgtgactgccacaccgaaatgaagagcaagagaaaagccaagacgagagagaaggagaaatagaggaggaaaaaaataccacgcacctaggattgagatcagcaacaaaggaagcgatagacgaaaggcagctcttaatctggtgaacagaggaatcggttggagcaagcgatataggaaggcctgttactggaagaatagataccgacaaccagaggaaacaacgaccgaatggtagtgtgagaaaggaaaaaggaaacgttgagggaaaaaaggttgacgtcgtcggatggttggccaatttcggaggatcatcgcctctatattttctattattttatataattttattcatttactttcacctccacatgctcagtactctgccgttttgtatgcctcctacacccagatctggtcgagaattcatgttatctgacgtccgtaggatcacaatgcacgatagagtgtcaatctggaagtgcaaggcctttttccgtcggagaggagaaaatttctttgatctaattcttttgcttttttctaacgactgttgaccatcatactcattcgtctccagagggtcccttgcttccgggtccactgtgcctgcccattccaggcataaccttttttacatggtaagggaggagatcgttgagtactgatttgcaagatgagtttagagagatagaaagagagagaaactgaccatagtaggaggaagtgtagtgatcggaggcaacaagctagcgactgaagttcttccggcctgaatcagcagagcatccatcacagccatggcggccatagactcaacaatggggacagccctgaataccagataaatcatgcgacgtcaggagaagattcaatcaaagccaatgatacggagacttgtgtaaattggatcaaagagataggagaacaagaaaaaaccaacctgggcacgacgcaaggatcatgtcgacccttggcctccaaaacaccagcagtaccgtcgtatcgggcggtctgctgagcctgagagatagtcgcaggaggcttgaaaccaaccctacagatgaacggcacgtaacaagatcatgatcagtatgcatacatgaatgctgagcttagccaaaacgatctgagatacggacctgaagtagatatcctctccgttagtgatacctccttggatacctccagaccagttggtgaccgttctgtacaaagagacagaagcaagagattgtgaatatttctgttcgaggtcagagcaaggaacagaaaagacaaaccggagcattccatcggcaccctcagcgaacatatcgttgtggttgctacctcggacctcggttcctcggaatccagatccaatctcgaaagccttggtggaaggaatggagagcatggcatgggcgagcaaagcctccatcttgtcaaagcagggctctcccagctagatgtgacagcaattacgaatcgaacagaactcagcaaactcaaccagactggataagaaatacatagagcgaaagaagaagggcgtacaccagctggcacacctctgatgacacaggtcaccgttccgcccaacgaatccatgttggcctttgccttcctgacggcctcctccatctttgcggaaatttccttgttggggcatcggacgatctccttgtcgacctcttctcgggtaacagtcttaagcaagttcatgaactcttcagagagcggaacctcgtcggtatcctcaccggcgttggcggagggagcgtcgaacgagggaaggtgaaccttgcccacagacgatacgaaggcgacgatagagatattgtgagcggcggcaaggtacttttcagcgatggctccagcggcgactcggcctagttttcgatgaaggacgttttttttcaaataaaaatttcgatgacgtggtgagtcataggcagcaaaagacagacgatagaagacaaataagagaacagaccaatggtctctcgggcactgcttcgtcctcctccactagaagccttgattccgtactttgcgaggtaggtccaatcagcgtgactgggtcgagggtagagatcagtctcggcgtaatcatgaggtcgctgatctttgttctggacgagaagaccgatgggcgttccgagcgtcactccgttctcgacaccggactggattcgaacgagatcaaactcgtttcgctaacaaagttgtattaaggtatttagtatggaggttagaaggagcaatggagagagtgatagaaggaaaaaaaattattgaagagaatgttcaccaaaaaaaaatggtcagccttctggagggctcagaaagagaaaaggagctgaacgaacaggggtagagatatcactctgtccgggtctccttcgagaaagctggatctggatatcttcggcggtgagggtaagaccctatgaatgaagacattgaacgtttgcgcaacccgagagatcattgagagaaacaacaagagtacagtcgatcggtgatcagtagcagaagaagagcgaaggttgatcgaaatcacagtaaaagacaagactcaccggagggacaccatcgacaatggcaccgaccgaggcgcagtgggactctccgtaggtatgaactctgtactgggatccgaacgtggacattgtgtgtgtatatgtgagctagtagcgagctgcttcaaagggattgggatctgagggatgatgttcgggctgaaagagcggaagggaaagttggaaaatgaaaaagaggcagcgtatgaagatcgcttacgtaagctcgtattccccagcagacaagatcttcatccatcagctagctaccccgctaccagccgactagccagctaccaatttgccatccgacaacaccagagacatcatggcctccagctcagcaacccttctgttgcctccgagaccgcagattgaacactcctggacaccctcagcgtatactcagccggcgaagcctccaccgcaggacgagcgagctcagagcgcgtttcaagcagagaccgcgttccgagcagcaaactcggatggcttcaacaaccacagagatcactcgaacgggccgaaaaaacttcgagcaagaaggacgattgattactttggagagtttgcaaaatggtcaacggtttgtttggatctttctgttctcttcgttcgctcttttgcatgcatcagggaaggatcggctgttctgctctgttggaaaccatgcacaatggataatcctgacgttggaatgatgttggatttaatcaggttcgaaagattcgaccaaacccacattacaccccttactcacgtccagatcccgaatttataatagatgtgtgtatctatttgcgtctattcttgccattgtttccatcaacgcgctcgtcttgcatactgatcaagtctcgttgggtttcgctcaaacgtttcacaaaaagcttcttccgccagcagcgtactctgggaactcatcgacctcgctttgtgaaaagttcgttcattctagtgtgaacaagattcggagtccagtgaatgtcgtcaaggttagtcgttcctttttgtggtgtccatcggctgggtggtctgcttttgcagagagtatggattcatatctgatccatttccacttgctcgtctctttctgcggtcgaccgtttcgattgcccataaattagtggacaccagaaggacgtcgtgtactgacaggtgcacagagcggagagttcacgttatggaacggtctagccttcaatttcgagacgattcttcaagcacacgatacacccattcgagctgtcgcttggtcccactcgtctcggtatcttctttcgtccgaggattccggccagatcaagtatttccagtcaaacatgaataatcttgccgctcttcctggacatgccgggcattcatgccgaggtttggcctttgcggctggtgacgaaaagtttgtaagcgccggtgacgatggttatatccgaatctgggctttcgaggagaggaggcaagagagaggctggcgaggttggttttactgtctcgtttcaagtctttctttctcgtctattttgtttctgatgtcctctttctcgattacacacaggtcacggacaggacgtacgttgtgtagattggcatcctacaaaaggactgatcgtgtctggctcgacggacgacaaggtttccttctgggatcctagatcaggccaggctttagcatcgtatgtctcttccagtttcttttctctttctcttaaaaacagacaaagaagggaaagatcgaagaggaaaagaaagaaaagacgtttattgacactcgcccatatcgctcttagttatcttcataagaactctgtactagcttgtcagtggaacccgaacggaaacttagtagccaccgcgtcaagggacaccagtgtccgtgtatttgatatccggacgttcaaggaactcgaggtcttccaggggcacaagaaggacgtcgcttgtaagtggtaacgttgagaaacttccttcaaagtgttcttcctttgagacagtagatgagttgaccgagatctctttcttctcatcttgaagccctggcgtggcatccaatccatcacgatctgttggcatctggtgattttggaggaacgattcttcagtggacactttcccacccccagccgcgagtgacgatcgagaacgcgcacgattcgcaggtgtggtctctcgattggcatccgctcggtcattgtctcgcttccggctcgaacgattataccacccgtttctggtgtaggtctcgaccggccgatgaagatccgagtaacggacaggcagcaggctacggaggaggtggaggcctgggtggaggagcttacaacagagtgttggcttcagaggcggcggctgagaaggtcaaacggatggcggaagaagccagagcaaagatagcggctgctaaactcgaacaacgtatgttttctttcctcatattgtttgtctgtactgttccggtttgatgtcacattgaactgacagagatcatgttggttgacatggaccatactaaatgcatacacacagacgaagtattctcactgccgggactttcctcttcaggccataactctgcctatcctccgttacccagtacattccctccagggttcaaccagatgaacacgggcgagcccgaatctctgcccgggttcggtgctccttcgggtgatgctcttagcgccggtggaggaagaagggagattgattattcaatcggtggaacttcatggagtcaacagcaacagcagcgacagaaacctgccggcttcccacaagcccataatcagggtcgacagcaaggattcaacaacttttctggtggaaacaatatcggcggaaacaactacgctaaccaacccccaccaccacaatcgaccaccggtggtagcggcggctttgggaccgctaagggtgggttcgaacagacatttaacccgaactacagaccgaataacaatcctaatctgggcgtcaacaacaatggcgccaaccaaggatacccgccaggaccaggtttcaatcccaactcgaatcccaacaatccattggctggaggaggagcaggtggtatgttgccttacggaggtaaccgaaaacctgggcctggcccgggtcagaatcagaatcaaaaccaagcctcgggaacagggatgggaatgaatgcaggatgggattcatcgactaacaatggccctaacaatgcatttaacaacgctcccaacagcacattgaacaatggttctaatttcaacaacaatttcaacaacaacaacaacagaaggggaggaccaaatgggctcgggaacggaaatggggctggcttcggaactagagggagaggtcaaagaggaaggggcagagggcgaggtaattggggtggaggagagtaggaagcacactgatggtcgagaggaaagtaaagaggagagctcttagaacgaaacattgtttttagtattcatgtactttattctcattctcgctttccattttctttggcgtaaaacttgagacctcgaaaccaagaagacacggatgccaaatcgagttttcctgattttttgattccaattcttgttattgatacaaaatgtatatcgtttcgttccatttgtccttttttcttccttctccttttcttcttctttccctattctctctacattgtagaggcgtcgacctaagtctactgcccgaacgatcctccggcctgagctgcaccacccatggtctgcattcgctctccgacctgattgattcgagtgaatatagaaaaagtgggaaatgagaaagagggccgagcatgttgatcgatctagaactggagtgagaatgtggacatacctttgcgttgacctcaaagaactttgcaacgcatctgtggagggagagaaaaggaagaaatgagtattcggtagaaaaatatagagaaaagaaacgacagagaaagagctcaccgatcgatacacacaccctcacccttgttgagatcgggctcggcgtacttttccgagatgcatttactgtggcaggacctggagaagaggaagggaagaatggttaaggtcctatcggaagacgtacgatactaagtacatgcacacacctgacgatacgatcaaagatgtcagagatcatactgagctctgcctctgccatctcaatctgctgagggttgatggacccactgggggctagagagcaagcagagagtaaggagagacaagagatgagagtaattagctgatagaagccaggatgtcgcttgaaagttggccaaagctgagggtttgcaaatgtaagaggagaaaaaaagaagggagagaacatagagaagaaagccaagacacaccctgaggagctcgaccaaagaaagactgctcaaagttgtgaagtccctcatatcagtaaaaggactggaggaaggcaaaggagatcggagactgtaccattgctagtttaggatgaggacgtagggtgagggtgtatggtttgaaaggatgagcaagcgagttgaccgtctggatggcacaggcggacagagtcacacggggaagggggatggagcacggaggaacggcggcacgtggtccaactggtaacttttgggtgcatgcacagctttcgtgcctgaaaacattactctgccgccctcgagagccctgattactgctcttgttcctgactatattcccgttcctgtgcctgatcacacctcaagtcacacccacatggttacgccctcgataaggctccctgtcgtctcttttctcccaacatccagacatacactctcacatcctccctcgttcatcctcgtcagcctatcgtttgaatctcctggatcctcatcaaccttgtcgtcctcgtcgtggctgtcgtaatcatcttcgccgtcgtttgcatcttgtttataagctcgtccgaccgctggccttttcgccccgttggcccttctgtgttcaaactcttggcctcatctctttttcctcaacaatctcgttcaaccctttttttcctccctcttgccttcaatcacccaaggtctccctcgtctacttttcttctctctttctctctcactctcctttccggcataggctccttcgttcttgacttggctctcggctctccctcaataattctttccatcgcaaaagagagagaaacatacacacacacacccctcacacacgcagataaaagcgcatattcgatcttctaaacatctagactcgttatgaaaggactcaagaaagcgatggtcagtcctcatctctctcttcatctgtctacaccatctccgtcaggcctctcgccgaaagaagtcacctgtaaggaaggacagaaaaaaagtagagaagagaagagaaaaaaatatacgagttccaagaaagatcaactctctccccttttcttctcatccgctcttccccatcgctccatcttcacggaagccttgtgcttgtttcattcttgacatcgattcctacacgtcttgccttcttcttctccttcttctttcagagcgagacgttcatctgactgacccgatcttttgtttcttctgccttcgctgcctgtgctgtccttcctctccctctccctctccctctccctcctccacccgtgctcatttaaccactcacccttagctctcacggagcaagagttcgacgagtgattcaaaaaagaatgccgtgcctgccaccacctctacctcatccttccaggctgctccctcaaacggcacaaaatcacagacgatcccgatcaacacgtccaactcgaccccggcccaaacatcgctctcgaacctcgtcggggcaacaagcctgtcgtcttccccagccaatagatcatctccgtcgtctccaaaccagtcaacacctctcacccctgacagaaagatgcagccatcccacggaccggacaagacctcgcctgccccgcccgtcgttgtcacagcgatggagatgccacaggatccgcttgttccccacggatccggcgcccgatcaatgtctcccggagccgacttggaggctactcccccaaaaagtggtgcgttgggaagactaagaaatggtgtaggcccaaaggacatgatccctgtgatcggcggcaaggcacccagaaagcaacggagcagttggttccattcggcagaacgagttgaattggaacaactccctggtttccacggtacgttcaggagtatttctccagtgttgtttctatcattctccccttctcttcttcttcctcttcctttttctcaaattctcttctctttcttccctctctgttacattcctacccaaacacacatgctcacacattctttcttcttggtcgtactcaaacagaggtcccggctggcgagcgatccgagttgtttatccacaaacttcagcaatgctcggtcgtcttcaatttcaacgatcccaatggcgatctccaaggaaaagaaatcaagggtcaaactctccacgagctcctcgagtatatcaccaccaccagaggtcaaattgccgaagagatctatcctgaggtcgtctccatggtaagttcaattcactctcatgtcttctcttccttgacatccaccgttgacttcgttccgtctgtctttcagtttgcatcgaatctgttccgttcaatcccacctcaggtgaatccgacaggcgacgcattcgacccagaagaagacgagcccgtactcgaactagcttggccccatcttcagatcgtctatgaattcttccttcgctttgtagagtccccagatttcaacaccaacaccgccaaaaagtacattgaccagtccttcgtcctccaggttcgtctccgtttttcttttcttgatccgtgtgtgaacgttcaagttcgtgtacacgtcagccagaataatcaggctaattgattcatgggtgtatgcgtccgtctacctggctattctagctcttggatttattcgacagtgaagatccccgagaaagagattttctcaagacgacgctgcaccgaatttatggaaagtttcttaatctacgagccttcatccgtcggtccatcaacaacgtcttttttgccttcatatacgagactgagcgacacaacgggattgccgagctactcgagattcttggttctatcatcaatggtttcgcccttccactcaaggaggaacacaaaacgttcctcactagggtactcatcccgctacacaaagcaaagtccctcgcactctaccatccccagctggcgtactgtgttgttcagttcctcgagaaggacgcgacgttgactgaagaagtcctactcggtctcttaaggtattggccgaaagtcaactccccgaaagaggtcatgttccttaacgaggttgaagagatccttgacgtcatcgaggctgttgaattccaaaagatccaaatcccgttgttccagcagctcgcccgatgtgtaaactctcaacatttccaggtggccgaacgtgcgctttattattggaacaacgagtacatcgtcaacctcatgggtgacaacatctcggtcatcctccctatcgtcttccccgcgctctaccaaaactcgaaatctcattggaaccggtgagtgataagagattctgatttattcgtttacatttagcgttcagctctactcaccaccatttggccttttctttctatgtaaccagtactattcatggcatggtctataacgctctgaaactgttcatggagatcaatccgacgctgttcaatcagtgctctgaaaatttcaagatcgcccgtcaacagtgagttcctatcgtagtctactaattcaatctacgcttttcatctcaatcgctgaccccatatgaccttttgcagagaacggaaaaagatacagaccagatatgatgaatgggagtctctccgagacgccgctattcaaaatagggaagcttcaggcgcgaccggtccgctaccgaaagcgttgacagcgccggctcctcccagaccggcaccagcagaggaagaagatatgacagacgtctcgatggaacttcagaacaatatcggtatggattctttcgccagtgacggtggtttgggaggtgccccattccaattggaatctatccctgtcgaccgaacggagatggtcccgcagggtgagcacgaggattttggattatcaccgacgacagcagctgcagcggcctcgacgagtcccggtggtccgcacgtgcgtagaaaaagcgccttgccccgtatgtacctcctttttgcccgtctcgatcgtactgttccagtttgtgactga

SEQ ID NO: 2160 - DNA, 23584 bp, Xanthophyllomyces dendrorhous
gcttcccactttgactttcccagttgaccctcaagtcttacgtgacttgagagcccatcggtctctcgagaatgatttaggtgcacctgttcgaactcttagtgataattaatcgcctgaggggggtcttgtccctttcttcttgtggtacctcgacacttttccttctcagagtccctgatctttttgttttatcctttctcaatcaaattccccgtcgtccttccgggtcggctttgtctgcttttcgtaatatctcttccttctttcattcttgatcaatcttgccgccggcctgtttgtttatgctcgtgtctatagccccaatatgtttcatcactttcttctctccgtgtgtgttccttctcacatcccgttttttttttacttttctttcgccttttgacaatccaacgtttacgctctatcgtttggtcaatcgccggcagagtgaaccgctctgtagcccatctattcgttctttttctcctctgtttctatctccttttctctggccctggatctctgctgttttctggagttcaaagctgaaagagaaaagtctcgaaatctcaaatttccccgttctaatctcataatacctcttccttcctcccgccttctcttttgtcttcatctttatctctgttttgcatctccccctcttctgaacccctttcttttctgttcactcttgacttttcttctttaacttcatcacttcactttccttttctcccgagttcatgatggctctcattcggcttctttactttggtccgtttttggaagatataagattccttttttgtatactccttctgcgttttcacttttgtgtgtctgtttgaccggctagttttgagtgtttctcatcatctgtgccatcaggtggtctttcccaggtagatcattggagctgacagtcagactggcattcaactcaaacttcaactctttacccagacgcaaacatagatatgaccatggacatcgactgttctctttacacctcttccttttcatctatctattaaaaaattgctctgaaactttcttttgttccctggtctgatctgatctgatgttggccgttctattgtaatgtactcgtttcgttccaccccggctttcggaaattcgaatccgggttccgatcttacgcagccgatacatcttagatatctagtttcacatccgagacattcgaaccgcccggggggtcaataaatctacgaaagcggagaagggaaagggatcaagtatctggaagatgggtgggtgaacggaggttagtccagctcagggagaagatcccgagcccatcggatgactttgggatgtgcgcggactctgtcgaattttggatgttcaattagttatccgaaggaaagtaccttgaatgggtaaaaagaaacggagaggacgggaaagaaagcgaacgtacttgtcaatgttgaaattcagcacctgaggaaatcgagccagatcaagtcatcagacacccgttagtgatcggtcccgaaagtcttcgatctcgatcttctacaggataaacaaaggatcagaaggacaagaaagaaaggaaactgacttgtaaacgctgtagagagacgcatctgcttataccgacgtacgcctgccctttctcaaacgtcctgtccaggtcaatctttagatctgtcaatgtcattccttgacttttgtggattgagagcgcccatccttcagtttttccgatcgagcgcagaaaaggaaaagacgtataaacaaaaagaagcagagagttcacgtattggagttagggttagggttggtacttatatagatgtagttgaagtttcttgcactcaccgagcatcagagggatttggactcttgtggcctcaacataagtccgcccactcggcccaaagctcgattgttcctcgaaccggaatgaaggaatcagcagtgtttctgtgtcaaactatcattttaaattagaaagaaaacatggtcactcagtttctaaaacacccatttgtcatcccttcagacgaagtttcacttgaattaaagttaggctcaccttgatgaccggaaatactttgggtacctttccgacagttggaaggggcaccgttatttccaatggatctctgccatcggatcctcggatggtctgctcagcaatccttatgtttttccgacgggcagtttctaggttcagaaactgaaccacggagcctgtagagccattgaccaagttagggtgatctttcctatatcgcgcatgcgcggtaagaaaaaagaaaggaaaaaggcaagacagatatcagtcgaaagctcgtgagcgttcgggcttgtggtaaacatcctaacccaaggttcactagaagcatcactctcgctccgactttcaactcgactgtatcagccgccctacaagctcttaatgctattcgaacccgctcaggttcgaccttctttcccgatggagtacagcctggatagtcaatcgccggatatttgatcagggctcccgttaaggaacctaagcggagagtgttcgcccgagtgacttgagaacgggtgggatacctaattagattgcggtattgttagatctactcatcattcgcccgttctatagaggaataagaagacacacagttctgtcaatgctcggccttcaggcgctctagaaagtcctgtgagtaactttatgctgttctcatcaagccgatcaatccgcatttggtcttcaaatcaaagaagaaggatgtcaagtcacagcgtttgtcgcgtagttcaccgatctcacagtaaggcaggtaaacaccgtcagactcactcagcacgttgacaaagttctcgtctttttgtctaaatactttcttcagcataacaacgttgttcacacattcactccaagagctagcttcaaacgcgaacgtcgcattctgtcctttgttagctacaggaggaagctgaaagaagtcacccaacagaaccagctgaagggaaaacaatagaattggtcgtcagttcaacgttgaagtttgaaactgataagacaacagagttttcgatacctgtatgcctccctaaaagttttattatgccccggtcaaaaacgacaaaaagatgatgttcaagcttgcggatcaatatctcgctctcagcgagcgcgtattcaaacatgcgccgatcaagatgatcaagtggagcactcacgaagggattctcattctttcgtgcgtttctagctatatactcaagcttgtcgaactgaagtcaaagtatccttgcccagggaatgaatagaagagactacgagtaggattcggataagtttagtcacataccagtaccccatccaacatgctcagttcgtcctgatgtaagcgccaaaccgaaaataaaaacaactttgtcagggccctaaagcacacgcgacctttcagatatacaatcatgcactcactatgacaagaatatcaacctctctccaacggtctagcgcaaaacttgttattggcggatttctctctacccatgtaccttgatccttgtcccatgtcaacttggcaattgctcgatacagagcttcagcaggcagttgaccttgaccaatacctgcccatgagtgaatagtttgacctggagaagaacgggttgggagggtttgagtgaagattttattaaaagccaacagaacaaatgtttttggacgaaccttgaagtggaagagcagcaattccagtcgtagcagtgatggctgcaatgaaatgcattaatcaacagaggacactcagctgttcagcaagaagaagcctgatgaagcggtatctttctgatcttcttgcatcggagaagtgaaaatctgattacatacctatcgattgcccacgatcttgaagctgtcggataatctctttcaaaaggaatgactttcctgtacctataatccaagatgtagacaaacattaacgatgttgaacgaaactgtgacgaattcaaagtccaacaaggattgctaaaaagatgcacgcacctgccggtcccgaaaaaaatactgattctccgtccaatactaatcgaagtacatcgcgctgctcagaacttagtttgctttgcagcgcttccgattcatctgtcaaggtaaggtcgcacaaagacaaggaaggcgaaggagaaagctcataggtagctgatgttgaggagattatcggctcgaaagaggatgaaggtatgggtagacttgacgatgaagatgtctgatgagatttgcgaaacaacgaagaagcggaccatagcatatgttatcaagtatcaagtcgctcgtcgatgaaaggagtctcctcactgtttggatatcataagagcttattctagtcaagcttgaagtatctttgtgcgtagacgacgaagggttcgtcagatatatagaagacggaggctcctcctcatctatgggaccattcgattggcttctctcgtttctcttccttcgaagcgtctctgtacccttccggcttgtcttggcagcgtcagacttttgacgaggcgtgacagtgttgggttccatatttaaagcgagttccaaaaacgaggatatgagcgtagaataggtggaagaaattcgttccaccggctgtgaggacaaaggggtggagtgaaaggagctgcccattgtctgagctgagctgggtaagctgcttgatggcttttggttcaagtaaagaacaacggaacgaaacatcagtcataatatatgcatatgaagtgaatcatatctctacactcacaggttgatcgtattgggacatgagcagttcgatctcctcgctctccaggtcatcaaactcgtcgtcagagtcgatcgcatcatcggtgatttttaacttgtctgactggtccactgaccgacattctttcgaattagttgtgcgagtgagagattcagttgaattaaggacgacaggtagtcggtctgtctttggtatcacaggaaccctcaaggattgtttgtgagctgccatttgaaaaagaggagaggactcgatggacgatgatgatggatacaagaaatataaatcaggcacgtcgtaatcttatctacacaagtggagattatttcttcggacgcgtttgcgtgcgtatgtagaagtgaattatgcccatcaccaccatcaatgtctacatacgaaggtatccttccttgacttcgtttctttgtcgtgtcttattgttactgatgaactgtttgttttcatgatcagacgatcatccaagtactgccaatccggagatagagagtccagggttctctttagatgatattctggacgagctccaggcgacgggaggagaaggcatcttcttagttgattctcaaggtctgtcatacagcaatctgcgaccaggaacaccttccacggtagatagctcatcaaggacatgcttgtgtacgtaccgattcttgttcttagggcgaagaatcgtcggagaaggtctggtggaagcaatggctggtacgcttggaaggtaaggttgtagtctatcattcgtccatgccagatccattgcctcaagcctcttggtcatcatatacagaattcatggtggagcttccgacaagtatatatcatccctaccatcgcttaccagtcaagatatatcaagcacaacgggtttgttcgagacaatctcagttgtctacccgtcgacgccgaactgattgtattctcgtttttcttaatgtagacgatgcctgtgcaatttgccaaacgccgtataaaatcttacttcacgagtatgtagtttccaaacatgtatcattcgttacaagcagaagcccgaactagattctctgtgaaaaacatgtcaacccgatgtcgatcatcatatttcctcttgattataaaactcagagaagagcttaatctagcacttgattcaccggccgtgtcaaccgataatcttggaattgtacaaattggatcggagtgccgtcatttcttctgtagaagagacgccgctcaatggctagcaaaagtgatttgaactttcttgttctacttactcgaacccaacgtgttgtttaattactatttgcttctcttttctgacaaacagtccaattcatgtcctctctgcaggaaaaaatgcgatctatcggtcgaaactccatccacatcctccacaacgggtaccccaggtacagctcctcctaacgtcttgccggccgatcctcgtcaagaagcacaagatcttttagcttcgcttttttctggtagcttttcaactcccgcgccgcctacagatgcttctgcagctagggaagaggaagacacaagttttatgtcgatgtatggttagggagaggtttaaaccgtgacagtaggagcttgatccgtgatgtatggttactttgtaatcgactgtctgtattatgtgaatgagaaatcagacagaagaatccagacctgccttgaagaagcttaaggggggaaaggattacgcatacacccgcccagaagattggcttaatcacaaacaagacatgaaactgagagatgaaaaaatgtcataacagtacggaaaaaatatgaaattgaagtaaggtcgtgaaacaagaacacacaagcgtaggtagacgttaatgtggtgattaggaggagaatacaagcatacagaacataagtcatgaacggtcaagaaaaacaagacgaagggaaggaagaaagacaagcacggctggactagcacaacagaaaggaacacagaaagaagaaaaaaaacacgataagacactacatcataacatctaattctttggtaggaccatcgtctcccaataaggtctccatgcttgaatcggcctcgtcatgaaacgacttgtcctcttcgggcgctgttccgcttggctgaaagactgagtgaggagacagagacttaatagtactagatgtggataccaatccatcggagattgagaggttgctgtctctttcgtcagaagatgagacgcgcgtaggggatgtggcttggtcaacatccgatgaatacttcgagaaatttgtgaggatctcagaagaggaactgcacaatggaagccgccccggtacaaaaggtcttggatccgagctcgcgctaagcatatctttgtggattggagctgaaagtccagcaccaggcgcagactcatcctcatttgtcagagaagatgcattggaaaaggagctttgttgcgatgagagacgttggatagaggatggggggaaagctagaggtcggagaatgggattgtcgtcttgcactactgtgtcaatgatatccgacggctattgagaaaagtgaaagaagaaacatgataggagattagcgcatgatgaaacaataccttctcttttcggccgatacatgaacaacatactagaggagagcaaacgtgattgaattttttcgaatgacctatcaaaagattatcacagacaagcaaaggacgacacagattagtagcaggaagatgaacttgaaaaagccgtggcagattcacctgcattgccctgtctaaagcactgccttccattcttgcaatctggtttctctcgaacagccttttcgagctcttcgaatactgtaggtctcaaacgcgcccaccattcgtatagaccacatctaagacatcggaaagaaacatacgttaaggacgtaccagcctcaagcatgctcaaagacaagtgatgctcacgcgattaagtcatccacacagctttggcaagtcctgacaattgacttgtcctcggacagatttgaatggattccttcatcaactcgacggaagatacctctgatgcctcctgaatctttaccctgatcgctccgaagccacgctagaatgtcagaatggacacgggcgggtgtgatagacggtgtgtccgatatatactctgcatagaagactggtgtcagttgggacacaaatgtgtacttgaccttgtagaataaaaaatactaacctcccaaaattcttaattcctctagataaagagttccaaaaggcgaaaagttcagtcaacaatccgtccaaatattgaagatgtaagatgacaaattggaacaaacctgtgttatctctaaatgcgttcaatagctcgtcactctgaggatcaaatattccatccgcaaatgagtggttatctctgccccaagaagagccaggactagacattgaaagcaatgaaggtgagcaacttcgggaagagccgcaatacctagaagataagaaaaaagctgggcatcaacatggttctggtcaacttgacgatacgtgtgacttacccgtcttcgcaaattgaacactgcgcggcaacaggagagccagtggctgtcagtcgggagcacgaagagcacgtgaagtgtccgtcaggacacgctataagggagaaatcatcagaaacaggaacggcggatgaaagaagaaaactgaaatataactgacgtccgtctagaggatacagttgtccgcctgaatcgatggtagatatcttgacgaaattcgagaagggagatgagctgagccggatcaagtcgatcatcgaagagtgcgtacgtacaggtaccggacaggcccaaccatacggattgttaggcatacagtatctgcaaggcctataaatctcggtcggccgatgaacggaaaatggagaaggagggcatccaaactgaaaagagtcaaacgatcagtatgcgctcgatcttttaatctcaaataatgagcagacgcactccaaagatatctccatgtttccatatctgatcggcctggtccatttcgttttgagttctagccttctcaggcgcatgtctataaagagaatagaaatacacaagtcggttcatcaccccagctgacaaacgagattgataggtgaaggtactaacgtaactaagacgtttactagacctgatagaacacgagagaatgtggctgagctggctgccgtccgacaagaaggacagctgtaaggagtcggctgggtagactttgttttgccatataatagagtgtgtaaatgagccatcgattatatgcggtcaatatgtcaattaatcctgaggtgaccgaccttcaagtatgagcagagacaagaagaacagaaggcatggccacaagggtgaattgtgaccggcttgaatgaatgacatcaaattagtgatcagtccaagttgagattgttacatgatgaaatgctttcatgcgatccggagttggctgcctattgccaggatcggtatccggtccttgagagatgactcgcttactttgtataggatagcagcacagattccacaccagagctcgctttcaacgtcttcaatgaacttgtggtactttgagtgttccggaggttgatcctgagcgatggtaggatgttcctggacaaaatttgtcttctcggcgttgttcacgataaaagtggcctttcctttccccttgtcctttgcgctgttgctactaatcgatgcatccagctcattctcgatactatcagccttgataccagaacaaccttcttctctgctgcagaccgacaagtcagaggtcgaggactgagaaggtttgagcttcttgagctcggattcggaggatgactcgtctgcgctagttcgagcgaagggtgacaagacgactgccgataagccgacaaaatcttggtctaacggccgcttgagctcaagaggcatggtaagaggatataagagcgcaaagcgaatgagtatagaggggtgcgtggatgagtgagtctgtatgtacaggacggatagtccaagacaagaggttggagagagatggatgtcaaggataaaaaagggtggtaagaggtgaacaaagagactgtctctgaatgaatcgagtgccgggttgagatggttatcgccactggggatttcggctcaaaaaggggtaaccgtcccaggcgtttcacccggcacctacatcccggccgccaacccagtttaccagccagacgtattggatctgattcttgatatccttctcttgagcatctcggtttctgatagataaatacaaacacaaacgccagctatatcatggctccatctacacagcttcaaccaccgtcaataagccatagatcatcttctcagaccgcgtctcgaaatcccatctctcttcgactttacaaagtcctcgcttcctcattcgatgatccatcttccagggaagctttagaggctgtatcctcttactacaatgtcccagcaccctctcaaaaaagttcctcgatagcagacgggtctcttgttgctagcgaaggagagataggcccagatggggtcgtcgaaggagctgcagctcgggctcgaaaaggtcttcgcagggacggagagctccggttggcagaaggcagcaaaaagttcctcgacgcatttggagaggtcgaccaggttagtttggaactatttgtgctcatttcgggacattgattagtgattgttggtcgtcactttgatattcacgtccttcccgctctgtcttcaacacaatcaatggatgtagaaactagatgctttgcagcgacatatattagagatgcatactcgttgcgatgatgtacaagccaagttggaagatgctagcagtggaacacaattccttttggagcgtgctgaaggcctgagggagcagaggtatcttctttcttgttcattttttttccttttcaacagaggagaatgtaccaacacccttcacattacttttacctctagagcgacgacccaacttcgatcgacaatcatcaatcttttcctttcacgttttacgctctctcattcagaaatcgaaaccctcacgtctagagatgttcctcttggtcccagcctgttcctcgcgatggatcgagccctcagtatcaggaaggactgtcagtcgctattaagcggcgagggaagcgggacgacggccgggtcagtcaaccttttctgcttgtgttaggcaacgagctcaagcttatcaagattttgtaacaccaaaatgaactagtgaggatattatgaaatccacgtcgcaatacctcgaggcagcctaccataagatctttagatgggtcacgtgggagttcagacagttcgtgcgtgaggctcaactcgaggttggccaaactcttcgagaagctgtgaagagattacgtgaccgaaaagtcctgcttgagtgagtaccttgtagcttcaagattcgatttggaaatgttcaagttacacgactgaaccttgacgcggtctgctctctctagtgaggcactgttgactctaagcacgcttcgacagtcatctcttctggcattgttcactgaggctttgacccggggaggaccctcagggctgcctcgaccaatcgaactccacgcgcacgatcctcaacgatatgtgggcgacatgctcgcttggatccatcagtcaaccgcaaatgagcgggaatttctcgagagtttgtttggggttggacgggacggacggatgattggaagtacgagagcgccaaacggaaatgtaggaggagatgaggaacggctagtgaggacgatgctggatagagatatggaaagttgctgtcggccgttgagggtgagtgtgtctcccccagatttacttctgacaagacttctcatctgatcagattgcttcgtttggatgcgtcaatcagattcggatccaacacgccatcaaatcccaagagggagtcatcacgtcctacaaagtcgtcaaccttctccaattctatttagtcactatgaagcgaacgctaggagatgatgctttgctgacaaagacgctggaggacatttttaaagtgtcttacaaatcgttctttgacactctggatgcaagaggacggtccctcctgcgattccttcatgtgagttgatatgtctctaacttgcaaaggtcctctgctcaacatttcacgtctcacatcttggttattgactctcacaggccccagacgccgatttgtcgccgcctccggctctccggaacgcgacacaggttttaagagaaattatgtcagtgtacgaatcaaatctgctggatgtgttgccagaacaatcgtctctatcgaaagagaacggagtggatgaggatgagacggactttgagaggattctcgatgccgctgtcgatccacctttggagatgtgcaaacggatggccgataggaggacacctgcgccagggcagaccgatcgtgatgtcgagtgggacaaggctgtcttccttatcaactgtgttggatatctcgaggttggttcctccttcgttttctgtatgcgcgtccgataggcgagagctcacgatcgattgtccaaaaccctccaaattatacagcacgtgttggagtctttcagctttacgacagctcgagtcaagctattacaaaaccagatggaaagacatatcaagtatttaacggacgaacacgtaggtccttacacattcatttatcatattgccctcccagaaaaagaacgaaaagaaaaaatatgagatttctgacaataaatccggttatacatcagtttgagaaatgtctcgaagatagcgggttaagtggagtctacaaagctttgaaaggaaaagatgaggaggcaagtcttgtattatttctaaatttaaacagacaaaatatcaagacataggctgatcgaaagggttcaatgaacaaaattcagacggcactctcgcgtcttccagcagcaacaccgagcgcggttcagacttccttacagacgttccagacttacctccagacactggatgtgttgtcttgcgctcgacttgctctgctctcgtccacccaactaggatcggagatacacaaagaggcgctcggcagactggctgacgcatacagcgcgatctgggacgcagtgatgaacaaggagaaaaacagatacgagttccctgtgagcttgctaaggagaggtaaggacgaagtgagaatgctgctcgctgtggacggcaatgacggggctgagcttgccgagagaaacgaccagtaaagcaaataggaatgaatgattgtcaagtgagaaacacacaatagataagagcacgcacgtgacacgggcctgggctcttgggccttgtggtggaaagaaaggcctaccggctgcggttgtaaccagaacgtaaccgaaacgtaactaacgcgtcgtgcccgttttctcttgtcccttctttgtgtccgtcctaatcgccttctattccatcctcaccctcaaccctcacccgtttcctttgctctggccgtcgctgaaagaaagagagaaagaaagaaagacagaaatcagttcaaggccaatcctttctctttcacctcccgtctttcacctctattccttcggtttcacctctagtcgtccgacttgatctgttcgttcaacctttgcactttcttctttcctcatcccgccatctttccttgatcgttcccgcgtccgaatttgacccgacaacccaaacatacctcggtcctttcttctatctgttgtatcctactcttcttaattacccagggctgtcttctgtttctcatctctcgtcctcgaccgcccttctcctgcaaactgtcacgcacgagcctcggcatctcgtccccttaacttcccgttccctttatcacctcacgcttcaaactccaatagatcaaactattgtattagaaaagaaggaaaaaaaactcggctcagaaacaatcaagagaacgacaacatgtcctcccatcacgtctcatcctcctcaacctctagctctagcaatgtcgttggaactcactaccgagtcggtaagaaaatcggagaaggtagtttcggagtcatctttgaaggttcgttgattcgtcttcggtcccatccgtctgtttttgatcgtcatactctcgaccggcaagtctttttgtgctctttatgcaaaagctactctctgccacgactgtcattcaacttgtcattggaaaagaatcggacagagtgtcctgagcatctctgagccttcgatagaagatcgattgagctcaagcgtggatgttcgacagaagagaaagaaaaaaacgcctagtgcttttccttccggtcgctcgagttgcctatccgactctcctgtctagcatactctccttgtcccaagatatttttgatccttctagtctgcctcatctggctggctcggttttcagcatgatctactcgtttatctatgtgctgatctgttcgtctactatgattcgcatctgatgtgatccggtccgatcaggaacgaacctcctcaactcccagacgattgccatcaaattcgttcgtcctctgtctcctacttcccatctgaatcgagtcgttcaatttctgacccattggtcggcgtgtttgtctcgttctgtctttctcttctgtctgttcacgctcttccgacctcggctaaacaggaaccgcgtaaatctgacgcgcctcagttgagggatgagtatcggagttacaagattctgaatggctgccgtccgtctcctgttttgtttctctgtttctcttatcatccggacgtactggtcatcaatgcgtgatttttgacatctgatcttcttgaatcatcattagacggaatcccccaagtatactactttggaaacgagggactgcacaacatacttgtgatcgatttgctcggtccttcgcttgaagatctatttgatatgtgtggtcgaaaattcagcatcaagactgtggttatgacggccaagcagatggttcgcatctgttttatttatatatttctttccgtccgattggccttttctatttcgagcgtcgtcatgtaggctaatatatagactatgtaatctagctcactcgagtccaaactattcacgaaaagaatctcatctaccgggatatcaagccggacaactttctaatcggccgaccaggcaccaaaggtgccaataccgttcacgtcgtcgattttggaatggccaagcagtaccgagacccaaagactaaacgttcgcctctctttttcttcttcttctgtctcctgttagactagtactgatctcgtcaactcctctttttattgattatcttaaacacactctaaattttatttgttacatcttaactttttcacgttcaacaatggcgtgaatgatgatgtctttttgatacccgcgaaatcatcacaatagagcacatcccatacagagaacgaaagagtttgagtggaacggcgcgatacatgagtatcaatacccatctgggtcgaggttcgttcctttttcttccatttgtttgtcatgtctgacttgatggtctgaattttaaattgataaatgtggatccttctatagaacaatccaggagagatgatttagaggctcttgggcatgtcttcttctatttccttcggggagcaacgtacgtcgaggtctcttgatcattaacaagactagtctttcaacgcatgatgctgatcatttctcttcctcatcatggtcaaacatggccgtgtctgactcgactttctatagtggattgccttggcagggtctgaaggcggcaaccaacaagcaaaagtacgagaaaattggagaaaagaagcaatcgacgccgataaaggaattagttgaaggctaccctggtaagacccaagcttttcttacgtatcctgtctttggtcgaacaaaaatgtgtctaaaatacgtctgtcttcatcccctcctcttgacgtattgtacagacgagtttgcaatctacttgaactatgtacgaaaacttggcttcgaggagaccccggattacgatttcctccgtgagctcttcaccaaggcgctcaaaagcacgggagaggtggaagacggagtatacgactggatgctactgaatggaggaaaaggatgggaagctggctctgtaagttgaactcaattcctttcggctttctctttcttgagttctgaatccacacaatgcttaccttttgccttgagggcctgcttgtcttcagtcagcatccaacattctcgctcagtccgctgttaacgactctaggcagcacagaagtcggacagatcgagatcgtgacagagccgaaagggatcgggccagagcctctcaagctgctggtggcattagcacacctactcgtacgttcatcatttgtccgttcattcaggcttgttttctctactttctccatttgctgacgacgtcttttccgcctatagccgcactggctcggagtgcatcccagaacaaccgggctgcggctcttcgaaaatctgcccaggctcagcctgtcaatggatcaacccaagccatggtcggcgtcagcgcaccttcgtgagtcttgacttttcatttcacctgacattcatgttttctcttctcgcctttcctctttcgtctctgtcttttcatttcttcgctgtttgaggagtatcgttttataacaattaccgttttattccgtcttgtcgtacctattctatttgttcccgaatgttggctaacttcgtactcaagtcttgctcttgattccaatcatcacagctcacaagcacaccacccctatgccactggtaaggcttctatcatatcgttgatcttcttcaagtcgtccctgattcattgatttccatctgaaacaacagaaactcctcaaccgtcaacaccttattacgaaactcctgccgagcctgttagagcgacatcgtcccagccccagccgaccgcgcaagcatcgcccatgaatgccgggtaccaggaagatggtgttcagggggctactggcccgggagaacgacgatcgggatcgaagactaagagattcttctgctgctgttaattaaaagtggtccaaatgtcgtttataccatttcttttctctagaacgtcagagagagggagagtcaaaagacgtgaaattctccatttcctctaataatatcttctactctctctttcctccttctgcttttatttacctcttttttttctatatttagtcttcctttggatatctgtcactcttctttttctttcccatcgtgccttctttactctacacctggctatctaacacttgcctctctttctttgctcctcctctgctcggttgatgaggtgaactgaaatatttttcagaaagaaaaatcaaacataaaagagatcaaaggaaagagaacaaaacgaagagaagatcttttgacccagaatactctctctgttcttcccatcttcctcatctcctcaaggctttgttgaaccctaggtatcatggatcttcggtgatattaccttctccccttcgctctttctcctctttcccttccctctagtttctgctcgtttcggactgtctcgtagattgggttgaaccatatcctgtatgagtcctaatactgtgacaacaaaccttttcaatcaatcttaccaggaaagaagagcccgaaaagtctttgtatcgaaaagaaagagggcaatcgaaacaagggcatagaatatgattatcggctttctatattacatgcatgttgatagagtgagacacccgaagtgcagaaacttgtacaaatcaagagccggtatctgagatggacgtatcagatttaataagattataaaacagaacgcaaagagaaattagaaaggaaaggcaaacaagttttttttttgaaacgagaaaaagaggggaaactattctgcgaatgtgttggtatatgaacgtaatgcaagcttgggtgacccgaaacagggtatcgatgaatcattcatctcgggcctctggttctcttaatccttttctctggaagggaaaaccctatcaatgaacaggacacatatgcaagatattctcggactcaagactttcaaccgatcaccgttttctttccacctgggctctccaccatcacactccccgcctgtctttccatacggtcgatcatcgaccttggagccgattgagcggatggatcaatcgagagacccggcctcacgggattaccataagccgacctcgtcttgttgtgatgaaggtatgaagggggaggcagcgaacccgtgtttgattcaggactgtcaaacataggcggttcttccggcggatgtgaggacgaagatataggtataggagaagaagcagagtcggagaaaggatacgcggtcggtaaaggagaatctgcaatgtcaactgggctcgagacttcttgaaaatcatctgcactcgagcaagagccagccggctcgggctcggtcttcaacgggaacaaggattcatgggatggtgatggaaccgatgggacaccgtgatacaacgaagacgaaggtgaactagtgtattcgatcgggcttgttacctcttcaaactcatcaggcgcatctcgaaaagacgatggtgatgaaggacatggtgatgtcgacgcccggggtgatgccgtcaaaggagagtcagtggtaggatgttcttgggatgacgatccttcggttgacaatttatgttttggttgtaacgtcgaggatggagataaaacctcgtcgtttatcttaccgggttcttcacaaattggctgttgatcgtctgatattgagagagattcgaatggggtttcagccttctcgatttctttagaaggtgtgtcggaagaaatattcgctgaactgctgactggaatctttggtgatgatggctgactagaagatggtgtaagagaagaggtcgagctggagaaaactgagttgtagctgcctctttgagcccttatacttcgggctcgacttgtaagactttgaaatctgaagttcaacaggtttgcaaccaggatgatcagtgtttcgttttacgtaaggagcaaagtcttcgcaaccacttacttccgaacagctcggatgaccgcgctgaaaatacattgatgaagaatttagcatgacaagtcagtattcaataatcagaaaacgcgaaaagtcttgatacttacaaagctgaagagatgcttctgatggctcctctgacttcgtcagctgttggttcttctaccatgcgttcgggcgccaaattaacctcccgcgatggcatagagatcccgttcaaccaaggatgttcctggaacagtttgataaatcggttcatagacgaaaacaatatatgttagttctagctgtcctgaattctgtttgtacaagatcagcagacatgagaatcgagatgaaggaaagggacacatactcttatgtccggtatagttatcctcttggaggcatctttgtcgagcatccgatgaactagctctttctgttcataaggccaaccggcaggaagaaggaccctaccgcatgaagcaatcaagtgttgtaaaacaggtaatcgaacgatcatacacagaaagacaaagtaggatgagtgagttaccggtcgaacgatgcatgtacaaaataactcacggatcgtctcggatagcctggaatagatcgacaggattcgattgctcgaacggaagtcttccggttaacatacaatatagcgtgactcccaatgaccagactatgtaacaccaagtgacagaccaatcaacggtcaaatcagacgaaagatatttgagtgaagtcttgatttctattgacgtactatcgaaagctcgcgcgtgcacttctttctcggctgtatgaggagaaagaaagggaaggattaacttgcttggttatcatgtgcatactgtcgctcgctagcactcattgacaggcttacgtatgtaactttctggagctgcaaacaataaattcctgagatttgattagctttctattcctccttgacgaagattgatttggagcttgaaaacgaggagaaaattgagaactcacgcatgaaggctggacttcccgtccctttcttgattctgtcatcaccatccttacccccgaaccagtcggaaactccaaaatcgcacaactttgcaacctttcggtccaatgtaagcaatatattctccggtttgatcttttttgggttttgatttcaggcagacacgaggtcaagagagcacgacgaagaggtaagaagacatataccaaaaagaaaaccagagagtttcagagaggaccatgagaagagtgttcttacgtcgcgatgagccacatcgttctcgtgtagatattcactttagacgtggaagattaaaataacaagtaagcagacgtgtatcagagagctgccatcattcgtcctgcaaattatatagcaaactcacagtcccatcaatatctgactgaaatactctttggcatcctcgattgacatcagcgattctctagtgggcacgtccatcaatattcctcctggacaatattcaaggacctaatgcaagtcatgaagagcatagtatgatgaatatcgactcaagacaagaagagcagagtgaaaagagtgaatgactaaccatgaacaaaccatcagatagaggtacatcaatgacttcatataaatgaatgaggtttggatggtcgagctttttcatgatagcaacctataagggaatggacagagagcaaatcacgcatgtatgagcgatgtcaaatatcactgttgatatcgactcaaaagactgatgaaaagaaataagacttacctcccgagcgatcaacgataacggatttttcttccattcttcttccagatcatcaaagtttgatgagctgggactctgttctggtctgcctgctaagccacctcggtttcgacctcggtttgctaatgaacgttgtcgaacggcccgtcggagacgggcttttgagtattctttcaccgcctgggatgcgtgaaaagagatttcgggagtaaataagaaagaatacaaattcgagaggataatcgggtgatcagaacagatcgcgcacagagtcgatggatgaggatcacgaacaaaagaatcgcctgtctgaatattgatcccaagctcgacggtgccgtatgcccccttcccgagttccggtcccagttgatctgcccggcaggtcaaaatacatagaaaagtatagtcatgcttcagaagattgcgcatccgagttgaccacgtggacggccagatagtcgtcccccttaataaaaagaggtattctgaggttaaaacatacattgattgactatccgtcgaccatcgtccgatttggtcgcgacggcatctctggtttctctcaccctatttgatagaaatatatcaagatgttctaattttagtctacatatcactatgcgttatcgcagatggaagagacaagatggacggaccgatgttgactgctcggtctcctgcggtgacctcctttcaactcgtttgatggacgtgacggcgagttcaagcctgaatcagccccctcatggtctaaatcaaatgagttcagacgagatgagggactgttcatgggcggagtcgaagaaggtgtcgatgaggatgggttgagaaaggacgatgatgttgagctcggcgagtctatggacatggtttcccgggtcgacagagcttgaggaggagatatgataagatcttgatccttatgatctgtgtctgtgtttaaatgtttgcacggtcttggttctgagtatgatgtgagatggagtaggatatgtgtgggtgtgggtgaaggtctgatcgatggacgcggtgatgaggcagggaccgccaggaacggtatcaggaatagaaccaggaacggaaccaggaacaggaataaaaaatcaggaacagccagatagatacgaaagtcggcccaagcgcatggaaaaacacgcgaaaaaagagccaaaaatgatatgaaagacggctgctgcgcatctgagcggaagatagcttccattcatttatgattcaaatatcctagacagctaatcttctcctaccgctcttcctcggtctctctatcaaactaccaacactgaccaagctctcatcagtattagaagcgctttctctcatcagttagccctcaccgtctctattcgaacatggacgactacgacagacaggcagagcaggatttcttagagacttatggttcgttttcgatgttcatctatcgtttttccaagtctatctacttctttgtcctgtagacctccgtacccgtggttgtttcctttgtcggatcgcttcaaaatgaatcagttttgattgaaaacaagctcatcttttgtgttgtcttttgatatctctcgtttttgctctgctcgttgcttctcgttcctcacgatatcatcctatcgtcgtctcctaaaagcctcgagctcacaagctagctctggtcagaccagcacgctcacttggattgtaagcttagcatcccttttttttcaagtcttcttgtccgtttgatcattatttgaacgacaagcagactcgtaagcaagggggtttcatccggattcacatttttcttgattaatttctcctcagacttggttctgctcccttcccggacacgagtatttctgtgaagtagccgaggacttcatcgaagatgacttcaacctgacaggtgcgtaccttctaccagtgctttcatcttctccttattaaggagatcgcagcttgcctagatgtatagaactctcggttccacgctctttcatggacgtcacgactgacagcgtacacaattcacttacatcaggccttcagagcatggttccgttctggaaggaagctttggaaatggtgctcgacgtcgagcctggtaggtcttctcttaggtttccctctatcgaatgtttcgtcgccttctcttatcggagaatcatcgtttttcgtgtcattcaacagaggaggactccctcaagatcccggacgtgtccatcattgagtcttccgccgagttgctctacggactcgtccatcaacgatacattcttacccgacagggtttgcaatctatggttcgctcttcttcctatttgtctaattacaagagcaaccagttaacggcctatcggtccgaaactcgtttttgatcgtgtaatagtctatcaagacattcggtgcgtgcccacgagtccactgccatgcgaccgccgttgtcccctgtggtcgatccgatcagccagggctagacactgtcaagttatattgccccaactgtggagatatctacagtcctcccagctcacggttccaaggagtcgatggtcggtctgtctttctgctttcctcatataaggtagcaggtgttgattgttatcgtgtgatacgcgtcctttgcaggtgccttcttcggaacgacgttccctcatctgttctaccaaacctaccgagatctcttccctactcctttctatcctcatccggctcaaccttcgctcgtgtcttcaacaaatccgaatgcgcctgcttcgccttcgtctcatcgactgacagagcagagccgaaaccctgatccgtacggaggtcagaaacctgcgttcggagaagtgtaccaaaagcggatctatggttttagagtgagcgaacgagcaaggagtgggccaagga

SEQ ID NO: 2161 - DNA, 9918 bp, Xanthophyllomyces dendrorhous
agcaaggagtgggccaaggatggcctggttgagagagagaccgagaacatgggaagagttggccaaggtcgattggcgaggtcggtggattgggggagatggtaaagatggcgacgacgacgaggatggtaaagggaagccgacaggagagaagggtgatctgttcgagggagaggacgaagaagagccagaagaggaaagcgaagaagaggaagaagaagaaggaggagctggagtcgcttcaaaaaacgcggctggtacgtactttcagttctcctcatccttttgatgccttttctttttcagccttgagcggagttttgacatttctccttgtatgatttcttctttcgctctacagcccctatcaaaaatgcccttgctttaccgctcgctgctctccccctccaaggcgctcttccctctccccccgtctcgacaatcatttctcgaccgaaacgttcggtaccccgaacgttcccctgcgaagcatcataccaccctcgattcactgattcagctatttctgcctccgaaaccgaaggcacggccggtgattctgactccgacgatgcgctagacacgccgaatgaagcggctccgaggttcttcaccgcctcgaggaaagcggcagtagcaggaagaatgactcaggggatggagaagacccagtcggttgagactgaagtcactgtattggaaatcttttaaacgtaccaggttccatcttgtctctatttagtatgaatgagcgaagcctctcagttttctctatcttactttctcttttcgtgtctcatttgttacaaacgggaagtgaggttgctcgatcgtcgctttgattagacttgaaagagatcgggaagatgtttgtgaggtgtagttcacaactctctgttcatccatcagcggtctttgtgacatgttgttgatctctcaggaagagtggacagaggaaagagtcaaacaattcattcacaacacattcaagaaaacaaaccagatagaaagcaagagagatgataaaaggagataggacaaaaaagaagtcaggaagaaacacttgtctcaaaaaagactcccaagggatcgtgttcctcaaataagacgttaaagactgaaaggtggtgagatgtgcgataaagagatgagtgaaagagaagagtcaaggcggaacgaaaggaaaacaacatgtatccaacaaagagacggaaaccttctcgttctttctcttcttttttgtttccgggtaggaattctttttttggtttcaaagatcgaacgtctcgagcctgtacggaccctccatctctccaaacttcttgatggcctcctttcttcctcttcctccccttctcgacaacgtattcttctccccctctgcagccgccaattttcgtcgttctgtctcggccgacctgatcaatcgaagggcaccgtcaaagtttgcctgggcgagttcgagctcccgttggatcaaggtgtgagcttgtaggtaggcttgaatccgggagagcgtggtaggagcggagggtaaagaaagaagagtgagtaggtatgtgtctaaaagaagagtggtgaacggaacaatctgtgtgtgtttgtgaatttatgtcaagaatcagctttctctcatcttttcggaataagaaagaagaatgaatgtcaacaagaaaaaggaaagacatacgttggccacttgggggagacctcctaagtcggttcgaccagctgagggatcggcaatgacactcaagatatcctcgatcgcctccaaacatctcggaactctgttcattcccagacccaatacggcgtccttccaagcggactcgttcggtctgacaccgaacctgccgatatccaagaccaacctcgagaccgatggtaatcttcccgaggcgagctcggtaggttgagcttgaccatcgatgatgacgttcaacaagccgatcaacttggcaggtgacaactcagcagactgatccctgatgaggagcatgatgtttgaccaatcgcctctagcgagaagagcttgggaaaatccaccaggcaacatgtgttcggagaccatgagccgttgaatgagctgagtaatcaacttgctcgggtacgcttcctttggcatcgacttgcactcaacaaaaaccaactgaagcaatcccttggccacaggggccgggagaataacggcaggacagggtcggagttgaactgtcagccgtttagcgagctcttctgggttcctctgaacttcttcgggcaaagcagccttctgaagctcgtactcctgtcgcactcgctcgtggctctgagccaaccgagattcttctgctgactttgcctccacccaaactttctcaacagcgtttgcgatttcagcgggtgactcccatgtgccatgctgttgatgagtcaacagaatcgaccgaagtcgagggagtaactcgtgaaacggctcggccggttggttgcctgacaacgatgacgaaaaggatcccgccgcaccggccgaagaagaaacccttcgagacttgatagaaccagccgtcgatgagaatgaaccagtctgagcagtagacacaggaacaaggaccttggcagtgcgctgagcagcgaacaaaacatccgacagtcccccggctgatgctcgtccggcaacttcacctccattgacatcactcacccaaacgctaatctttcctccattgtctgatcctcttcgagcgacgaagatgacccgttcgccagctccgttcggtgcaaactcataggcaaacgcctcgagtccgatcggcgctgacccaggagcgaccattgactgagggagcgggaaggaagagataacagccggataaataggatttaccaagtgaacttgcattgattgagtggaaaagagaagggtgtaggctgaggtcgatcgacctggtaggcgaaggatggtggtgtttcgagggtgagaaggcgaacttggtgccggagtggaggggaaggtgtgagggaccaaggttggcttgagtgaattcatgctgagcgcaagagtatgcagatgagagtgagaagctttgggtgaattgaaaaaatagggtggatgatagttagatcacacagaaatcttcatgatagagaaaagaacacaagtagatagaaaagcaaatcaaatgagcaaggaactcactaagaacctgcatgacgccggtctgaagcaagacagcttcagtaactaactcctccttcttgagtccagtgatagtgaactccttttcagtcttgaagttgatcggctgaactccctctccagataaacccgaaggagctatgattgacagtcggacgagtccttccgggaagacctctacaaacacgtcaccagccccttgacttgtcgacacagaggatgtggtcgaggatgcgaaagcacaagaccatctagggcgcaagaaagcgaacgtgggagaggatcttgatttggtcgatgaggctgaggtgacgttgagggccgacacggcgatggttgaagagagagagatgatgctgtaagagtcggaggaagcagaagaggctgaagtcgagtgaacagccaggatatggtcaggactggaagggatagggatcaatcgagaaaccgggctaggcagctataaagacaacgggatgtgtagaagattgtatatttttagaagaagacatcaaggtgcagtgaggccatgaaacggacaaacctcaagggtctccttgtcctgttctcctcgccagcaccaaacggtccgacgagcgagctcagagtcaagatcttcatgctggtcaagtgctactagggtggtgatatctccagcagggttgtatatcgagacgggcgcggtagcaaaggttgtcgtggggggcacagtatgggaccagaccgggttaagcgcggcaatctttacaagagaggaaggagagctgttgatgagtgacaggtcctgagaagaacgacagcttagaggaacaacttacgtcgtatctccaaacaccctcgccattgacggcgacggcaagctggtggataggtccgctggtcgacttctttcccttttgcttgttgctcgatgctccagcacccaccggctgaacggaggagaccttgacgggctgtttagaggaagatgtctttgaggatttcacaaccggaggagagtacgaggccagaagaagcggagttgcgatcgagggtgccatgatacttccagatctaattcaaacgaaggattccgagtatgggcggagagaagggaaagcagaaagaaagtcaaaaagaagttgacccaaaaattagcgaaattggtggattacgtaagatttgctacaagccgtaaccaaccgaccctctaggggcgttgtttggcacatgctgggtgccgacgggcaactcttctaaagaacggcagtttgatgggctgtttccacaagagccagtcgttcagacagggtgcgcgctggagaagagcgggctctgtgaccggacggccatcctggctagatcggatcaccgagaacgatacaggctgcaccatctttggatacaaagttgctcggaggttggcgcacatcgcgtcatcacgttcatcgacatgatgtccatgatctagcatggaatcatatgaaacaagtgtaaatctgtctgaagtaggtcgtatgaagtagattttgatgtcggtgtggtttgtggcgggattcatgatacactcgcagactccaccacagggcgatatcttttctagcaacacgttctactgctcatcagtatgctagcttaatcgttctggtaagttggagaaccttgctgatagatgtctgataccgtcaaagactctgatccccaaaggttattctgcggagaagcatgagagaacacagagtatcagaaaacctttgtagtcttccctacacactccctaatagaatttcctagtctaaatctctaaggggaaggaaaatctgtgcggctttttttttgttattttcccttccagtcaccttctttgctttctctctctcttccccatcgaacagatcagatcatctagtaacaatcgatccctctcattcagtcgacttggtggtcctctgtcgtatcgacgttcttctccttgttcgttctctcctctctctccctcaggcttgtccttccctccccccgacctcatcctcttcaccattctcgccaacgcccaaaggctcacaggaggccctgccctccgaccctttcgattcatattgcctaaacgaactttggccaacgtgtccaaacaacgacagactatcacttcttcttcctcttcgaccgtcaacaccttgactactaacgcacacactaacggacagtccgattcgtccgctcgtcaatcttcgacaagctcaatgaccgagcacaaagtccgttcaggatccgtccggatcactcggcctcagtcggcagcagacatcgtcacttctgaaactacattggcttcttcctctcgctcccccgtttctccaaagcagaccgtattagaaggcaagagtaaggagggagggggaggaggagagtctaaagggaaatcatcaaagtcgaaaggaggttggtctatcattccttctcccgtccggtcttgaccgtgcttttgctctttcgaggtagttcatttcacaggccgagcgttgaacgtgctgaggtctggcttctcttaccttactcactcacatgctacgatcttggtttgttttctgttttgttgtcgcctctctctctcttccaaagctcgtcgccacgcggccgctgcgaacgattcagccccgatatcgacaccccgtgcgccttcgtcaaccaagcaagaagcttcacggcaacagtctgttcagcagcaacgagcgttttcttctgctcaaatcaacatggaaggtgtctcgagagagctccgaaactcaaagtcgagtagtctaaacaatccacccagcgcgccagagagcgtcatctacagacatcctacgattccttcgtcctactaccgtacacctgatcccagaacatcaatacctgctcaggttatcaacctcgacggtagtgatctgcatcgggagattcttaagagttgggaggtttgttttccttccttgctttacatattctactctcaccaagctcactgagaacaacgtgcttgtatcacctctctaggcttcagtcccctccagggcaaccgtcagatcaagagaaagaactttagaaaaagtgtgcagagctgtgtctcgattcggaagtcaatacaaagtcgccgtgttcggaagtgcggccatcggagtagatggagataagagtgatatggatctgtgtgtagttgtacgtttccatcttcttgcttctctcgcccctcttacctctcttacccttctttgtctgactttttcctttctctccgatccgctggcctcatctaggaccaagagcacccgcaaggttatcgaaacttcgatctcaccaagaagccaaaaggaaatacaatttacaacatgtacgacttggcatacatgcttaaagcaaaaggaggtatgatggacgtcaccgctatcgccttcgcaaagacacctataggtacgtgtattttttcttcacctgtccattgatctttcaacattgttcatttggtgccttctccttcgtccatgttatagtgaagtttcgggatcccacgacggacatcgaggttgacatgaagtaagtatctcattttcacattgaccatcagattctcttatagtcttccatctcacatcgcgcctcgaccttttcttcttcgcctcgtttctgaagtgtgaatgatttaggcggagtgtacaacacatcgttgattctctcatactgccttctcgcgccgtatacgctccggccgctgttgcatgccgtcaagcattgggccaaatcgagaaagatcaatgacgcgtaagtggctggtttcttcccacgcagaaacaacttgcaagaggctcaaagctatctctttcttccctcgttctgtcttgcacttgacagctccggccgaagtggtcatccgacgttctcttcatatacactcaacctgctctgcgtatcatatatgcaatcttgtcaacttctacccaatctgcaatcacccgagttgatcgatcgattaggcgtgcctccagctgagatttggatcagaggatttcttaaaagagacaaggccgacaagctagacactacatttgcccccgtcggccgggaaagcggagcgggcgaggaggacgggccggatatgccaggaatgtctcaggaggaggtcgacgaatggaaggatctaaacttgcaagtcgatgtgggtgagcttgtcaaacgatttttccaatggtacggcgaacaatcgccacgaataaatatcgatcctgccgtgggggtggaatcggctgtgagggcttgggattggagtagatgtcttagcagcgtcttgcacggtggaacagtccgtagagagtttcccttcggccaggctgcagcagcggcaactaaggatgaactggagagaatggatgaagaaactagggagagggaacgtcagttagccgcacagatcccacattcgaggtggattaacgacgcgttggtcgttcaggatccattcatcatcgacaaggtttatctctttccttggctagtacattttctctagcgtgataaacaactgacttgcctggccgacattccttccatcgcattcaatcagaattgtacaggtgtcatcaacgtgcccacagctatcttgctaaaggaagagttcgccagggcctaccatattcttgaacaaggcggctccttcctcagagaggtctgtcagcctagattcgtcgctacgatgaggcagggtgtgagacatgattctagaggtggcggaggcggacgaggaggaggcaggcgacgagaaaagtcggacaagtagcaagaaaagaatgaggagccgttgattgatctggccatcttgttatttccttcttttcgtccttcgtcctcttgggtttccttccttcctcctaccgtcatcaagacgtttgttgcatcgaacgcttctctattctgtccactagacgttctcgccctctccttgcctccgttttctcttttgcctgttcttcgatctatctatcccctccccttttcgctcgctcaatttacagtttcctttcctacatccatctcattcatttgtagcagtatcaactattcatcggattcccttaatcaaactaagctttgcttcgtgacatcatttcctctctttgctctcggctccaagtgtcacctccaactccatcgttgattacaagaagaaaagaaaaaagagaggcaaagaacaatatgaggatttggggccaagactgcaagtaaacgagggtgaaacacttagcggggccatcctgacccctgttacataatcagcccctgaaattcttccgcctggacgtacaaactgccatctctcttcatctttgtgtttgcaagtgtctcgattcttttgttcccttggcacataaccctgcttctgcttcaatcgacctcagaaaaccacccctatcgtgttgatactcaaaggaccaaacgatcaccaacagatatatgcccgaactccaggctagatacacttctaccccaaacatgacctctgtagccatacctgacaccccggacggacctcctatgctaggaacgatcggtcgagataccggactcgggtctggctcggtcttgggatcctcgctgctcggtgaagaatgggcagagttcttggatgctgatactagtggagattcactggactctggcgtaggttcacaattcagttccggtatgagagggagagagaactttcaggcacaggggaacgaggaagagagaagagagaaggaaaaggtggatagactcgctctggacgtggagaagaggtcagtatctctttctcctttccttcttaagttcctttgtctttgtgtctggttgtgtgagatgagaatgtcgctatcgcctagagtagtgttcccttgtttcgcctccccttgacgggttttacctgaagacagaggaagggagcgcaggatacaaacgctcaaaactgacaccttctctctcgcttgtggtctcaattgttctttcctctttactcaaaagaaaaacactcacctccaagatgacacttgagctacaagaacttgaggctcgtcttcaagcggccgatgaaagagagtcgtcccttcgagcccgacagcaagctgtcaggccttcgtattgagaatcttcctttgttctgtcccatctgtattggtcctgaatacgtgagtcttcaggagaagaactcgagagttatggcgcatatatagattgacgtcttcttcatcttcttccgcttcgatgcctttcttggtcgcattcgtccagaaccaactctcttcgttcactctcttgtgcgatatgaattgtgtatatgtcttttaccttttatccctggaacctcttcattcgtccgcgttctcatatgtatcttaaacctctgcttgttatgacccgtatttcttttcctatcttcagtatccttgtaaccctgcccggctcgtacgcatagaccgatcatttctacatttgcctcctcacttcgtaccatctcttcttacctcatatgtttcttatttctcttccatctttttcactgtgacaccgttttacatataacattctttccgtttttacgatctctttctttcactcgccctttttaggacgacccgcacgttgcgtatctgaacatgaattataaaccaagttgaagacgtcatgatcagtgaaaacgtatccaaataaattcgtgtatgtgtatatgtatgtatatatgtatg

SEQ ID NO: 2162 - DNA, 44546 bp, Xanthophyllomyces dendrorhous
atgtatatatgtatgtgtatatgtatgtgtgtgtgtttctgagagtggaaggacgacttgaaggagcttttctctttagaacgaacagatatattgatctttccctcttgctatgagtaaacagaggaagaggaaaacaccgcggtcgatcacagagatggagagaaagctcgtgagagaagaatgtgtggatgggagaaggctagggaggttggttgaatatgtgcagtgataggacaatagaatttgaggcatggcaaaacaggaaagtcagaaacaaaggtgagaatcgtcaagaaaagggaattgaattaaagttggatattaagtgggacagagtctgagtaaataatgttaatgttaaggttgatgttgatgtatgtatatgatggatattcccctacttgtccttcaagtgaaagacgatgttgaaaccgaagatggaaaataagggaaagccaagacgaacgtgaaaaagaggacggaaactatgaaaaagagatggtgaagaagtgggagatggagatggtgtgctttgaaaccgatatctatgaaggaacaagatataaaacacaaacgcacacgcacacacacacacgcgcatacactgaaaaggagagaaagaaagaagaggcacatcaaagaataagatctgatgagaaaagtgtgtctcttcctttgagttacaaagaaggaaaaaagggatagaaagacgacaaacaacactgatgagagtgaagaaggcgagagagaagggaaagaaagcaaaaagcccgaaaagagagagaaagaaagagaggaaacagagatagagtgaacaaacaagagctgaaggtaaaagggcaagagaaaggatgaatatgagcatgaacgggactactatcaatgaaagcacgagcacagcatgagaacagcaagattctctttttcgttttcttccactctttctatgacggataggcgatagattcctgggttttcatctgcttggcaacaactacgacaaccacctttgcgcgtgttcccaccttttcgaaccaactcgggtcgccgatctcgatcccaattctttccccggttcttttcattcccagtcttgtctctttcgggtcagcgtctcctgccagtcggtctgccatcggcatcaaccatgcttgcccgttcgatcaagcctgccagaactgaagcgggcacgaggaccatcggacttggaatcagttgttcttctgccggacgaggatcccaggtcaggtacggcaatggaggaacagcatactgctgtggcggaggctgcgaggaggcttgtgggtatgacgatgattgcaagaccggttgctgctgggctactggtatcgacggaggagcggattgaaactgtttgttattgttgttgtccgagagagaaggattgggatatgtcgaacgaggaggtgggtaaggactactactcaaattgagcgagttactgctagtgttgttattgctgctgctactgctactgctattgttgttgttataagataaggttgagaaagagttttgttgattcgagccgttgaagccggattgctggccctgctgttgtcgttgttggttggaagacgtcgactggttcttgttgagcctggctgtactcgacggaggaggcatgcttccatccatcaccgacggtggcagcatctcagtatcctcttcggctaatgccggcaggtgaagatagagatgcttctggggcgaaggcggtgcggagaacagaccaccttcccatgctcctgtgaagacgggcgagttcagcgcagagggcggaagagatgccgatgggtggtgaagtgaggctaggaaggactggacccaggttgggttgcaatctgcgtcgagagtctcttggaaatgaggggctgcgctctgggaagttgtcgttgttgaattcgtgtgcccagagctgggagtcgaggccatcggtgggagttttgtgttgccgttctgtgaattcagtgcgtcccaagcaggcgttgagaacgcatcagatcccggaccgctcggaggtgcgccattgttgtcgattccaccaccgccttggcctccgccgccggcagaattgttggtggtcgaaggagagattcctgttccgccaggtgaagagcctgaaacaaaagcaggtgaggatccagcactcaccgtccctccattcggacctaaatgatgactatctggatggagcagatgggcgaacggaccatgttgtatgtttgacagacagttcggtccacctcctccgcctccgcccgagtttgttcggttgctggtgccgttgctgtgccgattggtcccaaggcgagcatcgggcgacatgtctgaccggtggtcattcccggaatcattcacgttgaacctctctctggggaagtcctcgtcgatcgcgttcagccgagcaccgaggtctctggagaagagaagcccatccgaggctgtgggcgttcttgtccggttagatgagtttgacaggattgatgaaggagtttcggcccggttgtaagacgactgttgctgaccgagtgagttaaaagaaggaaggtcgacctggtgatgatgatgaggaggctgttgatgttgcgtggacgtggaagatgacgactgagacggattgtcgaaaatggacatgttgaaggcgaggaccccattggatcgagcggacgagtctgacgggtgagttcggtcggacggcttaagatgtggcggtaaaggatcaaacatgtgaggaaatgatgaattactaccggacgggccggccgaaggtgggaactgaaggtcgagtaggccttcgaagggagacggttggttttcgcttcctagtcgggagcttgacggccggagttcactgaactgggaggaggacatcgagtctctggagggtgaaccatcttgatgactggtcattagaccgagcatgctatccctaccgttgttgccatgttcgtctttcgggtctttggtcacagatcctttggatgcattacgcgaagcgggatctctatctgtaaagctgacgcttcgtctgcctcgaccaccttctgggaagcttcgggtaccaccggcattaccacctgtctttttctgttgttcctcgacctctaacagattcgccgcaactttttcgtcacccttgaactttctccatcggtttcgacagcaaagacctgttcgacctggtaaggacttggcgatcagttgccacttgggaccagtcgtttcgaacagcgaaagaagggattcgtcttcttctttggaccatggctgaccctgtggaggtgaggacgaaaagtgaaatgaacgcggtcgtcagagtggacggatggaaggaaataggtggagggcaattgaggggtgtgacgaacctttgataaactggggtccaacacttctttccaacgtttggcacattggtcatcctttctgcctggaatcatttgagcaatctgaccgatacatccgaggtaacatcagatcagcatgctgactaacacaccttcaaggtggaaggtcttccttgcgaccaaaagaggcgacgcagaaggcggattgtatgcgaattagaaaatatcgagacccaccttgtaccataccggtccaagcttttccaacccttccaagagcaaacggtcctcttcctttgaccaacgtcccttttttagattcggagcgagcgagtgaaagtatcgtttacgacagtcctggtgaagatatggaggtgaagaagcagcaggaagacaaaaacaaacagacatgacgcatacatcccgaggtgagacactgtaagcgcggaagagagctcgactggaagtcagaaacgaacaaagaacccaccttaatgttacgaccctccagagcggcggccacgatgggccatttgctgtctttgcctctttgactacctgaaggaagaacgagtgcagcagatcaagatttaggtgttagtcatatggacacgaaacgccctcttctaaagagggagccttggttgaaacttctatcagattccgacggaaacaagacaagcggagcaggacatgttgattttgaacgaatgaatgcgccaatgggcagctccagtcgaaagaacttcaagcaggaagcaacactggctcctcccgggcatcacgctgcggaacaaactctgggtactcaccatggatagcgaccagtttgagcaagagagcatcctcttcgggtgtccaaaacaccctttctcggtatgtcgaggcaggcttcgatggatcgggaggcatgtgatatcggaagaaaggaaaccaaggtgaaaggatgagatgggaagatggtgtgagagtgagtggatgtggatgtggcttgataggatgaacacggaaaagcgggggagagggaaacggtgggtgtgggtgagaaggtgggttttctcctttgtccgtgcggttttttttcttcttttttttttggtttagcagggagaagtgtgtaagactgagaagcaccctgaggcctcctgttttggttggctggttactattcctttccggtctctcttctctcgatggattctcctctggacactgatcgaaggaggaaagaacgcaaggacggagaagtaggttgtcttttcgagagaaagagcaaaggaagcgagtcgtgattgtcaacgagagaacgtccagtggggtaacacggttgatcgacttttcgttccggggggacggccaggaacaaggggggggtgcctgagcctgggtgagtgtcaaggcacaataggcatatggaggcacacaggcaccctctgggccacctggccgcgcgcagcgtgctagaccatgtgtgcttcgtgggatggagtgttaatgagatttagggtagctgtggggaatgcggggtgaaatgagttactgctccgaatgtggggtaaactgtattccggccaggcgtggaagcgtggacagaggaggcaacgtaggcttagtcggcataggcacaaatgcgcagcagtcggtctccggcttttcgccggcatcaattcattggtttccaacccgaccttgtttctattccaatatgacacgtgtgatcggaatctagatgccgtgaggtggctgcgtgaaatggctacgtaacgtggcttcggaaaatggctaggtaccctgagggctgtgtagactagtcaggtgcccatgctgcttagtcagcttcctgactacccaacccttacgccgcacacgctcagtcctctccttcgcccttctccatctcaacgcttgctcgtactttctctccttcctttcgttcacaggccatccgagacagagaacagaccgttcgaccagctacttagatcgaaaacagctatgcctgtgagttctcttgtcaaagtcctttccgtcatccatctttgttttctccccgagtctgatctctctccctaactccctttcgttcatctacaatcgacacctcctcgtcgctcaatcgtaacgaacctcgtcaggcctatcactctgcattcaacgaactcgacgacgttcgtctagtcggtaacacctccatccttcctctcaagactcggttcagaggcccagctcctttgggttcgtccagtcgcgtttttccttatctgttctttccttgcaacctagcttcctccgtaaagcctgttttcctgtcccctctgacatcacaccccatgttactttgattctttgcctcgttttcaccctactcatacgaatacgcaataccgtgccattcagccgactcttcgtctccagacatcatcgacgaagccatttccctgttcagagcaaactgcctgttccgaaatttcgagctcaatggaccagccgacaggctgctcatctacctcaccctcttcatctccgaggttctttccaaggtggcctctcatcggtcagctcttgcaccggcagaagccaaaaaagtcctcggcactctcgccctagactcgttcgctctccctggagacgctaccttcccgctcaactcgatgtacgccccgcccgccaactcggtcgacgccggtccgttcagatatcttcttttccccttcagcctagtttttctttcattcttcacacgaaacaagtactaaccatcagatcggctggtatcttctgaccgtcttgtttgcaacagatcatctcaggtcgtatcttactcaggcaagacaggaagtcgtccttcggctactcgatcacctgtatcctacagacaatgagtatgttgcccactctagcttttctctctgttgctaccaatgcgccatgcatcgctgatgatgtaccaacgcttcttgaacctctatctcgattttttttctggacgatcaaaaccgaaagaggtcatcaggcgacggttccgagtaaatggtggatgtgcttcaccaagcgaaaagggtttgttcctcttttgaatttgtttctcatcatcctcgcttcacacaccaagacacttcggtctccttctgacgcgcaatatttgtctatatttccaacagattctggggagcatgaatgatcttgattagataacttctgtcgcgcccgtcacatggtgattttgaaggtggagagttggaataaaaagagacgcgcgcgcccgaccgctccgttgctcttgggctgtgatctattcctctcttctttccctcgacccccctttcttctttttccttctttatttgttcctactttcgttctcctgctccgcttctctctgttcttccttcttcacccaaagtcctgatgttcttgttcctaccaccgcccactcatcttcttgttctgtccaatgtactcttgacgaatgttggacttcactctccaacgtaacatccatcgaaggggatgtaatcctgaacgctcgtttaaaagtcagaagcccagcgtacgatcgtttgtcaacaatatgtccgtcgaggtgtccccctcctcatttactatctataataaaggaaaatggaagacgtaagaggaggagaaaagggtgaatatgaatgcaagaagtaaatgaacagacagcgaaagggaaaagtacaatgcgaaacaggtgaagagttcttctttttcgagagagtgatgatacatccagctccaacagagctctagagataatgatgaaagataatagacaagaggcaaaaggcgaaaaaggttgaatcccaagaaaaagaagaaaaagaaggaggaaatcctctagtcagagtcgagttcagcattcagctctccatgatcacgtcaactgtagcggcctctggtgctaatgtcgttgtcgttgctgtcgtcgttgctgttgttgctgccgctactggcgttggtgccgtcgacgttgttgtcgacatcgatgccgttgtcgtcgtcgtcgttgccgttgtcgaaccgggttttcctttcgacttgccctttctgcccccagtctttttcgacgcagccgccgcccccaccgaaatctctaccgaacctgatccacccatcgatccaacggtcgtcccattgttaccagcaccaccacttccgagtctttccctctctccatctttctctccgtcgaagaagtcattcctcgcccgatggacatcttcccctctttcgtctcctgccttaccgttcccgacggtctcttcctccttctcctctgcgttcctctcttctgattctagccagccaacaagatcaggcgggatctcctgcatctgaaccgaaggcgccccgttaagatacctcaggttttctcggatcgagaccctgatcttttcgagtgatgaccgagtgtttagattgtccacccggccggttaacggaggatgaagcttgtagtctgggtaaaagaatgcgtcatatggtgttggcggtagagaatccccgacgtctgtttcggtcaaaatcgaagtttcgtaggcccaacaacgtgaaacgttccttccaagatacaacaaaatgatacaaaacaaaccaagaagaaaatagatcgtccacgtaagtaaaacggaattggtttcaaaactgagtagagactcacctgatggtatagcctccaccacccaagaccaataaaggcaggttgaaactcttgatgaaccgaacacattccccatgagccgcgatcgagaggttgaacgctcccagtcgatcacaacccagcgaatctgccccgcattgcaggacaatacttgtcggtcgaaacgtcgtgatcgtcggttccatcaccgctttgaacaaggaaatgtaactttcgtcgtcgatcccttcttgaagtgggacgttcagactaaagtatttacctagtccgttcccaagttcatccaacgcgcccgtgcctgggaagaagtcgccggcaaacttgtgaaaagagacggtgagaactcgattggacatgtagaacgcttcctgaacaccatctccgtgatggatgtcaatatctatatagagaactctcggctggaatctgtacggcagtgttttcgaaaagaaagccagctcgacatgtggtcaacacaaaaagatatcctgacacgaggaagcaatccatacacagaaggatcaagaccttaccggaggagttcaagaatggcaagtacgatatcattcacatagcaaaacccactggcctcccctttcttggcgtgatgtagtcctccggaccagttgacagcaatatccgtgtttccgtgggacagtttcctagcggccacgagcgaagcaccggagtactgcctacagaattcaaacaggccggtgaagactgggcaatcatccccaaagttaaactttgaaaattgagttgtcaaagaaggcggggccgaaggggttactctaattcacgaaccagccgacgcgtaaagacgacgcgagagtcaatatcctcacagaaacatgctcggaaagaggtatgtagagaaatcgaacctagaaagaaaatcgacgtaatctgaatcgtggaacatttctaattcatcacgagttgcagctcggggagcaaacacgtccatccgcttatgaagcccgtacccgacgacgagcgaatttgtgagcgtgagcctatggggtttcataggatgccgctcctggtgtttatgtttcggtttttgaggaaacaacatatccagaaaaaaaaaggtggagcgcgtacagaacatgacaggttgggtgagaacgcgtcctgatgactttaaaacaaatctcaaatcttctttaggagggtcggacagtaggcaaactagacgcaccccataatggtattctcctacagatttaggaaagtagtacgagactctggactgagaatgcggctgtgttggtggtatttcatcgatgaaatcagttatggtctagctggttgactcttttcggctattctgctgaacaatgagaagtctcaagagaaacgaacctgaacgatatcaccctgaggctgaggaagcccgatgtccttcctcgagtaaaagaacggactgtcagaaaaggtctggacgatatcgggtcctagcatatatgtagcgaggttgaaaagaggtagaggagagaaaccacagctagcttctacaaggtctgagctccaagataatctaacaccgtttaaaaggaggaaagctgaggctgataatcgaatggatggtcgtgattaaacgtcgaatgggtgagtgagaatgttgtaggtgctgctcaaatacggtcggcacgtgacttattaagcttatgtcaatcaacctttatattcagcgcatcttaatgatggcctgtccttctttagctatatacatatatatagctatatattcatatgtgaagcttcaatcacactagataacattatcatagattccatatctctcaatattcgctgattcgaagcataattcttttgtaagccttacaataacaatttaccgctattgcgcagagaagatggggaagacaaaaccgaaggatacgtacccaaaatcctgaggcaaagagataagaccaagaagatcagaacatcagccatccctgattattgaagcggcctatgaattaatcaatgtgtgaggaaagagaaaacgtactacatggcctgtctctttggcatgttgcgtcgccatcttctctcctttgagtccttctccgcacgtgccgcatcgtagatcaaacgtctgcgtgtcggtgtaatagtgtctatccttgagtttctttgcaagagccgtcacagcaggcaagatagattcgtttgatgtagaaaagaccgtctcgcagaaaccaggatcatcaatttgaggtgtcggagagagaagcgcacagtcataatggataccagaatacactaggacgcatctatgcagccagacaaaataagcgagtactaaaagatgatcagagattagctcaacaatgatagccatcgatttatgaacatacctctgtgaatattggccttcgccaaatcgatctattcgacctgatgagatatctacagatgcaatctcggttttatagctagtaccgaatatgatgatatcgtcagattagcatcaggtctcatcatcgagtgtgctctggcatatggacggacggatacggactgggtagaaaagatagagagctctgacaagaagggctcgcaagatcgcacgataagcaagcgagttctagacaagtttgaatcgtatttcctaagccacaactaacctatagctccaccccagcttgtgggcttaagaatcgtcgagatgtatgcctcgggtgaacgtctatgattggtcacagaagaaatatatgtttagggaaagctcctcgttcatgaccgatgagaaacagtacgaactccaaaatgagctctgaataagtaattggatcggccgtaatggtatccgctaccactgtatgaatgagacagatgttgcaaggcaggtgtatgcataagcgtatcgagcttagcgacatcacttaggaaactcaatgtaccacgacgaagcttggatgccgcttggatgcttccttcaaatacttgagctactgatgagaacagacacgaattatcatcgctgtcgatgtttaaatttcgaaagccaaatatcacttgtcagccttgacaaacatgagagcgcaattatatggatagaggactgacggtacgatgttcagaactaggtatgatccattgacctccacccaatctcctgctttgttgtttgctgacgcgctgatagtgtttggcgcgatagattctgggacgaatggctttggtttaggtggatccaagctgcgtgaaggtaccggtgctctgatagaggaagtcgaggaacctgacggagtagccgcgctcacaagcaattgttcattcttgctaagtttcaaagaggaaagtgcctgggccgaagacgtgtataacagaggtttcggtgggtatcccgacttgactatcgtttgaaacatggccatcaaggaggccagtgtgataccaatcggccgcatccaacgtgaaacaatcagctcaaaccctacaaaggatagctaatagcgacataaaaagatggcagaaagaaggagtttacgatcttgagcgtcggcaggcaagccagaaactttcgatatagcacaaagcagatcattcacggatccatttgaatctacttgaatcgagctgataccacctggatgtctgatcctgattgagagggacattgttggttgcttgtatgttgctgtcctccagatggacacaaccttgctgaagggatggcagcgtcatggtcatgtgtatgtggcaacggctgtgcttcgaaggcttatgtaagcacgtacgcgtggtttatttttccgttcgttgactttccagcgatctccttttcgactgtacatatccgatagaccaacaagcattccttctgccatcgctcacttctttcttctttctctcttctcaagatgaattctggctcgtcgatcacccagagatcgggcgccactcagattctacgcaatcctgtctccgctccaaaggtagtcaaggtcatgggtactgctggaacagcctatgaggccatgtccaaggttcgtagattctctatccggcttgaacagcaagatcgcagacagcccggtactcatttggctcgatggaaacattcgaattgttcacggccacagaaagttctaggtcgacggttggtccgggtgttcagtctgacgctcggagcaactttcttggtcttcagctttcagctttttgtaactggtaaggtggaatgtgcaacttgttcacgaacaagagtatgactactcgtggattgaacctttcaccgtttcaatttttacaggaggatttcactttactccgtcttttagaggggcaatcaagaatcttttctcttcagccgcagtctttgttctggctgttctaccaactatcgtcatccgcaaaacattaatctcttgtgcgttcgctcagctccccaaggactgctatcgaattcatactaacctcagctatcgagatacatcttatgtatagatccagaatcgacttcgaactctttgagcactcgagtccgagctctcttctcctctccatcaacccatgctactgttcttgtctttgttgcttgtggagtcattcaatccttgatctctgcgatgatcagttctggtgccaaccttggtctcctggctagtacctcgtacgcgcaatttcacactctatgtacatgttatcgaatttagtttgaccacgtttaatcgattgcgcattacagaagacaccctttccatctcaacgaacgattgatcatcttcctgttgtctaatgcatcactgggagtgacgtacgccttccgagaactctggatggagacctccttacctgtgtggcctcacgatatcgtacgtattggttcgatcttgcatctgaagagacaaaaagagaccaagcgaggtatagacgagcatactgaacaagatactttctcttcttatagctgcctattcagggcttgatctctaagagcctgacgagcgtcccatccgcgctcggatttcccatcatccactccttcgtattttccgcaatatatttgtctgttcggcgctcggtttggagattcttcctctcgtggttcggcgtcttcaccaggtgggatttgtgtcaactcttctcgtccgaggatttctgcactcgagtactgacctaaacataatttcaggccatacatcgccaactttctgagaagctctcatcgatctatcgatacaggactcttcgtaaagatcacagttcttgagctggctacagtggcaggatgggaaattggaaaggccatcctccgggtttacatggttcaggttcgttgatgagctttcttgaccagatcaaacccatcttgttcttcatactgacgagtcaatctatgttgtatggtgtgatctagcctatgatgatttcccagaactcggcgtcgcctatcaagtgcctgctggctggattggcctcaacttctccgtacttcaaagttagtgtgtccactactctcatatatgaacatctcacagcttttaatactctcatactgactggttttgctatgttgtttcttgtaaacgcagcattttgctcaattcgaaatagcgcactgtgctgtcacctcaactcaacggcgactcgacgtttacagcgacatgtcatcccccacgacattttggaatgaagtttggcgggccgagatggtacttcttggtcggagctaccaagcccttctcaacagaggacttaccgcctcggccttctccagcatgtacccttctggtccctccaaccaatccacctctcctgatctacatggcgcttctgtgattcaccctcaacacaacaatgctatcttccttcagcccaagaagcatgtttacgatagcctggcatcttctcaaaccgatttgcccccctcaccctcaccagcgcctaggcgggcacttccttctcagagttcggcaccttcgaaggtgcctgcgatcttcacttcaggtttatctgaacaggctccgtctcaatctcaacccgctcctcaaagggcgacacagtcgagtaagtcgatcggagatcgagcagtggaggtgctcgctagaatttggtgggtcgtctgggaaggaatgcccagagatttcaagacagcagcagaaataagactttctcctgtgaggagaatgctagtcagactgaaggtgagaggtactgtgagaagatgtctaaagacaagacagttggatgtgttagctattcaaggtatgatctttcttcctctgataagaagaagctaagaaaaggtttgggctgacttgatgaaatctcatgggattttcatatacagcactttccgcgttgaccgctgcttcgctgactgaagacccatacggtcaagttcaaagggatattcctcgaacgctcgaggccttcactagctacctctcagctcttgaaatatttgttgagcagctccaactaagctctcaggtctccggggcctgggctgaggaggcggatgagacgatgaaagttattcaggaggaggttgagcctctgatagatggtgcgtctctcatgtactctgttttgtggtcaggctgaaatgtctaaaacttctgtcttttcgcttcttatgtcatacttctgttacatagctcatcgagaagggattcgtcaaatagttcgttctagtcttttacaagtcgtccgccttgaatatgtgttctttgccatctgatatagcctgcttggatttattgtattttcagctggagactttccgagagcacctatccgctttcaagttcccgccaaaagtagctaagagcctcgcacagttcatggattgacgagatctttaagaagaatgcaatctaaaacacaacacaaaacaaactcctgccatcaatcataatgagccttttgtctgattcagctgggttccagcttgtctcttgaaacatatctgacgtatgcatcacttttagtctcttgagtaggatcatatattccgagcagtcagtgattatgaaagaatgaaaacaagaacgaagggatacaataaaagaacaaacaagcgtctaatgcttaaagatagaagaggaaagtaagaaagaaaacagagtacaagaaagaatctcaaacgtagccttcaaaaaatcactcgtcgtcgttgccatcgatgaaccgaagtctcgtgccgttggcgactctggaaataacgcccagattctcgtactatgtggaaagtgtaaaaaaaggaaatagtgttaaatcttcctgataacatccaaagtgagtcaatcagacatagtacaggtttatgcttacctcgagaatagtctccatcaattgagtctcggtgaatcccttagcaaacacccgagccttgacatctagcatcacaatctctccatcgtcttcctcatcgctggcctccgccaaacgtcttcctcttctgcctcccggtccactgccgatgtttttgggtttgcccattccgttcgagatagccatgtccctgataattcgataaattttgctcgtactcgttccgtcggtaacttccctatccttcccggtgttctcattcaaactggccttcgagacgtccatcaatcgcagtgcctcgtctacgtcggcaatgataacttcgtcagagaatcggacccgagcgcaagcttgcgcaagacggatcacaccgagcaacgttcgagaggaggtgtatgtcgagaatttatcctcggcttcgtcctccttttgttgctgtcgaagacgaacgtacgcggagacgatgtattctgagattgccttgggaacagtcggcctcttttgacgagcagcagcgatgaagtgtctatcgtttcagaaagtagagagcagtaacatacagggcttagtgatcaacttcctcaaaggctttatgaagcgttctatgaggcagattgaaagactgacctcatcaacttgggatctactgggtcaaaatcgagctgaggagccacgctaaacatgtgcacaaacgtgatgtgctgagcaagtcgctcatcatcatcccttaccggtgtgtccaggatcaggaagagcacgtcaaatcgagacaacagcgccgctggtaagttgatattttcaactggggagaccttggggttgtatcgtccgtagagaggattagcagcagccaggatagacgtccgggcgttaagagtggtagtaattccagctttggagattgaaatcgtctgctgttccatgacttcatgaatggccgttcgatcagattcgtccatcttatcaaactcatcgatgcagcagataccgttatcggccaagacaagagctcctccctctataaaaatcaaacggatatagaacagaagatttgccgcatatgtaagatatttttcctgtagaatgatagcatgcgcgacgtttaaataaataaagcgaaagaagacacataccgagcacaaactcatctgtcactggatccctcatgacagcagctgtcagaccaacaccggaagatcccttaccggtggtgtacacacctcggggagccaccttggaaatgtactttaacaactgcgacttggccactccaggatctcccataagacaaacgttgatgtctcctctgattttcattccatcgtttacgtttttagtcacaccaccaataagaagtagaagtaaggctttcttaacatcttcatggccataaatttcgggtgcaatgctgattcaaacaaacaacatgtgacgggcggacgtaagtaaacctttatcatcatcatgatgaagagtaagatagtcaacgtacctaagagcaagtttgtggtaaatattgggatcttctcggatggcctccaggtcctccttaaccttatcagtcacttccatgtcgttgtagctcttcttcatttgcctaacgtgcatcccctccaagaatgtgtcctggagcaatcccgctcgaagggctcgcataccggtgtacggcgtgggaaggaagataccggagacgtcaatgacgtctccgggcgaaacagttcgggtcaaggcgccgtagagatggatggtcatagatcgagggatatgtccaacaggaacttgactagcctgcgttgagcacaaatacgtaacaattgagagtcagatctttgcaaacttgtttgaggagatgaagacggcgcatagaacaaccaagatatttagacacaaaccatctcctgaatcttgacctcctggaagggcacaaatttgctcgctctagtctgcatcatcagacttccaacgaccctgtcacttcggcaagtatcggtgggacattcctggagcgggttgaaggttcgcgtgttgatttcctgaaaactttcttctccacaagactcgcacgaataagcattcaccaacacgtgcggcttgacatcagaaacacgagtagtaattcctcgaacggtgatgagctttccaagttgtgctcctttgacctctcggacagcctgaggatttcgatacgtcttagagagaggcttgatgtaaagttggctgttttcaaaatgagaggacgcatcaaaccacatattcgtccatcgatagagtgagaactaacacttactatcgtcgggtcaaactgggcggaaacttgtcggcctcatcccttcccatctcctcatttcgcttctttctctgctccatgatcaactcggcaacatcgctttgtgaggatacgtcaattgtgggctcgggcatcaaagagtcaatgacctcggagatcaggtcgatgtatctacgcgcgttgcggctgatgttgagagcgagagaatatggggaatcttcaaactgaacacgcgcaaattattttcggtttatagttagcaacttctcttatcatataagcctcacttaaaattactgacagattgtatatcgtcaagctcaatcactattgacgacacttgcttgttggctacctgggtctgttttcccacgaacatcaaacgacacgagaagaaacgaccgttatgagcttgcgcaaatataagcgtatgtcatgatcagggtacttacaagcatcttcatatactttaatctcttcctgtcttccggaattccatcatccacccccagactcatgttgtcaagctcttcctccaagtccaaccggtcctcctcgtcttcatccgcatcttcgtcgactggtcggttggcacgagagcgaggctctttgacgaactgtgacatgaatgtctgcagcttgactaaggacggattcaaacaaggtgagataagtctgagtcatcaaacaagcttgagaaaggctctgtcgcgttgtcttcaaggactaagactcacttttctcgccagcataatcgataccagtgttgaaggtcggaagcgttaccgcagtgggaaggtaagccatggtggttgttttcaggtgttttctggtatgatgttccacagagcactgattcaaagagctgaacggattttgtctcgactcgtatgaaagagtctgaagtggttcaggttaatgataaaggaagggaggatccgatgaaaagaaggaacaagttgaacgagcttcgagagaaggcgagtagaaatcagcaacaacgagcgcagccagacgcgtcgcgtggagttcaagacgcgtcttcaaactccggctgaccccgagcccgttttgaaccctctagtttgctcgatgagtagtttcttcctcttgtgtacttctattctagacgcgattggtgtacagctgagatgagttagtttttaaagatgggttgtgattatgagaggagtgcatgaaagaactgtgaactgacaaatgctcgacaaaatcgacaatctcttaatccgagtttgtcttctctagtccttatgcctgtgctctctcaacaagaacattcccattaaatgaataaatagaagtaggatcgtctcgtgtctgatgtacttagggacttgtcgggtcaacagttatgatgtgcgcagaatatcatctcggcatttcctgcttctggccagacatgctgatctgacacgctccgcggagttgaagggttagggttagcgcatcacaatcaagtagcttcataaaccgaatatagggttgtttgatacaccgagccaacgaatggctgctcacccttacctcaataccaccacgacggatataccatatccccctgcaattctccttacgcgtccttctttcatcaagaatctttgtgatcaggtctttgcctctccatagtaaaccctccaatactttcttggttgcttgccttttcgggtttcttctttgacgttgaattcaagtcttctcacattttgcttcccccttcaatctgcacctactattcccatttcccacatcgtccaactcgtctctatcgtcaacttctctcatcttcaccccaacttcctggtatgtcatactctgcttcagggtactcacgtcctcgagaactcgacaatcaagtccaaggccttccttatggtgacgacaaaccttccgcgtctatatccgtcaggaaggacaaaccacgcgactggagagacgctttcctggaagaacctgagataaaggatgggagagacagaaaccgagagagagacaaccgaaagccaacgagggaggattcattcaagagggatcgtgccgggataagtggacggtctgatggaaagtacgatcgaccgcccaaaggagatgagaccgaagaaggagagtgagtacagtttctctcctttatccatgacttctacttcacgtgcccatattctttgcagataagggctatctctcctagtcggcatgttccatgttgacctaacaggtgtattcctactgaattgacttgcatcttatgcttcagaattcccgaacggccctcatcccgccgtcgaactcgatctcccacacctccgcgttcgcgtccttatggcgatcagcctgcgtcccgaggcggctacgatcagacctatcgaggcagaggaggtagaggaggcgcaggatctggaggatatccaggtaatagccgaggaggttatcacaatgcaagaggtggccacaaccaataccagcaacaacaacctagtaacagccagtactcgagtcaaagatctgcttcctcatcagctcgacacaactctacatctacaccaccttctgcgcccaaggctccctctcctccaccgaaaaaggcggaagaaattattgaggaaattccagatatcgtagagttaaatccagaagaagccctggcggagagaagaagaaagaggcaggagattatggctagattttcagagactccaaacgcaacccctcctcctgtggctgttactcccgctctgaaatccgttatgatcgagagcacatcgaatggtaagcttgtattgttacttgttttcaaggagccaagtctgatcggaatctttttgcatactatctctagcttcgacccctggcggtgttaccccttctacaccctttgatttgtcattctctttagaaaaagatgcttcttctgaagcaatccctcattcatcagcgaacggaactttccagtccactccttcggcggaagaagagatctctgcagctgattatgacccttcagctgatagaagagcggaggacatccgaagactgcagaacgagactgctgcaaaggaggcgaggaacatgattactgaggctgagaggacggctcaggaggcagcacagaaggagattgatgaggttggagctagtccagacgaggatagcgatgacgatatgttttcgggcgtcatcaagcccaaagaggtggttaagaagacacaacttgaagttcctgtgagtttcttcatgcctcttttaccttattctggaagtgaagttctccgtttgattactgagtcccaaaataatgacatccaacgtttctatcaaggtcatcacctcaatcctaccctcatctgctgctacattatctgacaactgggatgacgctgacggatattatcgaattatcccaggtgaggtcatcgatgacggtcggtatcatgtgttcaccacgttgggaaaaggaatgttctctgctgttgttagggcaagggttgtcaaacctgggcctggagagcaggtcgggaaggaagtggcgatcaaaattgtgcggagtcaagaatccatgtaagtttacgcgtttgcttttttcgagaagtaagaatagccatatctgacgtcgctttaatctattttcccgtccgccaacgtcgtatcatgaaggttcaaagctggtctcaaagagattcaaattctgaacaagcttcgagacgccgacatggaagacaaaaagcatatcattcgactggagagaacgtttgagcatcggggtcatctgtgcatggtatttgagaacttgaggtttgtctgatgccatctttcctgcttggtgttcagtttcctatgatctacgcctatgtacagacaaatattgactttttgtggatgttttcacttatttatgcggatactatcctcctcccgttcagcatgaacctgagagacgtaatcaagaggtttggtaaagatgtcgggctcaacatgcgagccgtcaaggcgtatgctcatcaaatgttcctggccctctcactattgaagaagtgttcgattatgcatgcggatatcaaaccggataatatcctcgtaagttgtcttctatgtcccgggaagaaatgctttgtttatacacgtccaaactgacagggacattcccgttttggacgtatgtctgtctatgcgggtgttgccgctgatctaggttactgagaacaagtctttgctcaagatttgcgacttgggctctgcttcggacgagtccgagaacgaggtgaccccttacttggtatcccgattctatcgagctcccgagatcagtaagtctattcttgtctgattccttttcatgaatgtgttcatttaacatgaagatcaactttatgtttaatttgattagtcttgggccttccgtacgactgttcgctggacatttggtcgattgggtgcacactgtttgagctttatactggcaagattctcttccctgggcggacgaacaaccagatgctgcaccacatgatggagctcaagggtaaattcaacgtccgggccatcaagaagagtcaattcagagatatgcactttgacgagaacatgaacttcatcagtgtcgaggtggacaagattaccggacaggcgagtgttctaccttcgtagagtatctatccgagttgatagaaaacaagactgatattgatcttgtcttcctctccgaacagaacgtgactaaaatcttgccattcactaaaccgagtcgggatcttcgtgccagactgttgccttccactgcggctcaacaaaagatgaaggatgatgagttgaagaatctattgtcattcatcgatctgctcgacaagtgtcttactctggattccagcaagcgaatcactccgagagaggctctccaacatccgttcctgagatcgtgatcagcgccggccgtgtttccatgatttccccggttttcgatgtcgactcggaacgtcatatgtgcctgattcttaatgtcgcttttcttgctctcctctttcttctttctcggtttggatctatctttgctctcttgtccgctctctaaccacacttttcctaactcggttcttctgacccttctgctattgacttacctactaatgcatgcaaaagagctctgtttcttcccaatgttttattcatcttaaccgatttaagcatgaacatatgcggcgggatttgctcgttaaacgaaaaaaaacacctccaccatattttatgttcttgtcatcccgacctttaacgctcgtgcctccttcgggtcaaggttggccgatcttcaatcgaatcacaatcatcctagacgtaggttaaatctggagcttgtcaatcttgaccgtcagggcgaacgaacagtttcagccccgtcaaccttggcgcactctctgggttaatgacagattaaataaaaacctgtcagccggatatgcctggaacaagagaagaaagacaactgaccgagcgtcggacccgctctaggtcctgtctcatttgcattcacatctgccctgggccctgaatgctaagtcctgtgccctgctctctcgatcatctgccctgtcatgatttctgtccatgatcagtacctttgctttgagtttagatgacgacggcagggcacggccttcacagtcttgcattcactcacccacgctcctctttgtttatgaatcgacaggttggacaagctccggtctctcaagttgacagccaggcacagaagcaagcgatttcaggacattataagtacgacccaggtcttgccccttccccctttctcttccttccctttctccccttctttcttcccccttcttccacgacaagctcttcttactccctccttttctttgctcctcctattcaaccgcaccaagcttttttttctcccatcatcttcgaccctgcagacttcaacgcatccgagtctcaacgaagctctctttctttcgttcggtcgattctgaacgcttatcttgtcagctggacctgcagtacgttcctggatttaatttgccatttcttgtttacccttcatcccgagctcttatctgtcagcatgtatggctttatttctgacttgtttgctatcaccttctctttttcatttctgtgcttgccattcatattttccctttctccctcttccctgtctcttttttctctccttgattcaaatcttgctctggtcactcattgttaacaccataacctgtgtcatctcatccagtttactaattcaacctgattggttcatagccttttctctgccttcttcattcagctcccaacatgctttcccgacctcgaagagcgtccgcctcacatcctatcaactactctgaggcatcctacacccctggaccactcgcaatttgtccttcctaccataccccttcatcgtctacctcgaccgctcttgtggttaggcgccccaaagctgctgcccgaacgggtggcaaaacgtttcaatgcgtaggctacggagaatgtgagatgaagtttaccaggtcggagcatcttgctagacatattaggttcgttaagtcaaccacctggtcggatgctgcctaccttgtcgttaatacttttcttgctcctcatcctatccatgtatgcgctccgttttctccttacttggactgtttttcacttcacaggaagcacactggagagaagcctttcgtttgccactgcagcaaggcattctcgaggattgacaatcttcgtcagcactgcgcctccgtccactctaaccttgtcaaactgaatgaagtcactatccgagcactcatgcccgtccattcggcgctcagtcaacaagccggaagagacaaccaggcttacgtccggtacatcggtacaaaatctcccaaacccacactcaggttgactgaccgacgaatctcgtccatgcggggtactcgatcaatcactccacccgcattgtattctctccctccaactcccgtttcggccatgactcataataagaacatccgcatccaggattatgaagaatcgactccgggtgggacttatgcttccccaatgggctatcctggacacaacgactctgaactcaagtaccggtctatcacctggagagggaacgattcaatgattcctagcatcatccgtcacgggtttcaaactccagtctcagcaggcagcgctgtactcaaggagctgtcgaaagagtgtaccgaagcggacgaggaggaggaggaaaacggagaaggtgggagggtgtacagctatgagagcgaagactctggctcaagccactcagatgacgccgacggaaccgatccgacgagtgcctcatcttccaagatggatactaaacagaacatagcgtacccagaaaatcctgcttttctgctagcttctcaaattcggcctcgccatccacctttcttacagcagcggagtttttcatctcccgacatcttcacatcagtatccggctcaggcgactttcacactgctcctgctcttcatccagtacaacaacagcatcgccactcgattgcccaatgctcacccgattttcaggaccatcgttacgtccagggtgctcatagtcatgtttcacattctgtcgaagatgctcatagccctgctctctcgcaatatgccgggcttgcccaaggaccccaaggtggatacaatctgtatcgatcggacacacaatcccacgttgtgagtttcacgtactgattgctttgacaatgtgactatgatcaggcttactgatgatgttgagggcttgcgcaaacaagaagactgggttctcccacaaggctgaaccgtctcgagatggttcgagacaagtcgcggaggattaccaatcttatgacttcggacattcgtataactacactccggatttccatcagggaggtcaaccaggagtctcagattcgccccatgcttttggcgaacagggtttgtggggattttctcacaacaccaataatgcacatcaaacttccgtctctacggatcaatatattcatcccaatcatcctctacatcaccagcagcactaccaatcgcagcaacattctagtaccgcgtggagatcaactacggctatggcacacactccctggggacgtgatcacggacgtaccaggatgaatcaagtccagccgtcttatgcgccgcacacatcggctggtcctataacctccgcgactaacaacgccaatgtaggtcagccaaacccagctacaggttattatcctcagccatctctttacacaggccctcggcaccctccgtccaaatcaaagaactcagcaattgttcggccggaacctggactcagccatcatcctctgcatacttcttccaatcaaggaaatctctcctctgctgctggcttcccctctcatcaacccaatcgaaatttaacgatggttccatccacgacactttcctctttgtattctcctccgttcccgattcttcggactctgtctccaacgaatcatgaatctggaccccgagcttcggcatccgaagaacaaccttctgccatctcaggaaagaagaggtcggtttctccgcccgatggaggccattatactctagagaatgaaggatatacctatggagacgaagacggtcactctgggtcgaacgggaataagcgtctacggctgttctccgaagcagttgagatagaaaacccctcttatcatctggccaattaccagaatcaggatgaccaagcgtctcatccgaacccgactcaagcaaacctgaatatagtatcttcaactaattctacaggaaacactgttcccactttcaattctgattcttcccatgctccgcctgaggaagcggctacatcgtccagagagatgattgtcaacgaatctaacccgagcgcgttccccgcttcttcagaaggatcaagtaatcacagacctcgtggcgaaccggcgctgtcccaggcggcggaggccaagacagatggattggttgtttctttgtctgatttggcgaattcagtctttgtcaaacaagagatagaggatagattcccagaagaggaggaaccttgggcggtcatcacctcgaacgaggatgcaagcagggagtccaaccaggagcactttcaatcaggtcatactgacatgagtgatttcctgggagactcattcaaataggtttctctcttctcttctcttctctttcctttcttttccttttctttcttctttatctgcattactctttgatatctcatcttcataagtttcttaacttcctgactctcctctttctctctggtttgctttatatcctccttttctgcgtctcgtttccaaaaccaacgtattcgtgtcattcgttcatacccaacagcctatccgttgtaccatcagccaccgtatagctttctcgtcgactaatcttctggctcatttttttctttctatctgtgatctgcggcacctgtcatctggctgtgacctcctttttcttttatgtatcttgagttgctcgtctgttgaccgtactacaaaaccttaccgggttgtataccttcttgcaactgtttttcatgatgtgcttcttctgtactcgttcttacatctttcgttctcacacgtttctatatcatttagctttcatgttgtctttcttgttcgaggggtctgtactgttcatacggaacaaaactaggtgacgatccatggactgtggtttcactcggctcatcaatggtgtttgaagaatagcaagtgattaagcgaaagatcaatcagatggcttgacgtattgtttcctcggatccgaggaaagagcaacccagacgtctatggggatatgtcatgaatgtttcggatctatcacttggatgaatcctgatgagcctcctaatgcatccggccctcctcctttcctcatttctgcgaactgcttcttcatatactccatttcgagctcttgcttccgtctctctccaggtgtgggaagggccgagcctgaagctcgaggcgaaactgttgttttggtgtttggtgtgtctccaagatagacggtaccgagccagccgaaggccatgagaccaagtcccaggaggagtctagtttgaggaggaatagcttcttgttccgaacaaaagagaacgatcagtctttacatgtcacagaaaatactcgagaacaatccttctatagaagaaaaagcagaaatgacagagatgaactcacacatgtatgcagtcgaaagtgtagagaacggactgggtggttcggcctccttggtatcgataatgacatccttgtttcgtcgggtccgttcttcttgttctcttagctttcggacgacggtcggatgaggtttcggtggttgtcgatgaggcccgctaggatttaaaaaaacagagagtgtagtagagaaggcgagttgactaggtagaagcgcgtgtgatctaggcgactttgagaggatctgagagcgaaggatggagaacatcgctgctggcaacggttgatgactaccaacgacgacagtgataatggtgacgatgagggtgtggttgggatcataggaataagagatggacagaaggaggagcgcggggatggtgagcggggtaagtgaacgagaggaagcacggcgaaatcttaacgagcatcgcacgaacgaaacttttgattcaacgatctaatcagcaatctttcgttgccggtccgtttcgcactcaaaccatcatgtcttctttcgctagcgacctgactgctttcagctcgatcaaaccccagccggctgggtcgaacgtcgctttgtgtgctcaatgccaaactgtcgcttcaaagtatacctgtccgggatgtgctttcaaaacttgtgttcgtcaacgtccttcttctttctatctctcttccgtccactttctgctgcgtccgggctgactgtcgctttcggtacggcagtccttggcgtgctcaaaaatccataaagaatcgtcctcctgctcaggagtgagaaacccagcgacatttatacctccaaacaaatactcttattcctccctcgtctcggactacaccttcctctcctcggtcggccggaagacggacgaggtagctagggaccaggcagcctctgccttgtctgaagaagcaggaaagaacagtaaaaggagaatggacatgctgaagagagagcttaacaaggttgggctgggtggcataaagttcttaccagaaggaatggaaggtaggttggcgaacaagacgaggtgggatccaaagtacgtcttccctctctgcttctatatgcgcccacgcacgtcgctttccttatacaagagcgggttctcacatttggttttctcgatggcctgggacgttcttgttcggaatcacttatgatcaggactcaaacgattcaattgacaatatcttttaatgaccggtcgaattctttgcctcctactttgctacattctatcccacttcagcctcagacaacacttctttctctactccctagttctccgtcatctcagacattcccatcagcttcaagttcaaccactgtgcctgagtccaaaccttcatcagagctcacgtcaacatcttcactttcacctccaccactgttatctctgtcgacgactcctctatttcttcttccacatccgttcaataatccgactcaacctcaatattatccacctctctcgccaaccgagccgatcctatctgttctccaacacaaatcgttcatcgagtggcctcggatcgaactctgggatccttcagagtggtctcgtgcactagaaggagagaccgtccgagtcgttctgcctctgagcggagagaccggcgcgcagggcgaacagctagaagcagatcccagacgtgagagtggggacgggggaagaacggggaaacgaccgaggttcgatgatcaggtcgatagtggttggggcgcgagggctggaacgagagcgacagcggcagcgatatcaaccgacgaagataagacgacagacatccttcccgacaaagaacaaacagataagaccatgccgcctgcggtgatgcatgctctcgtcagggatggtctgggtctcttgggcgactatggaagtgacgatagcgacaacgaggttgaccagtctgtatgaattaactctgtagagcaaagagtcatgtattatcaagacgtgaaaagaggaagtcgctatcactacctgatgaggccaggctacagatatcggtgaacgttagaaaggataaaatcgttcactgcatgtaaaaggagagattgtggcaaaacacaaggaagatataggagacaaagatagtttgacaaacaaagaaaaaggtattgcagacttatttgagaaaagtgatcgtaagatagtcattcaagatagatgaagaaacaacaacaatgatagaagagaggaatatattcaagttcgacaagctgtctaatttagacatcgaaggcttccgatcgccatccctccttaccggcctcctctcgatgctccttcttggcgtgaagcgaagccttgttgacctctcgctgagcgtcaatcttaagaccgttgatttgagcggtggcagcgtcaattcctccaccggtttggagagcgctgacagcctggttgtaaagaccgtgtcgcttggagtgagcgttggaaggtccggccttaccagggaagagctgctcgtcaacgccgatagccaacaagaactctccctttcgaccgtacttcacgacacccttctgggtgaccttagtggaggtgccgtaagaggatagcagtgaatcgctaaagatcgccttgaggtagttggaaggcgagggtcgagcgttggtagcagcgatagctctctgttggagtccgtatagccggaaatcagcatccttgaggtactcggtgatctggtgctccaacgaagccttgaggttcttcctcaagagacccgacacgaacggccgagagaagtacaggagccaagagctgttcttggagatcgagtaggtgaaatcgctgatgtcaacatcgacatccttgacaatgaagaactgttctctgtcgtcctctccggcgttctcaagggtgacatcaaaggcaatacccttgttatcgaaagcaatctccaaaagaccttcatcctcaaaggtggggaatccgctcttcttgttgacccagtagctgatgtccttggcgtggaacttcagaccgtcaacgtggagcttgacggaagtatcgtagtcggcagcgaaagcggcgtatccctgggaagcccggaaatcattgtggttgatgattcgaatgttatcagggatgaaggaagcagactcgaaagagacgtcatcaatcacgagatcaacagcctcgctcttgaactctgtcctggggacaggaatctccttcacaagagcaatggctcgaggaaggacgacatcaaccaaatctcgccagagaccgagagattcggctgtatagtttggcgacaacaagaaacgtcagcatcttctaatcagatcaggtttgactttgaagcagaatcacgaacctcggagggcattggcaccggtctttcctgcgtgctcgacctcggtgatcaggttctcgatcttgaaggccaaatcaaccatggcgtcatcgtcggcaacggcgccaaagaagttttcaaggtgctcaaggaactctgaaatgtctttcttgtactgctcgtttccttgagcaaggtcctgtcctcgctgccaaagatcggagctgcgtcggtaggctcgctgggaggtcacgtaaccctcgaccttgagggaggcctccaagaatcgaccgatctcggagaagtaatccgagatctctcggtcgttctcgacgtccttcttcaaggtcttggcagaatcaaggacagggtcgaaggactcgccagaggcgaaagtctcaagaatgagcttgccttctccaagagactgctgcaagggctcctggtcagcctcttcactggccttctggctagcctggtcgacgagctgctcagccttggcaaagtacttcttgatgagaccaaggatggtgtcaattgcctgttggtattcctgtatgtgcagtcacaaaaacgaacaattattagtcgcacgatatatagcaggatgtggtataatttccacgtacaggctttgactgaatatccttgacgacagcattgagcttctcgaaaagcttatccttgacctcctggtcaccagtaagcttgtcctcaaagtactgtggatttgaagaaaagatgttattacgacaaacttgtatgtttgacaagagaattgtaccaacctcagcaagtccctcgaactgggctccgagctgctcctgagccttaccctggagtcgtccagaagcaagtcccttggcaaccttctttcccttcttcttctgagcctcaagatcgataggggtgttctgaaggtgaagtgaatgttagaacaagatcgtcagacacaatttataaatgacgtcatcgaaaaaaaaacacgaacatcgtctccagtctctcgagcctgcttctcgagctcagaagcctgctcggcaacggctccgctggcatcggcgacgatagaagcgaacaaagagatgacttggttgagaaccaatcggaactgtcccgaggtcaagaagagagacccaatctgttgaagcgagttaacggccttgtcggcgtccttggagagctctcgcttggccttggcagcctctcggttgttaacgagggtggaggtagaagcatcgagaccctgtcggacaggagaaggagcctcgatttgagtgacatggtaaaggaagttctggatcttgtcgtcacctataaacacccacagaggtagtagggcaaagcgcatgtagatgagcatccgctcagtggttctagacacaaagaaggagaacaaaacgaaccgttcttctcatttccgacgacaccgatagcactgacgacgtcccgaagagctcggacgactcggctaccctcctcgctcaatcgaccggtccttcctccgcctcgaccgataccgggagagaggagatctgaatcaagggccttggcgagcaaagcgttgagctggctctgggaaggcagcttgccagcctggaaggcggcgatggcagtagcaatcttgaagctggcctttcgagcctgatccttggcctgatcaaccgtttgctggttgggctggaggtgagtgggaagaagaggagatcgctcggtggacatagtgaaatgtatatggaatgtggtagtttagtaggtggtgggtgtagagtttcttaagcttgaagctgattcgttgcaggcgtttgtttgatggatacagttagattaaaaagacagggacagataagcaaaacaaatggaccacagcaagagagagtgaacgtcaagagatcgaagagatgtggaagagaacaagaaagggagaaagaaaagagggagagatggaaaccgatttgactggccagtatttatacggagcggacaaagaagatagcaggctgggcgacagtgagcaaccttttctttctctctctcgcgccaccgagcggacggatgatgatgatgatgaggagcacgtaccgaggaccgcccagggcccaggggcccggggctcagggcggggaggcttgtgcgttcgttcctcctatgacatcgagtgcgctcgtgcgctcggcttgtcgcgtcaccgatgcaaatagatgagggcacaggcacagattaagttgatcacacgatgacctcaccgacagcgagacgagcctgctcgcatttgcctctttctttttccccccctggtggcctagaatgtccacaatttgttcctggcgcgcgatcgagttccgagcggttgccgtcacgtggaaggctgacgtcatctctcatcttccttcccactcccctcgccgtgcctgatctacactttctggtctgcacccgtatccatccaagcactgctcaaacctcccacagagtcactgttctaacggcccattcagtctttctgcccatcataatcattcctctcaaaaaaaccttgcagccgttgaaatatctggtccgtgtcatgtcgtccaaagtcgcatctacccaagcaaagtcccatgaggacatcatcaacctggccaaacgcgtgagtggtttctgggagctttgccgatgagtatgactatagagcatagaacgacaatggtatctgccgctaacatacaaaatttcaacagtttgtgcctcctctcaggtatggacaagcaacaaacacagacagttagcaaagatcagttattcggctcaccttgatctcttcttcgtcaacttttagctcaaagctccataaaggacaggccggtaagcagaaagagatgtttcgttctctctgttcggatgcatccgttcaaggtagaacacggctcatcgatactactacttatccttccattttataggtcggatcggtgtcgtcggaggttcccaagactacactggcgccccattcttcagttcaatgtcttctatgcgaatcgtcagttcattgtctcattcacgacatacgttaacagacattcatcccttcaggatgcttattattctcgtcgtctttttctccttcattagggagccgacctggcccacgtcatctgcgagcctaaagcaggttcagtcataaagacgtactctcctgatctcatcgttcacaccgttcttgaccctgccaacccgccaacagaagaggtcctctccgggatcatctccagacttcacgctctcgttatcggtcccggtcttggaagggatgacgacatgcaaaagtttggaaaaatgtgtctcgaggtggccaaaaaaatgaagaaatgggtcgttttggatgcagagtgagttcttctatccgttccatgtcgacatatacctaggttgatactgaacgctatgcttgtctcgtgtcggatcagtggtctctacatggtcaccaacgagcctgatctcgtgaagggatatgaaaaggcaatcttatcacccaacaaaatggagttctctcgattgtgcgagaagttggtacgtgcggacgcatttggtttgacagtacttccaactctatatatcagatcaattctctcaacatgtgctttcctcgtaacagaatatcaagtctgatgccgacccgaagactctctgtccggatctagcatccgcccttggaaacgttacagtcatccaaaaaggagcaaccggtatgtgtcttccgcttgtctgccatatagctctccttcagccggatttgaacaccatcattcaatcacccccctcacctcatctcctcttcttacttacggattaaaaaagacatcatctccaacggacgcccgatcgagtttctcgacagctcggtcgagaacaacaagatattagaaaacaacaccaaaggcggcctcaagcgatgtggaggacagggcgacgtcttgagtggtacggttggctgcatggccgcttgggcaggaatgtgggcagaaggagattacaagttggtgtcatttcccatcgctatttctatcacttctaagcatgtcgagttcgactgaggaaatactgatccgtctgtattatgacagtgatgtgacaccgactcctccgggcaaaaaagaatccttcgcccctctagctttgctcgctaccgtaagtgttactcccagacctcttttccttcttcatcggatgaccgcttcacaacttaatccttggatctccatcatctgaaccattcatgccactcgatcagtacgctgctgcttcagtcactcgccaggcttcgagaaccggattttctaaacatggtcggtccatgcagacatcagatatgtacgtctcgcctatctcgtctcttcttgatgtttctacctccgtatcgctcgaattgttcctaaaatattgttatcctttgatgttggcccgggttcagtatacaaaacgtcggtcctagtttcgagatcatcatgggctcggacgacaaaggagagtctgaggactagatgagccctctccggatcctatatagaaccgggtctttccctctttgtgtatccttttctccttatgtagaccgaccagaagaaagagaaatatagttgttgttgttgttgttgttgttgttgtttttattgttttttgggagcggttttgcctgttatctcgtttttagaacgtatcatttgattcaaccgtatttattcccgttacgtccgtctgtttgcttcttcgagttaaattccatggccttcttggtctcgtctttcttttgaacgcgggtcagagtgggttttgatttgatacgatcagcgaacatccataaaatacttgagagcgctgaccgaatatcactgtaactatcagaatgggatacaacaaaagaagaaaacatctgaggactggtcctggatagacagagacctgcgtaggaggggagaaaagaacgatagaggagaactgaaaataacatatgttgaggaaaacattcctaatcatatatcgtcgagagcgccagggtgccaggtcaagcacattattggtaaccaacgatagacttcgggacgtaaggcttggagatactctcgatctcttcgtccgtcaatttgaggtgtattccatctaaatagccgcgtgttgaacagaaagaaggatgaaaatcatcacctcagccgtacattcaaaccaggttctctagctgcacttgaatcaaagaagaggaaaataagatagacaaaccgatgagttcctccaggtggctgatcgaagttgaaccgatgataggcgcagagatccccggttgagcgagactccaagcgagcgctacttggctcatcaacacacctcgctttttcgcgatagcctccactctgtacatcatttgttattagatatgagttgatccgtccggtagtcttaaaagggatactgtgaagaaagaaaaacatacgcttggttgatggcagttcctgcttccccaggctggtgcaggtttcgacccttgaatccgctgtcataggcgaaagtgtagaaagaagaggcggtaaacatgtgcttgggaggaaggccaccaagatggaatacacacgtatgaatcaacttacggatccgcctcgcttctctttgtctctttaccaataggtcgagtcaacatccctcgtgccaaaggctacacgaaagtataaataattcagctccgatcgaacccagctctcacacagtatcctttcatgattaacggtcccgacgtacagaccacgggatgataccgacgcctagctgtcgacacaaagggatcatctctctctctgaagaggaaccaaggggcgagacatataattcacaatgtctgtctttcagcgcacaaatagattgatgagtcaaccaatgagatgaacggtactaaccttcctctcgataaaaagcattatgaaagttctgcattgatataaaaggggtgagcttattattgatcgcatagttctgcatcgtatggactggacattctcattgaaaggcgcaacatcagtcagtcgatgttttatttaaataagtgaagatatgaataaggaaagaaaagaaaaaggctagaacatggaagaatcgtacattggtacgcataacagctagacatgccaacatatcgaacttttccagactggacgacgtcgtgcagagcctgcatggtctcctcaataggcgtgtcataatcgaaccggtggcattggagctgcgaaacaataacggataagacttttcgacatgctgttcgtgcaaagagagcgctaccaaaaaggacatactagatcgatgtagtccaactgaaggcgctccaaggatctataacatgaccagttgattcgtgaggatccaggtattcatctcgaccgatcatacgactcttggactgaaaacgatcaaggcatgtactgacctttcaacagaagcaaagatgtgctgtgatggaaaagatagaacaagatggaagatatttagaatctttcgtctctcaacttgtcacaaaaagacgtctatgaacaacctttctgcttagaccttgctggttgacatagcttcatatcatgagaaacacagaataaggcccaataagtttgacgcaattcactgcttgttgttcttttcaactatctctgcattgaacaaaatgacgaaccctttcttctcggcctccactctaccactaatcttctccccaggacttctggtggtcaaattgtaaacctggtgggatgtacaagttaaagaggattgtaagacttttggtcggtggccagataaatgagaacagatcaagtgtaatacgaactttggtcatgatgaccaggttgtctcgaggcaagtcatacttcttgatggcctatgagtgatttcaaaagacatatagaggtgagcgatcatggtcgagcatatctctgataaagaaacaggatacctttccaacaatgatctcggattgctgattgtcctcaacgcaacgtagatattgatgtcaacaaccttgttaactacagataaggaaatttcgtatgactcacacccatggagtatacatcggcggtatctatttttgacgaagtgttggagaggactattcatcagatatcatgtgctgcacaataaaatgtccgatgattatccgaacgaaccccatgtctgaacacctcggtcataagcaaacttgaaatgaggcaaggacgcttcttcatcgaggacctagagaacatttcggttattcttctctgcacgttcttgtcaaagagaagatgaaatacaagcttacccaatcttgccaatccgcatctccgtaggctgagatgggaaacaaacatccaccgaagagattgcaggtgtaccgttgtgtcagttgcgtttctaatcggtcagtcgatcagatagatatatgtcggtatatcacatacacatgcatcctctgatagagtgtgacacacaacaaagcagatgtttaactggacgactccaagcaaccagatctgagaaagatcaaaagctcttgagctcttacaggatgatcttggacaccttcaagcccgagtttcctaaccggacgtactccatctaacaccctcacgaggtcagtgagaactttcgtggatagaagagtatacatacaagctcactttgttctctgtctgttcatacatagtggatgtgttcttgcgatggctcaagtttaagaagagatatggtggtcgtcaaaagtcttacccaatgtcgattcgagggaaatcaatgaatcaatcgggttaggccgagggttgcaaagatgtgagggttattatatttgcttagtcagcttcagggtcaagctcttgtctttctctcaggcctgatgatgaacacggagacagctcaggtcttgatgtctaggagtggaacagagaataaagacattcattgtttgggttggatagcaacagatttgtacttgacgggatgacggttgaacatcggccacggaggaacaacgacctattcgtcgaggaacaggtgttagtgaatggaaggagtcgaaaccaaggagagattttaattgaaagaaggatatcgagggacgcaccaggagaaggacaaagaaagagaacccaaagatcaccaaagacatcctgatgtcctgcagtactagacccacaaggaaggcgatcgtctgagaaacagttgagagacaacgcagcagatatatgggtaagcgtatgggcgactagagcgtgtgaggagtatgtgcttacggccacaatccctaaagatagttgtgcggttcgatcgacgacatgctggccgtagtgatcctagagaaagaagaagcaaagaagcaaagaaggaaagaaggaaagaaggaaagaaggaaagaaggaagaccaagtcagtcgtttgagctgactggaatgaaagaatctcaaactcttacgattgttccctcgcacagatcagagacttgtttgatgaatgcatccatcctttgtgtgatctatagcagctaggagtcccgaaaagagatacaaaagacccgggaggtcgaaacgagatggttgttgatggtccggaggatgtttccatcttgatcgggcgagtccgaacgaaaactctcttttctcgaccaactttggttttcattcatctttctgtcgcttgaagctttcatcatacatactgttctcttcggtacaagatccatgggtatcatccggtcatctgactgctcaaagctactcttgactctagctgctgtcttctttatctcagccctgcctgtcatgggttcatcaggagaccgcttgccttccttccggatatgcctagaggactgcacacagagctgtacacctcatctaaaggctatcaccacaacagatcctttcctctggctgactagatggacctgtgtgagtgttgaaataatagaaatcttgatgtccggttgtcttgagctttgacatttctaaaatatgaattttgtatttgctcttctgaaacccgacatcatcctgtacgattctgtcgctcgacatcatatgaatccttcctgtggttctgatgatcgataaacacaaacttggttcgaaacaacctttaggaagacgaatgcaaatacgattgtatgaacgatgtcgttcagatcgaaggcgttcagcagttctatggaaaatggccattccgacggttcgtccgtcatttcgttctcttttgtccaagacaaagagctcactttggctttctgtcttcactcccctcttatgatcgcgctttgtatccaatcttgattcaccctccttgaaaacttcaataaaaacttgcgcgctgatctcaccggagagcaggctcctaggaatgcaagaaccggcgagcgtctttttcagcatagcaaacggtgtcatgcacttccgaggaatccgttcgtcaagtcgacggatcccaaaatcaagtcaattgaggggctggtacttggcttgggactatgcaggtctcaatacttgggtttggtccagtgttttccatacccgaggtctgtttacgttcttcctctcgtgcatttctttgggtgttcatctttgagagatacactgaagcagtgctgttcgttcgtctttcaacgacatgacagacaaaccatggacagaaaagatggattacttttctgctggatttgggatcacgttctcgcttctcctcgccatcgtccgaatttggcacctttacctccctccttcatccaccacttacaatctctcttccactaaaaatctgagcgcaggaaacagtttaggcgcgagtatcggccattcgagaagactacagtttaacccatgggctctcttttggacgatactgtttgggacaatgtttgtgtgtcatgtaagctatttgatgactcatgttccatttgactgtaagtcattttctcttttctttttccttcttcgcctctagtgacggacctctcaagaaggatggaagagaagatcgacgacactgagatcttgtttttgatattgcggggaatgaaatcaaagacggatacaatattgtgagcaatgtgatcatcggaagtacacataaccttctctggatgctctggtcttttttcccatccctcccgttctttcctcctccctacctttcttctccttccctttcttcctcttcggactcaagtccaaactcgaatatagaccgggaggagaggagaaagcgaccgtcccatatggcccggccagccctgattggtctcctcttcaccctcgccatgtccttcgagctctttgatttccctccgatactggataggacgtttgatgctcatagtctttggcatgcggctactgttggcatcgtcgggctttggtatagcttcctgaatgacgatgcgagatgggtaggcaggattggagagagggtttgaggtgcgctgtcatttaattaatcagatgaactatcagaaaaggagagtagagcaggaagaggttgaagaggagaaggccttctacaagatatgaatacattcctttctttcttatggaagggactaggtaagattacaaatcgacagttggaatacgcgggacaagaagaggaagatgagaagagaacactatatatctacaaacgaaaaacagcatgaaacacaagacaaaacacacaatattgatgaaatgataaaatacaagaaaaaaaaactacatgaaatgaaacgtcggacgaatcccacgttcggggacatgtcgaagggacaattgctggaatggttcagagttcaactgggcatataaaacacgaaagagcaagaagatgagtatcaggacagacagagtactgcaatctctacgtcgatcgcgcgaggttcgccacgccacaggccgtcttccacgagaacaaacggaaagaacatacatgatggaagtagaacccagtcatcagttccccaccacctatctcttcaccctcaccgtcttcactttcttcttcataccgctcatcatcctcatcatcaggttgaacatcggggccgacattgtttaattgtcggccccacgcgtccgttctaccccacgctcgatcttccgatatggtgcctctcctattagagccggcgcttgctcctccagcgtttgtcgatgatggaccaaaccatgtaacagattctcttctgttctgtccgaaatgactgatccctcgagaatccctcgcttgagcgctaatatccaagcctagattcggaataggaagacgtgaggcggaagttattgtatgccccatccatatgtctaaccctggacttgacgaggataatgcggagttccatcgacgccgtgttgactgaagggtagagaacggaggtaggggcggtgatgagggaggaagggaagatttggatatatttgttgatgacgaaggtgtaaagtcgatacagatactgcaatagaccgatgaaaatccgattagatagcagtagagagaagcgaggggtcaggcgatcgataagaacagacgaactagtagaatccagagaacgaagcgccttcgaccgaagactttttgtggtctgatagagcgataaaaccgaaacaaacacaagagtcaatcaagaccgatagatggatacgagatgggctaggtgatgctcaccaggcaccaaaaatttttccttccatctcatgaaaactccacctcttgcgcctgattcttcacctacgtcaccaaccacgccggccggtccgacgacacagtcatccatcttccgctcttcccgtctctgaaaaccggccttgaggggctgaaacagcgggaacttggaccaatgggccagatctgtctgagctgttgcttcccactgcgagaagagatcgagagagagaatgtgaagatgaataaacacgacaaagagacggatgacgagaaggaggcgaatgtactcacacgattggtctgaaagctgaatttggggccgatgatctccccttcgaaaaaggtggtgagcctgagaaaggagatcgcaattgaaatcgtcacgtctggagttagggaccatcgatgcggagaaacgcaagaagaggtacacaccaaggaaactcttctgtcaagccctgaatctccagaaagccgcagagtgtgccttcatcccagtcgacatctttgatgatgacttgaacgttgtaggcattcttacccgatctctgagttcctctaaatttagaacctggatatatgcatgcctgaagggagagggagagaacagcgatttcgtcaacttcaattcctcaactcaatagagcagtctacagaacgaatgccacgcacatgacctttctgaggagagggcattcgatggtttgaggaaggacaactctccggtggaggcagatacgatatggagggggacggcttgaacggcttaggctctatcgaggtcgatcttgtcgacgacgcgactgatgacgacggagaagaaggtgatgacgaagttgaagctgacgaggatgacaagaatgcagaaagagtggaagatgcgggagaggaggacagagcgtctggagaatgggtttcagacgtcggagaatcagaaacagacgaggaaggatgaaggagagatgactttgtagacgggacatccgttgtcatagaggtcctggatggcggaacattggaaagcaagctgatgggcgattggtcatgagagggtggagaatcacgagctgcttcatcctgggaaggtagacgaggctgtgacagagttggacatggcatataaacgtgttcttcagatgggtgcatatgaacatgagtggagcttgagggttctgattgctgctgctgctgctgtgagcttgctgtcttgtccagctcaccctccgcaagagggaacacgggtaagtctatcgatacaggggtcgatgcaagattcggaacggctgtgggagtggacgtaggcgtagaggtaagactaggagacagcagctctgtcagtgtctgtaagggttgaggcgagctgaacgatggcatggatgtcgatgtcaaagacgatggttggcagataggagattgaggaaccggtagaagcggtcagggcaggatgagcggggaaactgaacttaggtaagcgttatttgaattaccagattcaaatattagataagcctcgtagacttatctctacccgccgacgtcattcgttccgttgagccatcaagaaagcaagggagagagcaagcagagttttatcatcatacactcatcctttgactatatagatacacaggatgatc

SEQ ID NO: 2163 - DNA, 69349 bp, Xanthophyllomyces dendrorhous
caggatgatccagctactatattcgttcgccaggttctacaatgattccttccgtcgttctcctggcacgactttggctctcaccaacggagcgctcaccgggtttgccgatgcggtcgttcgtcttttttcttctctctctcgcgccttctcagcctcgtcgtagatcactcacatcttctttcttttctcgtatcaggctcaaacgacccagataaaggtaaggttctgttcggattagaaatgttctgttgcgtttgtgttcgaaaacattcctaaccagatggctcatactttgacactccagtttcttcatacgggcacccacgagacaagaccgatctacgatccatggcggacgctgagattccttgcgttcggtgtcgccatcggcccattgagtgagtgttggccgaaaatcgaagtaacagctgaatagcttattgaatctttcttggtatttctctatcagtcggcaaatggaatgtcgttcgtccttcctcaaagccaatctctgtttctcatcatcgcctcttttaatcgttccactaacgagctacctcaaaatcttcccccaacagatccttgagaagaactttccccttcgaccagctacggccaaaagcatcctgacaccgtctaattctggagctaaagcggctggatcgattgatccaaagccaaaggtttccctcgccgctctcggaaagagagtctttgccgatcagagtacgtcgttggcgttgctctctgttcttcaatggccaacttgtgaccctgataatatctactttgtctctgtttgttctcagtcgttatggctccaatcggactggttctgttcatcggtacgatgggcgctctcgagggaaagtcgatcgatgagatcggaaataaatacaaggaaatgttcggcccagccatcgttgccaactggtccgtttggccggcgattcagctcatcaactttagatatatgcctcttgcctacagggtacgtctatcgttcatcttttcctccttcttgtggtttcgttctttgccttatcttctcgtcttttctttctgcatttgcttatccacgttttatccctataggtcccctttcaatcgtcttgtggagttctctggaacttgtacatctcgatcctcaactccaagaccgataaactcgccatagcggaagcagagaagaatgcgttgtctcttatctagctcctgaacgttctcgtctttccctctttcttttcactctcatcctccatcttgctctctgtcgctctctttcattagatccatgtcacttagagtagattgatcaagtagaaaccgtctctttctcccttatctccatagatgtctatccttctttctctctctctctctctctctctcttccttcctttcttttctctcattagctcattttgcctccatggtaaggtcagcctggacaaaagtcatagatcaatcgtctttaaaccattgactgttcgtttcttgttccgtttcacttcatcggatctgtgtttctccttgtgttcttagtagtgtggcgtagctcgcgataacacttttgtagttttcagaacttttggttgcctcaatatttcgtacctcccatcttgatatatctctcttcatccagctagaatcgaacgagaggccgaagcaaagaaaaacacatatatccatatcgctttttttttgtctgtctagtaaccaacagggttcacacggtgcgtcaactgtttcatgccaaggaccagaacacaacaaaaacagggtaagagaggaaggagtaagaatctgaaggatgtgaacatcgtgcaaagagtaaaacacagaacaaaccctggtgaacttgggaaccctgttgagcggtttcctgtatccaggccacgtcctcgagaaagtcgtgtacttgtctgtgcagttcagaaatgcaaagatattccgtcagtcgaccagtcatggaaagtcattctagacgacaagaaaggaacaagaggatagagttggttgtactgaccgatagcacgcatctcgctctccttaggcagggccaaacagttgtcctgttgttttgcccgtccccaaccaaattccaagataagtaaagacaaacaaaaagttatgatggatcaatggccattctgattgagtcgagcattgcatcaaatctgtccttaaatgaccgcagaaagcacgagacccgttccaaacaggacgaaatctctagcccttcatccaaagacgcaaagaggacaaagcaggcagacaaccaggggaagagacgatacgtacgagcaacttgagcttgacaccactggctctaacagcctcgatcacctcgtccaccgtcttgagtcgttttcgctgaccggccttttgacacggtgacatcttcgcgttcactttgctgttagtttgatgaaatgcattgtgaaagagggaattgatcgaattcaatcaaacggcgaagaagtcgggagaaatggtgagtaggataaagaaaagacatcggacgaatttgatcaagagttatataaagaagttgaactcgaaatcacttaaatcggaactccctgcttctcaagcaagccgtttgagagaaacaaaacttactggacaaggcctcctagccgggcaagagaagggaacatgttggatagagagactggttgtcgatatctgatggtcaaagcatgcgtttgaaatgtacggggtgaaggaggcaaggaagccagatacccttatataagatatttatgatattcaaaaatctatttgtgcccatcctcatccttctctttgctcgttttgaatactcgacttccatcccatcagacaaaggacgatcagtcttgaaacacgctacaccaatgtctctggttctacccgcacctgtgaatgatcatcaggaagagattcttccggtgtccagaccggaggaagggacggatgggaacgacgtcaacctctcagaaagtgaaaggttgaaagcaaagctgatttatcctccaccagagatcagaggtacggctcttctttctctcctcttcttgttttcttctttcgcccaagtctggtatcttgtgggactgaggttcatttatcgctcaaagatgaatatgtgtctagttgaaattgattgaatgcttacttgtgcttctcgtttcaccggcttgggtttcatcttccttttttcttaccctcttaaacgcgatattctagttctcatcgaccgaacctctgccgctcttcaccgatctgccaacccgacccagctcgagtccaaaattcgagaaggccaaaaatccgatcccaagttttccttcttgaactcttccgacccgtaccatacctactaccagtactcactcgcccgacttcgagaaggatttgcacaagacggagcggctaccgctgctggaacaggtgatggaggagatattgatggaacaggcgagagaaaatctggtgctggcaaagaagatgatctggcgggaagaccggttgagcccaggaatttggagtttttagtagaaaggccgggaatgccttctgtggatctgtgggttttgcttcaatccaacctttctgtcttcttttctcgctattgaacgccatgttcttgaactcacgcgtcttattttcgttaaacatgaccatcattatcttcagagatattcttaaacttaccgcccttttcaccgctcgtcgaggtcgatctttcctctcctcgctctcccaacgcgaaggtcgcaactatcaattcgactttcttcgaccgacgcactctctctatccagtatttaacaggatggtccagcagtatactagagtcctcgttcctccgcttgaggcccttgaggaactctctctgaacgctgagacaagaacgggaagggagaacgcgttgaaggactcaaagatcagattagaatgggagaaatggagagtcgatcgagcaaagaagagagaggatcagaaagaggcccaaagaggttcgtcgcgtcctcttcagagtgaccacaataggttggtgaatctgacctatcgattctattctgtttatactcttcgtagtcgcgttcgccgagattgattggcaagatttcgttgtcgtcgagaccatcgattttaccaccgccgatgagtcaaccgaactgcctacgcctacatcgattcatgacctcgagaacatgaccctcgcccagaaacgaatggcttcccaggtcaatgaagttccgctcacagctcaggagcaagctcagtatgcccaagaggaagctgccgaggaacaagtcgagattgttcagattgatgaacaatcggaggaagacaggttgaggaaagaagaggaagagagagagagagagagaaagaaggacgttcagagaaagtttgtcgagggtcaaggaccgataaagatccgaaaggattatgttcccaagtgtgagttggtctattattgatggatcggatagttctttgttcgctaactccgtctcgttcttctatactcgaattagctcgacaaacggcactggctgttccgacgacaatctgttcatactgtggacaggccatcccgattgacgagatcacggagcatattcgaatcgagttgctcgacccaaaatggaaggagaggaaagaagctttggatgccaggaaagctcaggccggtctgcttcagcaaggttcgccctcactcttgatttgtgtttatctaagaatcgaagactgattgtccgttttacttgcgcgccacgtatatatcaataggagccaacgtgtccgcctccctccgagatttggcctcggcacgaacagacatgtttggttcgacagaggacgagcaggcccgaaaggtcagagaagagcaggagaagttacagaggagggaaagagaaaagatgggttgggatggacagtccagcacaaaagtatctacaatggacaagttccagcaaaacgcaaacttcgacgaacaaatcgccgctatccacaaagcgaagggattggccatgttcgttcatatatcattttcttgttccttatgtatcttgtttgctaaattagcttttcaaatcaaatcgaatcagtgtggaagatgccgctggtcccattggacctggtccgtccgccttccctgtctttaaccctgctgttccgcctcctcccatcacggcccctgttctcaatcctaatggtgccatacctccttcgatctaccctaactatcctcctcctcctttcaactctattggtgcacctactgcccttcccccagcatctactccgtcggccgctcctcaaggtgcgccgccctcgatccatccatccagaatggctgtcatcaacggaggagctccccatacctccacagaaggtgcaacaggagaaaacaccaatggcgcggctgctaccggatctgtcaggtccagagaggacgatgggacagaagggccggatgcgaagaggagcaaggttgaaaagttgccagacggtcaattgcattctgaagaagcatggatcgcttctcatccttatcccatcactcttcaaatccagcttcccaagattgacggcaagcctgaacttgatggttctttgtacgttaccatcttcttcactctccgatttttctctctaatgatgtgtatcggtagctgatccttcttcccctttaccactgacttgctcgaatgccaacagaattactctcccagctctctccctcacaacgaccgtcggaatccttcgagagaagattcaagaagccacccagacaacccttacgctttccaagatgagactcgacctgccgaatggaaaggtgctcaacaacaagagctcgcttgctagtctgaacttgacttctggggattcgcttactctgggagtcaggaagtagagcgttggtagatcgcgcttttctggagcttcctcctttttattttattttgttatttctccctttcttggttacggtgtttgcttggctgcagatcatgttgatttcccgtgaggctgagtatgttgacgatgaacttgggaacgaggtataccggtgatcaaattcccctaaaagttcacctctttgtatttgattgattttaaaaattatactttacatattttttttcttcctttatcatttcttccacgcttgataataaacggaaggggaaataggcttggttgaacttttctgtctgtgtacttgtcgtacgactgtaattcgtcttcaggcacaaaattcgctcattcgtggccaacaaggagaggatgtcatatccgactgttggctgatctctgacacaaggcttcccatggttcaaccatatatccatatacataagatcgtcaaatatggacggagcctcaagtccaatacacaagaaactttcatacgcccaggatacacccaactgaccaagcatacagcggaaggatcagattgtcattttggaatgagagggcttcgagcagacaagagagaacgacagataacgcgaatggaagatactgttgttttccgagatacatcatccggattgatagagagcaacgaaaaggtgtgagatcagagaatatcaggtcagtgggctagaaacagacttggacttacgttgagcgtctcgatgatgccgaaaagtcttaggattagagccggcccgtaaacacccacaaagaaggccatgctgccttcgattgtctttcctgatgaaaacgaccaacggcgttttccaatcgatcggcctacaacggaagcctagaacaacgttttaaaaacatcatacatcgaaaaaggaaaagaaaagtcagtcacagtttacaaataggagtgattgacttctcgaacgtacgatcgcatctcctattcccaaagtcagtacgccgacataagacagtattggcgacggactttgagagtcaaagccatggtcggcgacatgagtaaacacacttcgaacaaacaaaggaaagagtggaagataaacgaacctttccaaccaggcgcccatcgcgcagcctgtcaagagataaaagtggctcaaaattgccgtgcccgaatccttgtgatcgaggaattcgttcaagaatagatgaactgaggctccaaacggatacagcgcgaaatatcgaatatattcgacaaaaacaaacgaggcgaatgcaaaagagaaggccagatgagtgaacgccggctatcatacgtacacaaagtataattaagacgagagaagggttgatcagcttaaccattattatggcaatttcaaagatggataaggtagtgaagtttaggacgaacgtcaacatataatccaggaacgaacatgagtacagcgagtccatgaaagaattttcttcggccgtttagactgaggactggcacccgaccaatcatttccctataacctgatccaactggttctgttgacccacccgacggggtgactccagatgatgtactacctttgccaactgtaccagcttcatcgacaatatcccctcgtgtcttttctctcgatctctcaactggggactcattgatcccagcaggtgagcctgtcctagctcctcccactgcagacacaatgccttgcctggatcctggtccagatattccactccacggtcctcgcttcctagctttcgtcagctgcatctcccatcctccaacactaatcacagctaataggccccagtatcccaagagtgccagacgggtccaccatctttggccactaactgtccagagaacgacccatacccaaggatctctccatcctagttgccaccgggtccaagtcccaacagcgccaccgacgatgagtatcgtcccaccatagaacccggcagcgagcgctttacgttggcgctctttctgttcaggataccgcagtcgacggacaggtctttgagatatgtatcgtgaaaggacgaggagtggcgaaagaagaatgccgacaagaaaagagccgggaaggagggcgagttggaagatcaaaagaggagttgggagccgatatgtttgaaagtaggctgtggtaagaaatcgaagagagacctatgtgaagagggcttagatcatcagttacgtaccaacaatttaaaaacgagaacgaaggctaggagcttactctggctctcgttaaattgatagtttccatgaatagcgcggtcgaaaattgggaaacaatcccaagctcgccgagtgtgaaacctttccgggcaagtcggacacatacatacattgagaactgatgaaatagcgaagatagaaaaatgtctatgacgctgacacctggatgttcatcgttggtgttcgtcaagatcatcaccccaaatcagttgtttaactttgttctcaattttccgccaaaaaagctatacaaagcaaaacagagaagactcactatcccaaaggaagataccgaagtggctcatgaagccttgtaatatgcctagaaatagactgaccccgaaggcgagtgcgaccacacttccagttcttctccactcgctttttggcacccaatgtgacagcttcgtttcggatcccttctctgagaatttccctatacgtcgcgatggatgagattcggtcacacctcctggtacagattgattgattgaagacttcaataggtgctgctgctctcgtcgtcttgataagagaagatgcagaaggagaaccaaagatatgacggtagacagcgaaacgagagagcgcctcgatttggcgagagcctccagggcagttcgtggatttgaggtcaacactgcgcagggagagagaggagctgatgtattgacggacagaacaactggaggttcgattaaccatccggctggaagcgcgaaagtgagtttatcgtttgagagttgatgaagggtagagaggagtaatgaggccgacaggagagggccgaagagaagtgcgatcaaggcgccatcgtctggacagtctcgataatttcgttcatccgttccccaaacaaatccttgaagtccggcatatgtagctgaggagaaagttgatttagaagaaggatgcaggttgtgcgtttctctagagggtgagtgagctcgatgtcgagaagaggaagatggcggtatggtggcagcagtggtgatggatactgtgttcactgtaggagaagtaggcggcggaactgaagtaacactaaacggtctatagaccacatatactatgctaagagcaacaatcgtgaggagctctgcatatagttcattagagaatgatgagtgactttaccgactagtctccagggcaaaagagaaggagtactcgacgtacctaatactttgtaacggtcctcgtctccaccctcgcaatatagtccaactgcggctcccaagactggagtgacgaccaagattgcctcaccccatgctcttgttaattggaatcccgaaaagttgagaggaaaaatggctgatgaaggttgcgctgtgaagggatgacgtggtcgactacccgccagcaagttcgcgacccctttgaatctcgataccgctgccgccttggatgtcgagttcggttgcagttccatggaagcacgcaaaggaggtgaatctgcagacctgggtatgcgggcattgctctgaccggtgaaatttgaccaagaggtgtcgggaagcagaccagatgaccggcgttggcctggtaaccatgcatggatgggatctgagagcttattaagagggctttcgaggtcgtcggaagtactgccaccttcccggtctgcagctgaagtgtccccagtggtccatctgacatggcttccactaggatcaggagtatgattgacctggtgattggttgaccctcttcttgtacttacagattgcgccctggacccgactttgtagccatgagtgcgaccgtgactatgtccatggttaagcttaggtccagggatggtgctcgattttctctgggacagaccaccagacttgccgtcggatgagccctggctacccgcattccgcctaagagggggtgaatgatcttcctcatccgacgaagaagatgcttgagtggaaggagaagaaggtgctggagaaggaatccggatgtgcccgttgccagtcggtttggcgtgaagcgagctaggatgaaacctctttgtcttgtttgaagcggaaatggtgggagctgtatgtgagagtgtgaatatgtgtctgttagtgggtctagactcttattgaagagagttcgccgttattctttcggtgatagttggtagtgttgatgatgttggtggtggtgaggagttaagagatatttatattgagggttcccgaagatgaacgtcaccatctaccatcagccatcaacggcaacaacagcaacaaaaacaataccatgcctctttactttgttactgcttcatccagaggaatcggtctcgagctggttcgtcagctatcgaccaatccagacgtcactatcatcgctgccgccagaaaaccgaccgagtcagccggtctgatggagatcgtcaagaacgcgaatggcagagtcgaaaccttggagttggatgtgaccaacccagccagtatcaaagtaacaaccttgttcctctctgtctctagactggtgatcatgggcttgacatgttctcgactcttctcaggctgctgttgatggaatcccgaaactaaacatcgtcaaggcgaacaatggcacgatcgataccgttctgtacggccagttctttcagttctaccaactctcttttgccgtgtttcgtactgaacggtgacaacggtatctatcattcgatgaaccatgcagacatgtagcaggaaccatgtcatccggctggaaacctgcaactcgagtgttcgtgttttctcgtcaaccattcttatggttaccatccatctccttgaaggtatactgacatatgctgaaacgacgcctgataggtctatcgaagagcttgagttagacaccaagaccaactaccatggccctattcttctcaccatcgcccttttaccgattcttactttatcacctcccaagccacagacggctaaggttctggtcatctcgtccctcatgggatccacaggagcattggacaagacgggtgactacgcggcctgctactctagcacaaaggtcgcggtcaacatgtggttccgaaagctggccattgagattgcgaccggcgcagccggggtcgatgcaagaaacggtggctggtgcataggttgcttacatcccgggctcgtcaagacggtatgtcaaatctcctgtatgaattgagtcagacggtatctcgatcactgtagtctcatctcggttgatggttattgctgtaaaggacatgactcgaatgagaggtgacatcacagttgaggagagctgtagtggaatgtgcgtcttggaatagtcttttaccttaaccttgaatattctttcctttctgatggttctgactgactctttttgtcgacgatgatactccatggactatcaggatcaaggtgatcgatcgactgtccgaatcagagaccggaaagttctttgattggcgaggggaggaggttccctggtagagctccggaagtccatgatattcaatgtattgcgtttatcttttgctccatacatcggcagagttatattcgaatgaactgttatgcctattctcttctccaactgccttgtatgtgtacgaaacgaaggtcagatggatctatgatcgcaagagggatctgatgaacgtcgtcactaccaggacataagaaggaaatcagtcgcgtcctttcaaaacacgcgttcaagactttcggctactttgtctcctctcttcatccaaaacatctctcttcgctatccatctcctcctccctctgtcttgtgaggttgcctgtatcttcgcgatgggttcttcgaggaagcgttctctgacattgccgacatccaaaataaaccgtttgtttcggcctttcctctccaaaatctctcacctcctagcactctatcctacgtcagctccaccatcacccagccttcgagctaccctaggtcctacctctaccaaaacatactctcgctcagtcaagaccgagccaacaccaagtgtatggaccggaactgccacaggtctaccaatatttcagccgggtaggtgtatgagacggcgtccgccgggtccgatcccaagagaattgattcctatagcttctccggcctcgagagcgaaaggggccgcgaaaggagtcgtccaggctgcccaccatcctggtgtaccttctggggttgatatcgacgaactttcgtacgttgatatctttgggtgcctgtgttcttccgattttcgggtctttcatagcgaatttcagccatgatgcacaatagctaaatgacgactgtgcctctccctgcccctccactactttaaacataacaaaggaaacggatacacggcgtcgtcgaggctttcagaaatattctcgagattgcttatccttcacaggatgaaggaacttcatttgaaccgcttggtgtggtctgcgcacggaatgtaggaggaaacatagaaggttggattaaagaccagctggacgaagagttaggcgaggaaggacctggagttggtgatgatgttgatcaaaagagggagggacggagcgtcagtctgagagacgaatggtgggaaagcataccggaacattttcgaaggtaagtcggttcttgtgagaccatgcaagtctgtcctatatagcagtctgatcgtgaagaaatgttggttgcttgtttggtctcccagatacgctatccccgtccacgctctctctatcctgatttatgccgacattccgcttcacagcttctatgaactcattctagatgcttgcattaaacaatctgctgtctatgaggtaggtgtgggttaaacttgggcgggttgagtcagctgagacctctctaactcgtatcctcaagggatttctcttgtccattctttgatcttcagatctctctagttttgccccacttgattcttcaggcatacatgttaccttcgacactccatcctcctggcccttcctacctccctacacttgctcggaaagttccttctgtagaacatccgctctctgatcgctggccccaaattctatcgaaatctgtcgttcgtcttcatcggtggttggacgaagaagagagagcagtatgtctacctttcgggtctgattaccgtgaggttcgttggctgggtgctccaatcgatggcttaatacgagacggtccgaagaagaacagttccggcgctgccttcctcgttcacttgctcgatgggttcctagaagaggtcactctgacaagtccaccattgtctgataagtttgccatcaggttgagctcttgggtacagtaccagatatggctgagcaaaaagttgagcattcaagaagattcagcctcggttgtcaaggaaattgatgggtcgctcacccagctggctgctcttatgcgtgaacgtcttcctccttcgacttccaaagtcctttctggcgcgctcctcgctttgaaccttcatgtcctttgtttggacaattcaacactcaagaacgaagatcgtatatctgtagtatcgctcttcgaagacaccatcgattcagatacggccaccttcatactctcctctcattcgacattatcgactgtatacactctgtcgtcatgtcttcgatcactctctcttcccaatcttgaatttaccatcttacgacgcgccatgaatgaatacgatcgactcagcatctttgatacaaaatccaaactatcggctggcgaccaaacccttcaaactactgaatgggaaagtctgcgcgacttgacaatttcagcccaagcccgatgtgctgctcaggcgactgctacacctggaaatcccgtgaacggaattcgttgggaagaactcgttggagactgggtcgaggtcacaccaaatatttccaaacctagccgaatgggtacaagaaagaatccgcgtgcaaggtctctttctgtcgagtcggatttgtctgtagatgaaagttctgacgatgaagactcaagtgaaacgtatgggtcaagagcattcagcttgaaatcaagacgaagatgtcgaacgactatccgtccagatcctctctcgccttctagttcatcttctgaatccttatcgacttgttcaatcagcggatcaacgcgctccgagaggaccactcaacaaagcgatcgtgccatttatatcaacccacattccaatctctacgatacccataccaacgctccaacgaacactccaaaatctgtgactattcaacaacgtacactctacactccgtacgtgcctccctcatctccttggctccgatcgatcaatcgaatccctagatcaaccatctgccctccaatctcacccgctccgagccgtcctcccaagcgacaaacagtcgcatctccaagtcctgctcgggctttgtctctcaagacagccaggcttgtttctcctccgagaatgtccatcctaaaacaaacctttactacccgtacggaaacgattccggggtctgaatcgtgcaaacagatgataacaaagttgagaaaggtgatagatgaagatgaaggaagttctgatgagatggatttgttcatggcggactcaccagtgaagccactttcgaaatcgaccaacgacaacagaaaaccgaactattctgtccatagcacggtccgatcaagatcttccttgcctggccctgacaagttgagaagagatggggcgaagaaaggttcagggaacccattcaaagagatacgtccgagagcggtccttgatagcttctccgatctgtagatagatgatgatgaggaggaaatggcgcgcgtgtgtatgctctatgacttcttgtgatgcctcgataatgtctcctcgtaacgatcttatttctttcattcatctcttctctctcaagcaatgtttcttgtagaaacatatttttcccgctatataatgtgatgttacctgctgtcccacgtttataaagagggagttgtctgtcttactcactatgtaccggaaatgagcaatcaagaacgatcagctctgtattaacttctattatacatgttatatttttcctctcatctgctggatttctaagctcttatgatggcgctctcggctgcttccttctgctctcgctcttgaacaccctcgatcaacgactgagtcacgacagcgtggatgtcctttgctttctccatcagagtgtccatcacctgtgtggcagattttcggaggaagcgtacaacatcgtagatgacaagttcagttgatatatcagtctttcgtcttgcaaggctagataaagaggaaacagagaaagagattcaagtaaacaagaaacacaagggaacactaacctcaacgagttgctcgctcccaatctttccggtctgccagatgttggtgaccacgccaagagcgggcatgcacgccagacttactcgggatgatgctaggaaggactcgtgcgaggtcggatcgagatgcagtttcgaaccaatcgtcgcctaccaaccatttataagacaaagttatcacacaaccaatcaattgtaaacatcaggtttgttcgatgcctccgaaataaaataagaagctgaagaaagaggcacgcaccgagctgacaccaacgaccaacccactcatctcaactgtgcctcctacggcagctaaagcagcccccgccactgtcgctcctgcactgactataccttccatcccatcagactccaatacaagcaagtagacgtccaattgtgatttgggaaggaggtgcaatcgaagagcgggtaggagagattggctaagcaaagtagcaggtgtgggaggttcggtgtcctacacgagtaagatccgcgtttgatatcacggagaggagctaaggtttagccagaatgatcgtttatgatagcacttggaattcaagcatgaaaacacgtacccgaaggggaaaccgacgagggtcagacgcgaacggagcgtatttgacttcgatgttaagaactccagaagcagagtaaggaggaggtttgggacgaggtccatatctatcgcatggaagagttgttgtacatgagttgagagtctgacaatgtattcggagcagactgaatcctttcagattattactcacacagcacaggcaatcttggtgttctccatttctatgtaggccgatccattagcttggctgatgagtccagtcttcaaaactatgtgaacagtatcaaaatgggaagtgagtgatcgaatccgacagccacaagatcacttatgaacaacttccatctgttagaagaccaaaaagcacatacagacaggccggacgtcacccggactacgtccttgtcgctgatatgcgagagcagcctcctggagggaggcgaaaggagcgacggttgtgtttgcgttcgaattcaaagtcgacatcgaggttgaggctgcaggctgaggcaactcgtcttcgtagagcggcggaaaggacacctcaggcccattaacacgtcttcgatcgaagaggctggttgtcattacttgtttctatttggtggttgacgaggtgaacagaagagtgaggtgtacgttggtggctgttgtaagtgggtcagtgaagtttgaaatatttcgtagtcttttctttgaatttgatacaaagttgactacacacaatcgtaatgaaaatcactgtgtactaccatcagagattgtatggctttggccactagacggtaatttcaactgatggtggtcgatacgtgatacttcaggacttgggtatcctcaaaccacagaccaccgacatattattaactaataagatttgtttacttctgtctgtggagcaacctcagcttcagcctcagcagtcagagcagcagcggcagtgtcaaacaccagcattctcgcaccctggtccgctttctggtgaagggctagaggcagtatgttgcgcgacgcattagaatttctgattcatcaagtctgagagcaagcagagaaaatgacaagcatttgagacatcattttaggacactattctgagatatataatacacccagctttttcggcagaagcttcgacactctctaatcgcctacatcttactcatcaccggagactcgccatagcacttagcacacacacttgacgtcgggaactcccgaacttcgagaacttaaatcagcggggaggaccttagtttgagaaacagtattcttactgagccagaagcatacacaagagaagacgatgagaaggcgctgtcgccgaaggccaggaaggtgcgtagacgtccttccgacagacggagtgccccgctgtggtacgcttgctctcggccgatgtgcccactccattgaggaagtctgtaacgtcatgtaacgaagaccgttaaaagccgaaagcaatattgatcaagcgaggcgagagcagcgcggagaccgtcgagactggcagttttgaatgaaggaaggtctgaggaaagagaccgaagcgagcaaataaggtgaggagggtagctcacgaggccagcctgagcgtgagaagcacttaccacggagagctgttgatactgccgcttagatcttcatccaaagttgctgtttctgatgatctcggtcgatccccgcaagatgcttacacgacttgaccgacagcgatcactgagtaccctcttcagccagagcgccattgtctagagacatgtccagtcctcctgtggccatcgagagaagcgtttgatgagccggttgagcagagctcttcacggtgaaggcaactgacaattattcaacgcggacggttgtcctcatcagtccgacttctttatgtcttataagctgtcgagattggtgcatccttctttgctcaagatccaatttcaaaggttcgacttgccatgggccatgacgaaaaaatcgtgaacgctttatagtctaccaaaaagaaacatgaacagactgtcagatcatcttcaatcgaggtgcctgcagttaaacccagcgatatctatatagacgcctggtgtcaggtgtatagcataaacatcagagcagtcgagccaaccgatggtcttgcagttgttctcaatctctcatcgtacaagctcaagcgtactgagcaaatatctgcattgatctatcattaccacagtatctacaccttggtgacccaacggagagactgtcactccagatggctgtatcgagtatcagccctcgattcagctctctctaggaaggcacaaacacataggattgattgcctgccagcgtaggttatctttccaaccatcaacaatcgctccggcatgtattctgcaacattctccatagacctgcgttcttcttctctctgagacacctatgttttcttttcccttcaatgtcgcaaaagaacaaactcttaaaccatcatgaaatgaaggaagtggttgttggaattgagtgacgtcataaacaaactcgccaagccagcagcatacacatcttttcctcaaccgtacatacaagaatactcccatcatctcatacaaccacatccctagattcatagatccaaatctcttgacatgttctccaaatctaatcagaacgttccggctactgtagacaatattctcgagcagattccagctttcaatcttctggtggttgatccttcttcgacattcacaaccgatacacttccggtcttgctacaatccgtctttggaatcaatgatctggtgcgtccgggagctacatagtttgtatagctatacggttctttttttggatctccgtgtgctctatcgtatcgtcctgatcaccatgagaacgaattctatccggtctctagcatatttctccccagtccgatatagcggcttttgtcaagtctccgaccaacatacggatcaccatcagttccaccacttcaacggccaaagccagtcaatatattcattccaactctaatctacctcttggtcaaagagtccatgctgtctggttcttttctcctccagatctctttgaatccgaaatgaagctcctagctcaagatctcaagcttatcaccggttggtagttgattcaagactgatcgcaacagggccagggttacaagtgttgactctaccacatgtgttgcgctttctttggaatcaatctagttccgactttggtgctcgtcgctgcttctgacagtgattttagaaattggtccatcgctctcagacatcagggagtagagcgtcctctcttgaatatcaacacctcaggtgagccatctgtcatctgtcatctgtaggtttcatcaactgagcatatgtttgtcgtcccctttgaatctagatccatcttcattggccgttctttcaaaacgaacagagacggctttggttgacaaacccgagttgcgattgttatgggtggctgctcagagaatcagccgagatgaaaaagtccgttcatgtatctgtaaattccttttggcgaacgtatagtgacgacccttattgatgatctgttgcgttgcagataaacacctcgatcgtcaagggaatgaaattatttttggtcgctgttggagcatcagctcaacctattcctgtgagcatctttctttctttaccttacccttgatggccgtttcaagtagagcacgaattagactcatttgtgtcgatcagtttgtcggcggagctaccggagtcacggcccttggtttgcttcaaagggatattgtcgacatatataactttcaagatccaggaagagtaggtcgaggtttcctagtctttgcaatctcagaatgctgatgacggttatccatacaattgaaaattgttataggtcctgtttggaaaattgctaggcaatttgttcttcgaagtggctacagcgcttcctgttaagtggctcgtttctgctgtgggcgtaagcggaccgtctctttctgtttctcggtgtaagatgctcaacaggtcagtattggacaatcactcacgtgcaatttggattatggaacctacagctgtcgaccatctctggtctttgggaaagcagtgcgagcgctagaagtatcatgatggctatcgctggtatgtccttctgacaagcagcacttgtcatgacaacgagttctgaccactgtttgtaatcagatcttgttttggtacttgacgcgctgttactccatacccaatacctttctcccacatcaaagaagatcactgctgaagaagttcaaaagataatcaaacgatatgagcaaggtcctccgaccattggttctggcctcatccctagctttcttccaggctcgaagagactggtagaccaacctgggagtggatcccccttgttttccaggagtctggtccatcaggctttaggaaaagacaacattggaacattcaacgtctggaagagcttccgtatgtgaagtgtctgctctgttcattatttcattgaactatgttctgatttctaacttgggttgattcggtcgtgcatccttgatttgtgtttggtctggggtcaaactgcagaacgacaagaagctcaaaaattcttgaccgaggtcattgagtgagttcattcgtttttctgaatgaatgaacgatggcttttactgatttcactctgaattgatcaacaatttcgacgcttaggaaacatcggttccgaggctgattggtccattgaaaggcttcttcttcactcttcatacgtgtctcgtttctcttctggtcttctgataaaatttgtcttagttgtatatatgcgtctctttgatgaacgcttagggatgacttgtgatttgatcgacaagagcatccacaggctagatgaagtacggatagggagagtggtcaaagttgaatgacgtcatagacaaactcaccaagccaacagcatacatacatcatacacacagccacggcccagacgaagcctacaattcccagcacaaaccttcccgttaacagccatcctctcgaaaaagtaacccgcttgaaagcttctttaaaaatgggtgcgtatgtgtgtatcggatgtgtgtgtcatgtttgcccggattaatgatgcttggatgtttgggtgtttgaatgttgttagcttgcgttcccattgtgagcatttcctcttcaaagatacttcctccgatgcatcgggatcgaggttggcataggagctaactctataatcaaaaatcaactttgacttcttccagctactcggttgttccaccaaagtttgtatcttctgcctcttgactttttaggttgatggattgaccgatggctaaacgggaacaccttttgatttagatcacgtacatccagattctttctctttcttgtctcgtgtaaagaagttgaggttatggaggtctgaacgcttacttagctgttttattggcgtcatgatgcctcatttgtgtcatcttctccaacgtgtctcttggtgttcgggtccgacgggtgagatagtcaagaagacggagataatccacccagaatatgcgcgaaatgcaataacggtacgcttatatctttcttaccttttcgaatcgagtgtatagaatgttgatagtagagttgcacgtgaacttgagtaaactagcttcggtcttgaaatgcaaggtatagtcaaacttgacccactgtttgacctcgaacatcggcttcaagaataatggtctttctttcatgggcaatgaattagagtcgaacatggtttgaagcgttctgcatcccgctcttcccgttcacaaattccgtaagtcgtttattttctatgcctttgaacttttctcgatctcctcttcaccttttttcatattgaaaggagcgggacggaacaatgtctgatctatctgtttgtttgcttctgggcgattgctgcgaattagcatatatatagatgttcgatctgcggtccgtcaatctctcttttgtcctattcctcatagcgagtcatatctatattgatggctgattctcccattttgaactcatggcatcgttgtctttggggatcaacaggatgggaagtcaaacagaacgcagggttcgaacctcctatcgccggccgtcaaccgttcgtctcttgtcctgattttctacatcttcctctttgcgtcgcttcatccttatgtttatcgacatattaatttactcatttcctcacatgtcatatatcatgctacgccgcattataactatactaactcaaccggatgaatgtttccaggcaatatcaaccggggtacgcgccaaaccctaaccacggatatccacctaaccagggcatgcagtataaagctcattgatccaactacaggatgaaattttgtatgatgtgaatagttcaaattttctaattctcgagacttcaggctttcgagttcttgttcttcccaaaaaccaatttgttcagtttgcgcgaattcgagagagtttgatcgattcttaggacaaaggagtgctgcttttctcccttgcttggatgcacctgtttcttctcgttttgtactcttctatctgttttttgcctcgcgtgctctccaaatgttcttagtcttttttaaatcgatcatgtatatacagccgtctttaggagatcagaactcagatcatgaatacaagtaaagagaaagatacaagtttatgattccaccagacaaaaaatatatccgtccaggagaaaggaaaaatcgggaaaagttcatgatcctgatgactgagaatgagaacaagaagaatcagtgaagggcagatgttgaagaccaggctgatcatgacaaaaagccggtatctcgccaaacgttgatccattgtaagattctgtcataaccaggggttcgtttgtcgagattggaaataaattcaagatccttatcagtctccacgcgttctatcttcagtatacatagacgagagttcaagaagagatataaaaggaacgtacacatcctgatcgactagccgagaaatggccaacgtaggcgaagccttcactgtcttcctaatatctgcctttggaatcgccttttgtacttgattgtacatctctgtgttatcaaatacgttgttttcgacaatggtcaaatggaacgaaaagtcaagtttgatgcgtcagtttggtcgagagagggtatggttccttaacaaaagaacgtaagaaacatgaagaaagatagaacgaactatcgtaatagccgatcagtaatcttgtcgggttctccaactccccctctttctctctgaccaagttgacccaggtctttccatcgacgacatcaaagttaagtcctccttttctcaatgagctcagcacgtctttccattcgaccgattctggttgtaagacatggaagcatgggacgaccgtttgctgcgatgggtcggtggaagtagaggtcatgatgggtggggtgagtgcacactcgaggataatcttggcgcagtcatcgaccggtaaccaggccctattggaaaagctgtctggcagagcgtgaattgtatcggccgactttgaacgggagatcaggtgggagagtatccgttagtcaggtctcatcttctgactcgagtggcttaaagaggaaagagaaaccaaagagaaaacgaaccttgataagaagcggaatggcctctgtctcattccaaactccattctttccgccgatgatctggccaacccttaacacgtttgctctgagtccattctcatgatgcgcgatctcgcagagcttttcgacaacccatttcgaactgtactctcggaatatgttctgagtaagcccatgtatttcgcaaggaaaattaggtatcaaagaagatagatagatgcagctcaccgagcataacccatgggcagacagagttcgggtccaaggactcgttctggaatagtcccccactcttccttccaaccagcgacggtggagatggaggatgaaaagaagaaagaagcaggctgggtctttggtcggagggacagttggatcaagttgtgtgcgcctcgaatgagtgaatcgaacgattgagtttgtttattgaaattgacactccacgcgagcttgcgagacggacgaagacagttttgagtgatttttccaacaaaagatagcaaacagaacagcatagaagagagtaaaggaggatacacacatgaaggaccatagtgacctcgttctccaggtctttgaacacttcattcgacagtcccagatctcgtctggccaaatctgcagccctacaatccactctgtcatcgttcctatcaaacagaggcagccttctagttttcaaagagtctaatacacgatctgtcgcttcgctgtccgtagaagcacggacgagacaggtgatccgaatcgaaggatctgatctagtctggaggaaagagagcacgttggcgcctagagagcctgaggcgcctgtcagtacgacctgttttgttgaaagcgcgttagcatagatgttcaaggacaaggggaacgacacgtagatcatgaggaatgaaaaagaaaactcactcgagacaaagaaggactctcagaagacttcggactagagccttcaaactttcggtacttctcgaccagcgccagctgttctttaactctttcttgggcttcctcagcttcagaaattgagttatcgttggcgaaatcttgaggacgtgtcaagtaagtggcgatctgctggatggtgggatgttcaaacacaaagttcgatgagagctcgaaaccttttaagtcgaatgtctggtgtgatataatagagctcccctatcagtttcatgttgccactcaacacggaacgaggaagatgtacacaccgttttaattcttgactttatgatctctgcgtgtagactgctgagaccacactcgaataaatcatcctctgttcccactcttatctttttggatttaagcaacccagagatgatttccatcaaccaagactccaattgatcgctagacttgatcttttgtttcggttttccgccattcctaccgtcggctgaattcccgttctcgaattgttcgtaggcggttttgatctctttttcaaaagcaacgtacacctttcgacgcatgatacttcctttgtcacttttgggcacgaccgttcccttcggaacgatgacgaccatctctagtggaacgtacgaatgactctgagattctgcattggccacattcagagctgattggatgacggattgaatctcctgttgggagagtgtgtaagaagaggggttcagactgatgagagcgccaaggtatgggcggttttcaccaaagacaacggcatccttgatgtgcgcactggaagcgatcagattgttttcaattggctatcaaggaaagggcgttttactggcatcagtctcaaacatcaaactttcaagaaaggatgcagactgacgagagggttggtcttttctccgttaacaagaaccaaggtatcatcttgtctccccacataggcccaggcatctttaatatccggatgctgaagagaaaacacacaagagaacataccaagatcagctaaatgtacgggtcaataaaggaggctcatcatgagaaaggaggacatgcctgaacatagagatcgcccgtggcataatccccattaggcctattccgagcggtcaacgagcgccatgtttgctgatcaagatcgtatgcgtcaaaccaaggtcagtccagaagtcaaagacgaccgaaggaatatgatgtaggtagtcgagaggaaggatagatgttgaaatgagtcatagacggaccttaacgatcaattcatatacgtcatcttctttgtgttcgaaaaaagcatggtccatgatggccgtctgatgatgaggaccagagaaccggtagtaatcccaagcggtatcagttttgtagtctctgtgagtactagctacctgtgcaggcgataggacatcgataaatgggatgatcttatcagaatatgttcaagcgggagaaggtaaagaagcaagggtaagaaaaagaacggacataaccgatctcagtagagccaatggcacctctgaggtggacgcctcggctggtgagcctgtcgcctacggctttcggaaacgaactccccgaccactcgcattgggctaactctgccataagcttgaccgcgtgttcatcttctgagagcagcttgtacatgtatgaaaccgcaatcaacattaccgcttcgcccatagcgagctctatgtatttgctcaaattggctgacgtcattgctagttcggtcgcgggaaagaggtaaaagggaacgacactccagagagcgcaccaggtgcacaagtgtccgtacatgtgggataatggcactggacacaaactcggaactcggttgatggcggttgagacagcgacctttcggtgagtcattggaattaattttggcattccagtcgtcccactcgagtgcatctaggaaggatgggtttggaaaagccgacgatgaagtgagcagccggatggaaaaagaagagaaaaaggaagtgatatcaaacactcaccaggacggctaaaagatcggcctcttggtctggggtcaatggccaatcccactcgagcttggcttggacagcggcctcgactttgtccgacgagtagacatcgggagagggcatgtcgaaaatatcgcattgaaagccctgtggataatgagctgcgccatccgatgcgacctggtatgatgtcgaatgggcaagtaaatattttgcgctggtcagcgacagtaggtgagcgttcactgccgggctattgttgggtctggagagggaggagagacgtcccttggtttagcgctggcgagaggacgtgtcagggaaggaagatagaagaaagacatacgaaaggagcaggacagcgtagcccatcttgagaagggcgagctcaaagatgaaaaagtcgacgccagatggcatgacgacggccgcgacaagtttcgattgtgtgtctcctttacgtctggttgttatttgggtagacagctcgagagccaatagagtggacgcagtctcgagctgcttgatggtgtacggaacaaccgagtcgagcgacttgtttgctagcttgaacaacggcttgtccgggtgagtctctgatcttgatctgatgacttggttcaacgatatgaacggtttgggagtcgtggtcgacattagtgactggaggggtaagcaggatgggcagagctagtcggttagtatgtcagtagaagaagacagagaggaatgttgaagacaaaagagaagagaagagaagaaggaagaaagacgaaatcagcgacgtctataataaggcaagagatacgagaaaactgttcgacaagatccggttcggagggaagagaaagagaagaaggaggaagagtggaaccattggcccagggcagacggcgagtgacgtgagaacggcgaagggtgaatagggaacggtggcttgggacttatagtttaaggttcaatctcgtttaattttcggttcggtgccggtgccggtgccggtgccggtgccggtgcctgtgccctggcctgagcgctgtaatcaaaacctgtcagtgaacgaacaaacaagagcaaaaagtgcgctggctcccagagctttcttccatcgtcgaaccttgtggctgttattcgaacggagtttgtgatgggcacgtggtccaattccgtgcagatctcttccaccagctgtgctgcagatcacggtctttttcatggtcgtgtgttctacagacgccggaattatagaagcttagtcagctgtttttatgtaaccatccgtagccatctgtgccttgagtcccttcacccacactcaccgtccccacagacccgatgcttgcactctctgcccggtatatttgaagggcctactagatgtatattcgtatgaagcctgatcgccatgtttgttgtgtatgattctgtctacaggtgtaccatatcaatggcttagtaatgaagagcaagcgcccaggtggatcagagctcagagcgatatggcatgaatgatacaacgaacggcctagatggatatatctggaactgtgtcataccatccggactgccagatgaaccgctatggacctactaccgctctactaggctgggactgtgaacacactgacgctttctcatctttgagggactcgttgtagatcaaaggattgattccctactgaagcaacagcggcaacgacagcagcagcaaagattttctcgcgccttctttttttctttcttctttttttcttctttttttttgttttttaattcgctcttcatctcgtcatcttgcttgcgttcttgcattctcacatcctatcacatcgctctacgtctattcagcatacacacacatacacatacgcacacatgtccatctcgttctccctcaaaggccagggcctcaagctgacatcggcacaggacgcacagccacacatcgacgcactcgtcgcactcgggccggacgtacaagagattcacctcggtggaaacacccttgggatcgaggcttccaaggcgtttgcagaggttttcaagggattgcacaagttgaaggtgggatcatagttcaagattctccctctgttctgttcaatttcttctatttcgttctattctctctcctctcttttcttgtcttttactcgctcttgctttcctttgtttcggctagggctaacaacgcttctctctctctctctctctctctctctctctcacgctcgcttacacctactaggtcgccgactttgccgatatctttacaggacgactgatttctgaaattccggaagctctgtctgcgctttgtgattctcttgcccatactacctcgcttgagacactcgacctgtccgacaacgcctttggcggccgatgcgctgaaccgattgttccgttcctcaaaacgaacctgaacgtctctcactttatcctcaacaacaacggacttggacctaccggtggaaacatcatcgcccaggccctgctcgattcggccaacgcatcagaggcaaagggtcaacgctcggcattgaggacgttcgtctgtggtcgaaaccggctcgaaaacggaactgctgacctgctcgccaaagctttcgccgctcacggtctccttcaagtcgtccggcttcctcagaatggaatccgaatggagggtattcaggccatctccaaaggtcttgctcagaatccggagctcgccaagctagatttgcaggacaacacaatgaccctcaaaggctccagagctgtcgcccaagctctgccctcttggccaaagcttaaagaactcaacctatcggactgtctcctgggcagacgaggtggtctcattctcaccaccgcccttgccaacggttcaaacaaagagcttgagtcggtcaagattcagtacggagagatggacagtcggtcgttcgtccaattggctaccgccatcaagttgcacctgtccagcttgacccagctcgagttgaacggaaatatcgtcgacccggaggatgagagcgtggaaaagatcaaggacgctttggactctcatggacatcaggatgctttagatgagcgtaagtcccaggaaaggttttctttgatcttgaatttcttgttcctgacgaatcgtcaaactgacggagtgtttttttgatgccttcatatccttctctttactgtgtgttcgtcattctcttttcttttctcgcagttgacgacatggaagaggatgaaggagaagatgaggaggaggatgaggaagaagaagaagaggaagacgaagaggaggaggagaaggaagacgaggaaaaggatgccgacaaaggaacaaaacagcaagaggagaaagacacagaggtcccatcccaaccgtcgattctagacatgtctgtagacgccatggcagatgcactctcaaagatgtcggtcatccctcccacttctgcctcgaactcggtagatccgaaatcgagttctagctagttggctttctcttcttgccgttctcgtgcctacaagtttttcttcaccatcatcatcatgtacgttgaatagtcaagaaacaggttggaatgttcagagcctcttcttccctctttcatctgctttccctcctctgctttctcttctccttctaattaatgtaaacaagtatttggtggtttccatcatagatcaacgaatgatcatcttgtaacgagaaagccaaaacgaaagcagaccgagctagagagagaaagatagaataggagattttgaacaacgattaaattgggccaagtcagagttcgatcggatttttccgcccgtcttaattggatgatcccattccgtcccatcgactccatcagccctccgtacaaccatcataaccatcacatcccatcacacatctcgacacactctacactactctactccattttgtttacaagaaaatgtcggtctcgatccaatgggggaaattcagtctctttatggctggcagtcagtcttcttattgtttctctctttcccctttcttctggatttgagttcttgtgtcgtttcccgtttcctttacaaaggcttccggatgtcgatcgagagataccttgtttcgatttgaatgaagtgcattgcatcatgtcgcattccgtttcacctctgaaatgaagctgatattgtgattctgttttctttttgaaccgaccggatttgattggacttggtgggatgggtatgatcaatagtgatcgctactggttatggaattatgaaacgtgagatctttctcttccttatgtttcctttcgcttctatcgcttcggttttttggtcttgtcgtctttgccttctcgcctgtttgataacgacatgagagaacggatcgggcgaccagagaaagaaacaaaagatctgactatccatcatattgtatatgcatatatagtgacaactccgacggaagaacagctctatagtgtatgcttcttttccttcctctcttatcctcttactccttcgctcaacgctttatcttggcttttttcttctcatcgtttgatcgtatgtcaattggtgggtgtaatcttgattctttgggtaatcgcacagcggttgtcacccgatttacaacgaagggtcgatgagaagagagcgcagaaagcagaggaggaagcgtcgagacatatcaagaccgtatgttccattgctatgtatctttcctacgggtttgacaagtaaacttacacgccaacgtatcttttgttctgggaataggacattaaatcatcctcgaggatcatctgggcggcagatcgggaaccggagttacctttctcgactcgacctcccaagagtcattaaatggatctcttctttccctttcctttttttttctctcccttataatcattctcgctttcgatcttgtccgcactggcgttccttgacctcttccatctgttcgttcgcttcctttgcacgcacgcatccacacatacaaacacacatatacattcttcttttacacctgctgtattcaagtccgtcagtggtctctcctattttttttctctcctttcttgcaagtcgattttgtatcctacaggaagaagaaatcctccaaaactttcgtatatcgtctatttttccattatggatgtttcatgcatctttctcgcgtcgtgctttctcaaaaggcggataaaccggaatggattccgcaaacgagagggggaggaagaagatattcccatcgaatcaaccgctttcgaattcactctataatccagcgttctccacagccaggcctgctcgtttcctgaactcatccaaggctttcagcgcaccaccttcgttcatgctctttctcgcgagctctacgccttgcttgaacgtctgggccttgccggcaacgaccaatgtggcagaagcattgatcaggataaagtctctgattgcatcatacgatggcgagctcgaatccgaggcggtcgaaggagagaagacagacggaggagcgggtgaatcagaaagcagggccaacaagacaaccgcgttctgatcggaaggtccgcctctcacggtcgacagtgggtgggtcggcaaaccgaaatctgtagttgggtgaagagtctgttcggtgatcaaatcgttttctaaagaccagacctgttggatatgaacacaagtaggttgattcatgttggttcagaagcgcgcaacttggagacgtccaggcaaacagaaagaaaaagaaaagagaataggaaacccgagagactcacccaggtctcgccggcaggactgatctcatctagaccttcctttccacaaacgaccaaagcgcgtttcattcctagatccttcaaagcttgggcgaataccattccgagcttgtaagaatgaacaccgatcaccattccttgaggtctagctgggttcaccaatgggcctaggacattgtagatcgttcggaaaggaagtgtctttcggataggtgccagctgaccgagtgaagggtggtaaagggatgcaaacaggaaggcaaactttgaagacggagtgaggatctgggagagtgtgccgggcgggaacgttaatggacatgagagagagagtaacaggtcggctgagccagacgtagaagtcgacgcccggtttccgtgctagtttttcatttttacaagaggtttcatatgaagagaccctccaagaagatcagtctttgttctcaagctaccttgtccttcgtatcgaaacaaacacgaccacgagtcgggatcaacaccagaaagaaagcctacgactggacataccttgcaaacgaccgctccggctccagcagcgacaattccagcactcgtcgacacgttgaatgtgtcatgaccatctcctccggttcctacgatgtcaaccaccgtttcttcttgatgtaaaccggcgatatcaacctgaacggcgtacttgcgcatcacctttgcgcaagcagccacgatatctggacgttggtccactccggaaagcgtcagtgcagttaggaaagatccgacttgagcctcggatgcacctgtcggaccggaagccagatgttcgaatgcgagcgtagcatcttgagcggtgaacgcagaaggttcagacacgatctttttgagcaacggcttgaataactcttgagtgagaaggtcggtcgacatgatgagcacgttgattctagtgataggtgaggtacagatatagcaattgccagctgtggtcccggaagaagagcaagtgatggtgagttggtcggagaggacagaaagaaagaaaaacgggatgactcaaaaaagaaaagaagttcacctccaagtcactcaccgccatcgaagcgaaacataccgttttccccaatactcaacctccattctcactcccatccgtgctgccttacgttccagagatgagtctgtcaacagtagccgagcctcttgatctcgttaagctctccctttcagaacgagtgcatgtcaagctgagaggtgacagagagctcaccggtgtcttgcacgtaagtttcttccgtttcatacagacaatcatccagtctttccttgattgacctttgtctccttcttcgttcattcatccacttgtctccgcgtatctcttatcctggtcttgtttggttgtttgttttttctcgcaaaaccgtttggaaaacacgaaaaggcatatgacaatcacatgaacttgatcatgtcggatgtcgaggagaccatcaccatcgttgatatcgatgaggcttcaggcagcgagaacttgcgggtccgttcaccatctttcctccttcttcttactgacttccattgttaatctggtggagaggatggctaggctaactatgtcggatcgtttgattccttcgatagactgctcgccggaatgttgatatgctcttcgttcgaggggatggtgtcatcctcgtcagttctttccttccttgaacatattttcattctacatcacccaaatcacagaaactgatgagttctctccaccccacaaaacgtctcctaggtctcccctccctcgcgataatcgaacgaagaaaagtttagaggaaaacaagaagaaactcggttgtgtagatctctagatccatcatgttatataaatactattctctcagacagataagaaacaacggaaagctggaggttatcgctttatattaggcctgtgattaccttccagtcagaatgcaccatcagatgtagctcctttggcagaagtcttagctggggttgtcgcgtatggtcttgttgttctgacagagacgtggatactcttctcggtcgtttatcacatgtgcaattttgacctcagatggagataagtctttttatgaaagattataatgtgcaataggcaaagaaaagtattgaaagaagtgaataaaatggtagggaaaagaaaaaggaaggagaaaagagatacgtggttttgatcttacctatggaaggaggggtagacgaagatgtacatgaacgatacggaaggacatgatgctgagatagtgtataagaaagcaacctataggaagaaacacccctacaatacgcgggggtgcatgacccagaacgacgaaagctatacgactgcaggcgaggaaaagcaggggaataagaaagatagacctaacgtaaagacatgtgccctttttgagtagtgagatttatgcgagagatcacaagaaagaaagatgtaaagattctgcagtgacaagttcgagatcgggccatcgctgatctagagaatgagttgaaaaggagacggaagaaaagaaacaggaagaaacagagaagaagaacagtgaaggatgtaaggcggaaaatccagagatgaaatgaatttgaaggaaagaaggcctaggtcaacgctagacaagcctctctcctacgttctcttcgctcctcgcctggccaacggccgaatcggtcgacctccaggtccaacccgtccaggcgaaggagccacatcacccgtgcccatgctgaacaatgctggcgctcttcctggagcaggggattgaggtccagggctctcgaaccgtggaggagtcgccactcctatcggtccggctccgaaagcgaacgtcgctcctgtaggcgtagtcgttccactcggagcgactccgaagggcgaagcagtaggcgcggaggaagatgccccaaaggtaaaggtcgaagcaggcggcgcggatccgaacgggttgctcgaaggagcaggagctccgaacccagtgttggcagaaggaccagccgggttagaggacgatccaaagctaaacccaccagacgatggtaatccggcgttggcggatccgttgaccggcgcaccaaaagcgaatggggaggaagaagcaggagctgggggagcagaacccgtagatccaaacgtgaacgaggtcgaagcaggcgcaggctgaccaaacgccggactacttgaggacgatgatggtggtgcttgaccgaaagctggagaggcagattgaccgaacggaggagcatttgaagcggaaccagcgccaaatggagacgcggttggctgggccggcttgtcgaaagtgaacgaagaagctgaagccggagccgcaggggcaggtgcaggagctgaaccaaatcccccaaacgaaggagcgacggaaggtgccccgcctacgttggaagatccaggagcaggagcagccgcaggagtaggggcggtttgcccaaagctgaaaccgcttgaaggtccggcagcggcatttccaaacggattggtagacgccgctgcggttgatgaactgccgaaagggttcgctgccggcttcggaggttcagcagggatggatgcggaggctccaaaactgaaaggggtagaagatggtgcggagcttggagcagcgccaaatgaaaatcctgtggatgtaggtgcagaaggcgcctgggttgcaggcttgggagcctcactgggagctccgaaggtgaacggcttgggcgccgcaggggcgctactaccacctgacggagcaccaaaggaaaatgtagaaggagcaggagcaggggcagcaggaattgaagcaggagcgggggcggcaggcttagaagcctctgtgctagcagaagaagctccaaaggagaaaggagaagatgtcgcggttgtggctgcaggagcggtagtcgcaggcgtagatccgaaagagaatccagtcgaggacgtcgaagcagcaggggctgaggaagcagcggcaggggcaggtgcagcagccggggtagctccaaaagcaaacgaagacgacccagctggtttggctgcgggtgctccaaaagagaaagttgaaggagcagtcgcaggagccggagtcgacgttttggtggtttcaccagaagtcttctcagaagtctcatccatcgtatccattcctccgtcagaaacctttcgggaagcctttggcgccgagccgaaagagaatgatggaacggacagccctgttgcaacaggtttgctttgggcaaacggattagctgaaggagctgaatctgcctttggtggctccttcggggtgatcttgagctctgctggtttgctggtgtaggaacaaacaccagcaaaagggttgctcccagatgaagaggccgacggagccacagaagtgggagcagcaggagtggaagcagatgaatcaggagtggtgaatgtcaaactttgaggtctagaagcagcgaaagggttggaaggcgcttgagcggcaggagcaggtgcgggagactcggctgccggcttggagaagaagttaggaattgaaggaggaggtgtagactgaggggtcgttgatccaaaggaaggagctccgtttcctaaacctaaaaatgatttcttaggcgtagactcaatggcagccttcgagagtggagcatcggtcttcttactaagggtcgaagcaaagaagttgggaactccactagaagccgttttcgatccggggttgctggcaagagctgcgaaagcagaggtcgaagaggatgcgggaagaggagctccgaacgagaatgaagattcttttgatttttcagtatccttgggcttttcggcatccttgggtttctcggattccttggtaccttgtcctaggggcgaaggaatagctggagctgcaaacgggttgacagtcttgcttgtcaaatccttcttctccgcctccaatcgggatagcaaagagtcacccgaaacaggctccttcttgacgggagggatgttcagacctccagcgggcatgacaaacttgatcttgcccagatcttcatcatccggaagatcttcctctcttgcagaaaaccgaccactcgagctctcaacgggtgtttgtccacgggagccagcggcagacacgtgttttctggaggaggtagacttggctcggagggaagagcgagagcgagaagatgaatcaatgtttgtgttgggaggtagaggtcggaagtcatctacaggtttgctcggggctgcagccgaagcggaagacttgataggcttgttcggaggactacataaaggtagaatgaagtaaaattaggcgtattcggaacatgagctttatttgagaacagaggagcacatacgcttcttcagaatcattcgacatcatagaatcgctatcttcttgctcgatctgcttcttggtagatcgtcgcgttgctacttaacgttgacgtatggaacattggttaggagatgcctttcgacaagaggaaatcaatcaattctagaaggaatcataactcacaatatctctttacttcgtcactttccgcctcatcttcactctgctgccttcgcttgttgttcgctttacgtcctttgcttttggtgttcctgttctcttctctgtcccttcgatcctccatctctgttgattcttcaccctcactgtcactatcatctctgccgttttgcttgcctgccatgctgagcatatttctcaatcgacttcctccggttcgccccatcttttccttctccaagtctctccttactttaccacgtccataaggggagatcatcaggtccgcccttcgggtctctttctccttcgccccatgctccttcgaagcggtagggatatgaattcgaccgagagagaatgaccgggggagatcagatagttgagaggtggtggcagatgtaggaaggtgtcgtctagcttcagtcagaggagatcgcatagactctagggcctgcaaaattctctcagctgcgttggtagacggagggggagggggagggcctggggattcatttcaaaaaaggaggaacacaaaaaaaacacgtgcatatatgtgtgagtttaaactgggtttggcacagtggtatgcgtcgcaaaccagattaaaacataccagcccgaagttcagcagtcttctgagacataaagcctgcatctggttcccagaccatctggccgaggccaggtcgaccgcctccaggggttcgcgttctttgtcgaggctgaggctgtgataaatcaggatttgaaaagatttgagaatgcatctagggctggcaacaccaacggataagggcgtacctcaatgctctcacttctacgcgactgatctaaaccagagaacacggaagaagactttgacatcccacggtactgagtgggctggggcaaagatagaagggtgttggaccttgggagagactttcagagataaagttaacttgagagttagttacttcacactctcaaccctggatatgaatggagcataggcgttggcggctcaaactcggcaaaggcaatcaaatctacgtacatcctctggcgcagggctgatctcacccctttgggagtatctttcaatccacctgctgcttccgcccaaccgactttttgagttgatcgacccatacagcgattcgttgtttgtcgcgatctctctgagcgatccatcccggccagctgtcgggaaagccatagtggaagatctagtcattcccgacacaggagcaggagcaggagcaggggagaagtgtcgagtggaagacagcgatggagcggctcgagttgacctggggggaggcaacggttgatcttcaacaggagcatccagatagttcatcgagtaggaagtgggaaggtatcgctttgcagcagaagaacgagctaccgctgaagacgcaggaggaggaggaggagggggggggaatgctcgagatggctccaggctgtactgtctggggtgcctaggttccagatctctataagtcaaagcaggagcgaaaggaggagatgaaggaggtgagaccctagtgtcgtatcgcttgttggatgttttttgctgtttgcttggctttccatttgctgatccgctggacgaaagacccatccatcctagaggagcagtgatgaaactcctgataccagcaagcaggccatccggttgcgattgatgatgagtcgcgactagcgagggagcaacagcggaagagttcgataccttggattttcggttatgaacaggctgggagtcgattccagacggaaccgacagctctggtcgagcgtatggcttccgagtgtgggtctttgtaatgttggagccacgagctggatgttgaccaggagcgtaggaggccatttttttttcttttgctttttagatctgtttatatagtctcccaataaggaaacgggggggctagagggagattatcctatccacgttcagcagatgaaagaaacccaacttcttgtcgttgtcgttgtcgttgttgtcgtcgtgttttctcgtgtcgggggttaacgtctaacactggtaagttctttttgttcagggctcgtcccgtcgactatgacggatcgtctaggttgcatgctcaaaagctggacccaatcgttttgcttgttctggccgaatctcgtctgttgacaagcgctgcccacgcgctataaccagaatgccactcaactggaccctcgaaggttttcatcacgatgcttgagatctgtttcagcttcacctcgacgaggagcgcaccagccaagatgatcgtctctgcggacgatgccttgacacaagcagatttacctccttccgctaatggattgcatatcaactatgcatgctgtgtttctcagcgcacttgctcccgcagttcctccatatcatgatacaaagaacagcaaagacagtcaacaagaaagccaacacacagccagcagagatcagcagaaagaagacgatggtgacgcataaccctaaccaagtttgaagatacacacggtgatcgacagagatcaacttccaggcttgcctctaacgatcaccttcccaatgagacctcttcagagaaagatagtccgttctctgccatcagaacttcccgttctccttatcggaggtggcctggccaacctttccctagctcagacatttcatcggaatggattagttcccaaggtcgactatcggatttttgactcgtacagcgcgacgtccaagccaaactattcgctcaccttacacgaatggtcactccggccgatggagaagctgtttcgaaaaaagaactggctagacaaggcagcagtagatcgtgccgctggtggagtcggtatggtcgagtccaagatatttgatctagagagtgggaaacctgttggggagctcgagctggaaaacggaggaagaagcgtgagagccaacaggggtagcttgaaggacttattaacggacggtttagaggtcgaatacaagaaggtgtttaaaaggtttgaacatgtcaaggatggtactggcagagaaggaatccaggcgttcttcgacgacggatcccatgcgtttggctcggcactcatcggagctgatggcgtccactctacgggtatgttctttgtttccgtcgatttccttatcgtatagatagtcttgagacttgctgacttgttcactccatcttgtttctacctctgcagtcagaaaacagcttctcccttcggtcgagccgaccgtgtcacctgtggtgtgtttcaccggccaatggacgcttccttctccgaccctcctcaccggtccgattccgtaccacctccgggtcgacaacgatacctaccgggtcgacgtcgcttcctacactgccttttctacaacatacaaccgatttgacaaggataaagctcagatgcaatggatctatcttcgattgcctaccggatcagacgaccctctctggacgcccgatagatctttggacaaagcgagagagataccagacgagctctacatagaattagaggacctaggtaaaaagaccgagaaggagtattcaagatttgtgctgggtgttaagaagggagatggtgatgctcaatacaactggtcagtttgtctctctttgccccttttgactttaacatgaacgcaacaataggatatactgattgagttttcgacttgcaatctgaaacacgaacgttataggctgatgaggtgtttaagacttcctccgctagatgaactcaacaagctcaagtctcaagtcgaagggggtgatcgagtattcctgatcggtgatgctgcacacgccatgcccatctgttcgtcaaactttcttctgtcaaccatccatcacgaagagacttccatctgacgcgcgttctgtcatcctttctctctgtcgtcaaccaccatcttcagtcatgggtgacggcgggaaccacgctctcaaagacggacatgacctcggccaggtgctctcgaaagtcatccgagctcaggatcaagcccactatgagtctcgatctaccgaaccaaaatcgagcgaacccgtcttgaccgcacttcgtgaattcgaggcgggtgcattggacagatggggtaaggcggtcgataagagcgagttgaggctgttgagtctgttcaagccgattgaggagtggagaacggcttctggagttgaggctggggagggggaggaaggcagtaagcctcaagagattacgctttgaaagaggcaaaaagcatagagaatatcaaaagcatcacgtgatagatcagatgggttcaacaagaagaacaaaacaaagccacgactcgattgtgtcatctttgcactgtacgaaggagaagaagaagaagaagaagaagaagaagaagaagaaaaactttgtaggatgtcatgctttccaaacggatcatgaaccgggtttggtctgtttcaatcttcttcaaacaagcgatcggtacagcctatacgtcatctttgaagtagagatcatgttgcgagaaacccagttccgatgatatgaaagaatgcaacatatattgaatgatcaacagagagaaacaaagttgtctagaggtatcgaagaaccagatgggtctgaagaagattgagaaaaggaagggagaataagttgatgagagagtacaaggtaggaaatgatgaagcatgcaaatcgaaaatgatgattggtaaggggtcgcaagatcgatgaatcgtcttcaatcattcatgccctggtaaagtgacgaatgcagaaaggtaagtgacctacacgaagaggtgtcaaccatagtaaacaaattcagaaaaagaaactcacagcttccgttgagcttcattcgatcagcctttgccataaacctggccttgataggctcctccgggatagggttaatcttgtcccagggctttccaccaccgctcagtcgccagtcgacatcgttggcctttgaggtgtgaacgagagtataggtcctgtattggtaattcaccagaatcgctcttgtcagtcagaccgtgtcgtcaaggcgcaagtttagaatgatgggagcatacatgaaagacagtgagaaggcaacgaccccgagaatagggtaagcttccacaggaatgatgcgcattcgaccaagctgagttcggagagtgtgaggagacattttgcaagatgtgttagggttgagataggtataggcgtggaagtggaagtagtgtgagtgagttatcagtatgtgtaagtgtggagatgtgtgagtgaatgaagaggcaggatcagcacttgaggtcagcaacgggtcagcttttatgggtctcatgagagttcaatcgatgagcaaaatcaacggatgtggtgtatgtttcttgcgcgcgcacacggatccaatctgtaggtgtggtttccgtcgcgggatgtccggtcagtcggttaatcaacttctcgggattttttcgacccgacaagaatgttgatgattagcgaatctagcgccgcgcgccgaaattgagggaacaaagatctctgtcaacgggtaagcccggttagcggtgacgataaagagatgaaggattcaagaaatctctagaagtcgtcgagtcaagaaggatcaagacgaccacagaggaaatgaaaacgttggaagaagccagatttaagaacaagcgcgaagaatgtgcgacaaccttcttgcgtcttctggttgagattatataagcagagtagcttaagtaagcgaactatgcttagtaagcaatctgatcggcgataacgcgatccaagcgcagcaggacactaatcatcatcacctccaccctccctccgtcgttggtcatcaaaagtctatgaaaagctcaaatgagatgatgactccgaggattctcctttcatgctatcaagatctatcacccatcctcaatccatcctcagaaagatacacaacatggcttctatcaccttgaacgatggcgctaaacttccggttcttgctttcggaactggaacaaacctctttaacaaggatgcagagattcaggtgaagcaagcgatcgacgctggcttcgttcatatcgactgtgcttcttgtacgtttgttccgttcctatctcatccttctaggatctgatgtggtggcagattccttctgtcgtcccttttcattgtcttactccatgcttctttcttggtttgtctggttcatggttgacacacagtctacggtaatgaagagtctgtaggacaagccatcaagggaatccctagagagaagctattcatcactaccaaggtcggaaacaaggatccacgggccagtctagaagacagtctgaaagcggttcgttcctcggtatacgcatacatgtccgagagcgcagatacttatgttctcattactctgtctgctactctttgtctccgtagcttggccttgactatgtcgatcttttcttgattcatactcctatcggaactcctcccaaggagaattggccgataatggaaggttggtctggcataaactctgtttgatctagtatgcagcttgctgatcatgtgcaatatgtttttgtgtcttaacaaaagccttgcaagccgaaggaaagaccaagagtattggtgtttccaacttcagaactcaagacttggaagaactgttcaaagtcagcaaagtcgttcctgccatcaaccaggtcagtcaatctattgtttcaactccagttctcttcttctctcttatcttgaaattctctccattcctctgtgtttccaacagatcgaggtccacccatactgcatcaactccatcctaccccttttggatctcatgaagaagcacaacatccacgccgcttgttacggacctcttacctcgctattcagagagaagggtggacctgtcgacaccctggtaaaggagtatgcagagaagcgaggtgtttcagaaggaaacgtccttctccgatgggctcttcagagaactggtcagttgatctacagtcccgtcaactctcccttgcgcataagcatggcctaacttggcttaacattttcctcccttatttcacccggtgatcctgttcttattcgtaacaggtggagaaattgtcacgtctgttccttcatttactatttcttctttcggaaaagcactggctttcttttcatgcatgactcatgccctttccctactttcatcaacaatcacagtacctccaacaagccagagcggctgcaagaaatccttcgagtccctgagatcgagcctctcacggaagaggagatcaaatcgattgaagaggccggaaaggataaacatttccgagttttcgtgagtttttattcttcgtcctctgtttccgagtttagtaaagaaattatatgattctaaccattcggtttctcatgtttgtgatccaaacaaaaacgaaatcaacccaacgtgatatacgtcagatgaagcacatggacgagtgatcagtttgaccggcgatgtccgatcatttgcctttgtaagacgagattggctggtatggtcatactgccatttagcactttatcaacactacgattcatgtataaatgactaaacataaggagcgagaagggcaatcgaagagtatagacatcgaacaaggtatagcaagaacatatcgaacgagatcagtaggaaaagcaaggaatgtcaaagaacaatttacgtcacatgcttgatgtagcacacatcctacacttcaataattgattataaggaacagaaaaagagaaagagagaggagaagacgtatgtaacgttcgcgatggtcctaccatcacctgtatttatcctcttatcaacgcaactctctactcgagatcggatccttgaatgggtcagctcctttatcaggtccagaagctactccatctgtatctagtccaccgacgttctcatgattcgcctcattatcaaaatcaaagggaacctcaaccgttcgctgtgggtatgccggttcgggcgtagccaatctaactgtcgatgtcgatgctgatgccggcggaagcatttgaggcgttggcacatggaacgagagatcggtcactgactgatgatggagcgaggaagaggacgacgcaaagtcatgttgatctgcgaggtcataaggatggttcgtcctgatcgtccggctgtatgtctttccgtcctctcctcccgtagacgggaagtaactgctgccttgtgctccggatgttggtacactgggcgagtaggttccgctggaagagtatggagaccgggggtctcttatatgagacgacataggcgaaggcgagctaaactgtccgtttgcagagtacaattgatgttcttcttgtctccctggaatcgaatatgaagaattggctcgactaagttttgctgacggtgcgttccgagggtaaagttcttcctcatcatctccaacagcagtccagtcggtcgtgctcgagtgaagccatcctcttttagaagcagccgttgagttcggtcgagaaccacggtgtgctcccgatcggaacgggttccagaagaacgaggaagagccgctagtttgattattactacgtcgacgccggcgtcgaaggcaaaaccaaacaatcagacccgtgatagttacaaaagcgaccagaccccagactgatgatcagagaaataaaccgaggaaaagatgtcatcaggttgattctcctcgtttctctgatttttttttttttttacaattgcaaatcactacgtacgaagaccccagaagccacctgtcgaaccggccaccttgggtatttttggtcctcgatactttgtctatatacacacgcgaaaaagaagaaccttcagcatgcgaggcaagaaaaggcagagacacaatatggactcacgtctgtcgaggatggaggatggtttggaacctatctcgttacccaataatcacaaccgaatcagcaatagttccgttgggtgtgacactcttttgcttctatgcccgctcaaaaaatggcctcaccgttccagtcactgtcccggcccctccctgtacatcagttgagaaacaaacaagcaatcgttgtcagcgcttcagaatgacaacccaaagcttgaaaacagaatagaatcgaggatcacgaacaccccgtcgttctatcggcctatcaaaacggttcaaaactttgtcaattctcacgtcggctataggagaagacgaatgagcaaagaatgggacgaacacatcaaacagtcgagcagctccttgcattgttctcgaggtcaatcgctgggcgatgcgtgttggcgaatctgtagactggttgtgcaatatcatgaacattttatgattgatatttgaagtgatccgagaaaaagaaaccatcagcgaagcacacaaacgagactaggaagacgatggcagtctttcatttatagaacgaaagaagcagaaagccgcatgtaaatctgtacgcacatcgcgtatcaactcaatttgatcagacatcttttcaaagagtcgtgttaactgtagtcgtgagtgttgcaggtaagtcgattatcgtgtcgactgtctgtgagcttgggagatcgaccgacggcggataattcacctggctgacgtttgatgtcaacacgggatctctcggtcttacgctcggcaagaaaggttagtcacctcgttgtatcaactgtcacgatcatctatccgggcgacactaagtcttgtcgtgtgagaccaagaacacagagagaccagaagatatattcatataaaataggcaagataagaaagtgatccacgatttgacatatacactcgaactactgatcggccgatgcagcagaaagaacctctctcagtcttcggaccatgatggacacataggactgtcggacgttcacttcggaaccaaagagctctatgggaagatcgacactctctagcttgcccaacgcaggactcaactcctcgctggatctttcccacatctcccttgccacacccttccggccccctgaagtaccgaacatttcacctggcgactggttttggctgaatcgaagagagacagaagagggtacgatagcattccaattaggctctgagcttccatctttgagtgagttgttgaggaagtgaaggaagtggcgccagatgaggagaagtaacgtatcgaccaggaaaagagcagaacaaccttgctggtgagaagacgtttgaagcttcgaaagctgttggagagccaaccgttttcgttgggctgtactgtacttcgaagtttcttctgtagtggaggagagaataatctcctcaatgtcatccgtgctaagcaactcgggttgagatagcttgagtgcaatatcctggaactggtcgaccgtcgatctgagatggatcactgtttcgtagaacaaagcgatagctgcagagatcgttggcgctccgtgtttgggctctcggctgcttatggaaggagatagcacaggctgaatctgctgaccaccgcccgtttcggttgttgcaacatagtatgccaaaaggttcttgtgcagatcctcaacagtcaggttcatgttgtactcgaacaggttttcagcccggttggtcccaggcgaaggccgttggctatcagcttgctcagcgtcgtttgtcggcacaaccaaatcttcccatttctctcgaaggaagaatctacctccgagagcgagaagagcggcgtggaaggcaccgaacccagacaggagtgactgtagacccgacgtaaaaaattcagtgcttgcgcgtctaatgaatcagcaaaacttaaggcgcaatcgaactaacaagatcttcttgagccacccttggcaacacatgagtaaacagagagacaagcaagctcagctctttgatagagatcaaagatgtcacagaaggagtgtccttcaagagagcaaggatcgtttctcgatgagcgttaatgaatccaagagcctgtgaatatttgagccaagaggtggacggggttttaggtctatggttcatcaactgttctttcgatattcgaacaggagcacctacctcagtaattccgactggggatgtcgagccaacgcttgacaggacaccggttgtcagctgtagcacaggaatcaagatctgatggtatctctcaatcgcagggggaaggaaagagtcgtagtctgcgagtcacgcagtaagaatgatgataaatttgagcgaccgtatctcatgtttcaaacgatagtttaggttggacttaccagtcatactgtcctcggcttcaggtcgatcttcgaacatgtagcattggctgagggtttcgaaaaggcgcgcttcaagaagacgctctgctccattccgggtgagtgaaatctggatgagcaatgagctcttggcctcgaatacatagaacgcgttgaggtcatctatataaaacaaaatgtgaacgacgccgtcagttcgacatacagacacaagtagatgacgttcgcttcaaagagataaaacttacccggatcaggaacgaggactcttcgtaactcctcctcagtatctttgagtgactgaacaaagtttcggaggtatccatgccgagcaagcagattgagcaatttgtgacttcgatccgtcctcgaggcggtgaccaaagactccaacgcagtgtaggccactgttttccaaatctgacttccgtccaacgcatccttgcatatgataggcgctagtctgtccatcgcgcctaccaagatggatagtgagccagactccaagactgatgactgagcggctgatttaaaggtcagtccagactcctcctcgatagcgttcgacgctgagtgattctcagtggtagaagagagcgtgacaagctgaaggtaattggccaagacagtgtaaagatttccacggaaaagctcggtcgttcctgctctgatgatcaactcaatgattcgtcgaagcaaggactgtaacttctcgctgggcagcgatccgttcacttttccatcctctactcgaagagtctgctcttgtcgaccttgacggagcttggtgaccaaagagagaagagtttgtcccaaaagctcactatcctgaggagtacaatctggaagggaaagatggtggaagatagcttgaaggagatcaaagatgagagactctcgctggtcaatgggaaccaactcgaatgacttgaaaagacagacgtccaaagctcgctgccacgagatcaggcactgctgcttggcgtaggcgacctcacgtcggtggttctcagcagcgagcgtcaaaagaatccctcgagtctctgctctgatagccttctgctgaggatcggacgaaagcgcgcccatctgttggtgttttcttcgaaccgcgttcatggctgatagcaaggcccgaatgtcgtacacttcgcaccctcgatcattcacctggaggcatgtgttgaagtcgattttcgcaaagaaaaccagcttcatgtcggcatcgtcgatagagtctttccactcaaagtcgagcgagagcaagacatcaatgatcttcgccaacggctgcccgtgagtgtccataccagctacatgagcgacatatgcgtcctgaacgctgagggggctcttgaagaggatgtcaaccagtttggtagcgtgcagtccagtcgggttgataatatgtaattcgagcgaaaccgtgtcgagaacaaacgatcggaaacgaaggaacgatgccaaatcagcggctgaacaaggaatctgctgtccattcgggtagatgattgatccagagatccctctcgagactgaaggagccactagagggaacgaagcgagctgtcgggcacagtaatcctctctggttcggatataccgggtggtagcttgaccagtgaattcatgcacacaaagctggtacaccaatctcgcgcacttctcggccaagctagggttttgctcccataagacgatcttgtccaagtcagcctcctcatcatcagtatccctcttggctccctgtgcgagcagttcgaatacaatgtgaagacaagagagtgtggtaccctgagcttgaggatcgtcgattgcaagctcggatgaagacttgttcaagttgaatccggacaagaagtgggcgatatttggtccaggacagctggccgctgtgttttggatgagcagatccaatatagatgatcggatgacctcagtgtaatcctcgtctgagattgacgaggtcggagcgagcaaagactctagagggtcctcgggagaccaaccatcgattgcgttgacctccagctttcggacgaaaccatccaagattcggagcgactcatcggatgagtcaatgattcctacgagcctgttcatgtgggagctgtaaacattctcgaaccgatcagttgccatgaagaaagccgactggctgagaagggaaatgatcttgacggccagaagggagaactcaagatcctcggcatagttgacaaacaaggcaatctgaacgacgacaggatgtgaatagagaaggtgctgatccagaggcgcgatagcagaaagaagagaagccgtgttgaaaccaaaggagttggaagattcagccaatgtaggcaagagaacctcgatgaagagagactgaatctgcaggatgcggtagacgattcggagcgatcgaagaacagccttggtcatcgagcttgttcgaccagaatcttccgccaaaccatccagaccgacagacacgacctcgaacaatcccttgagcaaggcaggctctgtcaagaattttctcaagacctcgaagccaggatgcaaggctaatacaaccacagccgagcgttgttggccgccagcctttccaaacgatcctccagggtatcctccaacggcttcctctgccaacagcgggctcaggtcgtagctcgcgagacacttttcgatgaagcagagcgatcgctcggtcagattccacctctcggcaggattagagtagacaagcttaggagctttgaggaaaacatcctcaagaacgaatcgaacataggcggagattccaggagttcgagaaccagaacccatagaatcaggcagggtgggtgaatcgatctcaaagccggtgatcagggacgacgatttagcgggggtatgaatcagggaatcgaggaggtgaacaaaggaagtggtagccgggtaagtcttggcagaggattcagctaaaggttgagtttgttggagttcgagatcatgttagtgaccgtgctttcttcgacatgagacaaaagaaaagagaggattaggcaagaagaaaaagcttaccatcctggaactcggtgatgattccgcccgaggataagctcgatctggaagccccgaacgaactcgacctgtagagacttccttctccaaatgcagtcgcgtttctgggcgaaggaacgatctccaagcgatctaatgcaacccacatctgtttcgagatgtccgcccccaagggtccggcctctggtccgcaaaacgcagcaagcgtgtcaaacaacgcggccttgaagccaatagagacgttgctgttgatgagcaacagaagggtagggattgatttgaattgttggttctcatacaaagctgctcgggcgacaggagagtagagcaccacgttcttgagtagaagcaagaacgacttgaggagggtgatctcatctggaggaattgtcgagggcgagtttgagtctcttcggggttgggaagccatgtttacactttgagtaagcgatgtctgggagttggtggtgattttgggcagctgggtagcgtaaaaggacaaagcggcgaataaactagaccaagagcatactcttagtgagttttctgagctagagtcgacatcgatacgttctccctcatcggtagcaagaaagtcaaaggcaaatgtcgaactttgtggtccaaccgagagggaagccaacatttcaaacaatgctcggatcattccggctgttcgagaatcagccgcccacctaaggaaagcaaagagtcgtccttccttgtcgttccagaatttgagtcctgcatctgctgggcaatctctgtagacggcagctaccaagatgaacagagcttcgacatcggcccgaggaggcgatgaaggagcggccgtggcgcttgagtttggaccatggctcgcgcttgctcccaacgatctacgggatgagctagccggatttggattcaagattgcgtcctcttccttgtgtttgatctttcggagaataggagacattgtggttacaaagttaccgattaacaggtcgacctgggtaagaatgtaccacttgaaactcgggtccaccacgttttcctgcctcgtcttggaaccagaattttgagtatcattggaagccgcacccgaagacgtatcagaggcaaggacgaggctgttggtagcagaggtcgaagaggaagtatcggaagagagagaggaggatccggacacaaccgtgctcgtcaggaattggaaggcatcatttctgatggcgttcgaagccatgctttccacagcctcttccgttaacctggtctcttgctcgaggtttcggttgtgtcggaaggcttctactaagaagagagcccattgaagggtgatagcagactgaagaggagcgaacttccaaggacgttcaacctgttgagttggccatgtaagcaaagacgcatcagttcacggcgtgcggatgacagctatatttatgaaattctactaacaatctcggaagtcatgattttgatgaattgagtatctctaaggaacctctcttggatgatctggtgatagtatggacaagacgttaggtcgaaacacgatgagaaaaaacgtggaaaaagactcaccttgtcatgatcaacatccgcaagcttgatgtcattcaaatcgaaagcagctagcgccgtactacaaagatcgttacacctggccgtcagttctgattgcgctcaatacaagaggtgaagagcaaatgtgagagaacgggaaagaacagatggtggacactcacgtgaccaagtagccaaccagccccctttcttcgccctcaacgtcgtccttctccaacttggccagccagcgaatcaagctctgaacctccttcttgcgcatgtttcgcgtgtagctcatcaggaacaaaaagtgaccaagcgcgtttctctctcctttgagagagaacactcgctcttgaataacttctggcgagagttttgggccagcaggcgtggctgaagaagtggcagttggagtagagttgaaagaataaccggtcgtgagagctcctcgcccggaaacggaatcgatcgagccttgtagcttcttgattgaatcctttgtgtggtccagatcgagtaacgctctctccaccaagcttccttcctttccaccatcaagctcggctatgctacccttcaaatcctttccaaatgctctgagaccgtcgagggcggatccatccacgccttctgtcatcaccgcggggtcgaatatcagatgaagacaggcaagcatatccagtcgctccatatggaaaagaaggacggctgtttcggtggccggtcggttaccatatctggactgaagcttgatacctgctcgtagcagatgagcacagtaaagctctgagagggacaattctgtcgacaagaagagtgtctctgcgatgaactctgggttgagggttgatgattttcctttgatcttgatggagcctaaagcgcgttacagacaaaaatgcaggagaagaatgatagcatttgtcaatgactgcatcaagaacaatgtttcaaggtatgagaattgaactgacccttctcgacctcagtcttttcctcagctttcggagggggcactcttagcaagtttaggaaccatggcttggccttctctagctcggtatatatctccctggtgacatgaggagtggaagaagcggttggactaaacaaggatgacagaagcgatcgaagcttgttgaaccgatcaggctgatacgattgaagcagggctgccgtcgaagtggacatagtggaaggagagagtgtaggtatacgcgggcgatttgatgaccccaagtctagcctttttgagagatttttcgactgttcctccttcttttcttatcaaaaaggtagaaagagatccagaaggccgtctactagatggtatatgggtgtatgcggcctggaaagaaagaagagtgagaaacaaagaggatgaaaggtggagagaatgaacgagagaaggagaaagacttgtaagagcttgaaaaacaaagatctctgagctgtaaccattttgtaaccggtgtgaccagccggatcgagcgttctaatcacggactacgatcaatttgtagttggttacgccaatttctctaatacttttcaccagcccttctttcctctgcctcaccttctctccctttcctttccatctctccatcatcatctcaaatactcaatcacatcattctcttcatcttcagtcatgagagctctccagaaggccttggttcctgtgccaagtacaaaaagagcaagccttatcagatgtctttcgtatatatcctcagcccgaccagctgctcctccatttctgcccaaagcgtcaactgggccgccatctcaggccgcttcgtcttgtagcttacctgatagccaaggggattggaaagaaccatttcagcgctcacctatccttcctcatatggacccttcgttctcatctgcttccctgcctccattaccagctaaaccgttcacaaagaatcgtacgtccagctactccgctgtttccacaatatggaacttcaactgatcatctcggagggcttcaaccgggcatgcatataaccatacacggctgatatagcactggaatccatcaaatcgtacatggaagtctcaaacaaggtgcatccggagtcgtcttcgcctgtcttgattccttcgttccaaccacaggtcgatactacatactctgtcatgctctgcaatcttcctcataccgcccaatcacaagacgtctatgccttcttgtctagagccttggacgatgatagggatctccccacatgtaagctcgcaagtttgcaattcattctaatgatttatttacagggtttctaacgtgttcttgatctgccaatcacctactacgtagtctcttttgttacatctcccctggctgatccttcggtgccccggactgtcgtcgtttacgccagagatgtagtgcagttcgaacagctgctcgcactacttccccggaacggcccttcttccgccaacccgtttgatcttataccgccagcgtcgcctccactacctcaatggcgtcaaattggcggccgaactatctacgcacatgatccgcaacccaaaaaatcaaaatggagatcgctcgaacgaacaaaggacagattcgtggatgaggacgggtatcatttcttgctttctggcgtgtcgacaacctttggtctcgcgaaggtgagaagggtgttaaaccggttttgtcagtgggaaggcgaccttgaaggcagtcgaagtgagtaatgacaatgggaatttgaaccgaccaaggcggtagatattgactttatctttgatttttttttagtccgagctctgggaccagaggacgcaccgtcgaggccatatcatgtcattctacccatcagagcggttttacttcaacccgtattcgatcaactgtttcagtcttcgaccactgtcttccagccccgatcagaacatcccagtgagggctatctctcgagtaatggacccatttggttatccaatacgaatcctatcgagctcaacattcttgaacgatcactttcgcctcaccgtacgtctgtccgtcccccagtactaagggtagagcttcgggccgaggacaatcaacctagatcatcgtcgatctcagcggctacttcgtctgataggaactttcggccagttcgtccaccggagacatatcaagactggtggaagccatctttccagtcgctcaaagcgctgtcttatctccaaaatctatctttcctcacttcgttctcgttatcttcactctccactcgaatcgcttctcctgggttttcctcatcctcgtcatccgctcagttcggaaaaggggtttccagatcgtattggaaacatcacgtctatcggcgagacagattcaatctagagcggagcgccccagcctggcgaagaacatatcttccaatatactctgcccttcttctccctctcgtgcctgcatcactcctatccgctcaaaatcactcgttcacagatctatatcccgtctcatccgtacatgcatatccacccgccctggagtcatacgtgaagccccatctaaaccgggtggctgtcgagaagaagaaaaattgcgaagcagcgagagtcgtcgtctcgggtctgccccattcgttacaagagggagaacttgttcgttggatgaaggcccaaaggttgggagattggctccagatcatcaggcgggaacctacaaaagaccgaatcaaatctttttggtctgccgctcgacttctcggagggtccgagcaggctgagccgagcaaaggaaaagaagcgggaaagacggaaggatggttgggtgacggtctcacaagtgcttccgtctttaagttgactcaaaatacatcacgaacgacctcggactttttgatcatcctgccaacaaagaacgaagcgttcagattggctagggcattggatgatgcagaatttagattctcaaagcaaaattatacaatatacaagctgagggctagagtttggcatgtttaatctttctgtctctactcccttccttttttcaccttttataattccctttcactcttggtcatctctctcgttgtaaaaaattgtaggttacgtttctctttgttttttctcctgtaccgtggactgttttttattgcctgcctctcgttgtatacctttcttgaattgtacccaaccaaaatatcacgctctcgattggccccttgggttgtaaaaagtgcacctcgttgagtcagacagaccctgagctgaggaactacatcgataaatgaccaagaggaaagaaaagaccagacaaaagccgacgtaggcaagcaagaatgaggaagaagacaaaaagaaaagaaaacaacagagaagacaaagaacgaccagggataatttgtgaagaaagaaatatttggtcacaattttgagaggttggtggagaagatcaatagattctatatttaagaaaagggatcgagatggtattcaggaggaaagacgaatgggtatggcttttgcttaagcgaagatcttgcgcacgctctgtcaagattggcgtgccgtaagaaaggcaacaacgtcagtggaagtcatacagatccataaagaaaagaagagaagagaagagatgagacggaccttcttgtccttcttctccgagtcggcatggctgataaactcgacttcggtctggaacccaccaagcaagctatcctcctcgttgaatccaaggaccgaggttttgaagtgtttaccaatggccacgatcctcttcaaaatctcatccgtggcgggatcagcatctggtccaggagcaaatctggtccagatagagattcggtagaacgagtttcgggtcgagaagatcacaccggtgatgaggtccgaggtcgagggaaggggatcggcattctcctgttcgggcatcggagtctcgaacgtctctccaatagccgcaagcatctacaaatgatcatccgaggtatatatgttcagtgttgcaaaagttgattggagacgtaaagcacgtgcataaaggaagcaaccgactcacagtgtacatccacatctggtccacgccagctcgagtcttgtccttgggcatctggaaagaccattttcctccgtgcttgtttgcttcgtcctcccatgccgggatgatactctcctggaaaggccagattgaagtgaaatccgattgagtttcatggtgtttgatcgaaatataatgaaattgctcataaaaagcaaagacgtaccttgaagaggtagtagttggccttctggggcagaagagacggaggaacaatgttattgtacaatctgttgattgagcaattggagaaaaggtaacaatcagtttgtcaatactttctttgttatatactgttcgcaatcaagatgggtatgacgcagagcaaaaagagcggaacttacccccaaaactcttccacgctgttgaagctgaccacaggtcggacgttgtccatccatcctcctcctgcaggagccggagtcgaaggtgcacttccaggctgtaggtgttcgatgaatacattccgtgtttgtccgagacgaaacaaatagtcgaattgtcagcatacaaacagttttagctgccagtcgagatacatattgcaggctggccgaaacagagtttgaacgaacagcaggagcaggcttaggcaggttctttgactgttgcgactcaaaccacaaggtccagggagagtataatgggtgctattgaaaattaaacgttaagcatacagagtcaatcacaaaacatcacagcgatcagtaacagcctgccacatagatcgcccgagtaaaggattaaagaactgtgagaagcgacgcaatgagtagtctcaccttcacgttgaacttggtcggcgagtcaaacacagtcttgacagctccatcgactttttcaacagtctcagttgtttcatcggtggtgatattggcagctggatttccaacaatgagaagaaaaagcttcaaggtaagttgacagattgacatatccggtggaacaaagattgtaggcccaagagaaagggtacttaccctccagagcatcattcagagcctgagtagcagcagcgatcgcagactcaggcatttgaactgttgtaggagcaacagaggtagcagctggagcaacgggagcagaggattcgacttcggccatgatgattaggtgtttaggacgtgtaagaagagtggcagaacgggtcaaaggtcggtgtgggcaagagagaagcagaaatggaaaacgtgatgggttgtcggaggttggttacgagacggcacagaatgctgtgtgcgtaagttgatcacactagcacgtgaatttgtcatctctttgctcgccacccagatcgttagactacggttacttttcatatacgcatcatcaatcaagagatcgagaggtatgagtgaggagcatttatgatcgatgcgtcatcaggctaggacaggtgatgcgtttgtatgaagacatgagacaagataatgcggtggatgaggtgaaatcacactgataggtataactttggaccgctgcctcctcattggagggattagttcatcttccctcctttatatgagtggcttgaatccagcgcaaagaaggtcaatgtatatgcaggagagatgtctcaggaatatcgtaggagagaaggaaatactgaacgtcaacggacccaaagagctgtcgtatgtgtgtgaaggcgatggctacgcgacagtctcgtaatcagatattgaagcctcgtcgatttatctgattggccatttatcgtctccttttttaccttctccgatttcagagctcctccccttgagttcatccttccacccttcttcatacatctactcaaagacacacatcatgacagaattgccagaggtcgattcattgatcaagacgctggtcgcaccacatcacggaggaaaggagtcgaatcctaatgaccctgctcgaaaggttaggcccgaacgctcttttgccgttatctttttacatttatcttcgctgtggttgttcatctttcagacgataatccttaatttcccatcgttaaactgatgaactgttttgctccatggtatttcactgtcagatatcgatagaacaacatgagttgattgacctgttctcggcagactatcaatatctcttcgttgctatctgtcttgtactagcactcgcccactggtcaccgttgagtctcagtcgagtgtctaacaaaatgaacgctagaatatcaagtgtcagaaactttttcgctcgaaacgtattcatccgaaaatgggatcttcgaggaaatagagctatggttcttgtctggctcgtctggttgatttataacgccctgtcgattttcgtgagtgtttttcttttccctctttgattatatacagccctgatccattgtgtgtacacatgtaatgcttacgaccgacgaatttgtgcttgtcatgatttcaacagtatcgcacaaaccctaagattgacaagaagctcttgcgaaagccccacatgcctgtccgatgggtagccaaccgggctggctgtctctgcttgtgaatcctttcattttttctttcaattcattcgatcttggactaccgtggcgatcgctttcagattcacttcggcacagtccttcatttctgtcgcactgctgaccaaaatttaccatgcttcttacttccaaattgacccagcgcaaacttcccagtactctttatactcgttatgcgaatggactatttgacttggctgactagtattcctgtccaggtgtgtccattatgcttagttttgataaacaagttgtctacgctgactgcttctccttatgatctgatggcgcaactctctgctgataccatatctgataggatttcaactggtttcaccgatggatcggatggggcacgttcgctttgggaatgacacatggtatgtcaacttcctctctcacagagattaaatactcatatacatcattgagctaaaactgatatatctgatctgttgtgaacagtcgttttatacgtaagtcatcttacgagttcttgatcaaagcaagtacgcaactgaccggataaaatatttgtatttccatcttaatctcagattatctggtactttctgaccttcagagctgagacatggcacgtgttttggctgtccttgcatcaactctattggttttctggtgtgatcgcgagttagtggcattagtactctagactgtgttcagttctttctctgacgttgatctttcgtatccactagctcttgctttcgttcttctggccgttttaagcacaaaaagaataagaacaagatgccatgaattgtttattacttctcatgtcattctttcaattatctttttgtaagtctcgggtcttgttctgtttccaaatttagttcaagagatgtgctgattcactgattaaaatcttatcgttctgtagaggtgcctgttggttgcattggtttgtcttgtcctctacgcactctatcacagatatctcagcatccgacttacctgtttgtttctgctcttctcctgatccaaaggtctccgaagggcatctggcctctcaccgccgcttttgtctttacctcctctcgagttcatcgaatagttactgttaccaggaatgggcttttgattcctctgttgtcccgttggcgtggaagttcggcttctactgaaccgctgaagaagacctctgaggtccaggcgatcattgagccgctagatgagaaatgtgtcaaggtcagacttttagttgacaagaacttaaagtggaaaagtggagactgggtcaagctacattttggaaatgggctaggaccctatcaatggtttgtttgtttcttatcatcaagccgcgcagacgatgaatgaagtcttaccatctctgagtaaaacctatcgtaggcatccgttcactatcaccaacacgcctgctatccagcctaggatcggggcagaagaagaaggaactttcaagtcttattcttccacctcatcgactccttcgatccattctcaatcatccacactgtcagccagttccccgtactcgtcctcatctgcgacgacactgccaagaatcacatcgtcagattaccctcttgaacttgatccgctccttgcacgttccaacgaaactacagtccagaacgagatgcagttcatcattgccgcttatgaatccctcacgaggaaactccatgacgtcgcgcccactacagtaccggttttgattgaagggccgtacggaatggcgcatgaccttaaaggagtggatacgttgatactagtcggaggtggaacggttcgtttcttgtttcgaggcgagtgcattcatatttacttgagtcacagtaaactgaaatcatggcctacgacttgaatcaccctagggagttgcgtatgtgcagtctacctgggaagaagttatcaagaatgagaagagtacaatcagaaagctcatggtcgtgtggtctgttcgagagcggcgtacgtctttcctccgattttcccaccgcctttgttggactcatccgcaaatctaatcagtgattcaatcaactacagaccacttcaattggttacccctacaagccctgacgcaagcatccccctccagcttgatgacacctcaatcggatctcaaactgcactgtacatcgcacaagccttcggatggaccgtatgttcatcctgagactggggtcaacgtacgtgctggaagaccacaatggaatagtatcatcggtgaaggagtagatcaagccaaaggacgggtactcgtattaggtgcgttggagttgtaacctttcggtcgtcacaactcgctgaaactgattgtttgtgaacgtgtgatttttgatcctttagtctgcggaccggttcagctcacgaatgctggtaagattttcctttttttactgctctcgttatctgatttacaatgagacacgaaactcatgttgcttgcatcttggtccatactcatagtcgccgaagccgctctgaacgcgtatgatcctgagaaaatcagacagggtgatctcagcggagacgtgcgagtgggagtcgagctcttcgattgattatcttttttctttacgttttcagtgacaatgcttttttatatttattctagagtttttttattatctttctcctttctctttttctgctccacaatttgtatgccttgatctcgtcatcaacatcgatccctgaatcacatagaatcttgctcccccttcttcattgcctgttcccaatgtcttgcgtgaatatccacttaacgatccttttcacttgatgatttcgtctcaccgtaactcatcgttcctctccttgtattcttcattatatcaatttccttctctttcgctgttcctcctatcttctctacggaatatggtgacaaagacatttgacgattcatgtagtttggtttggatgtgaacccattcatagaaagaaggcgcttgatacatttgtacacgctttgaaacctgaagaatcttgagcctcaatgatcgaggtctcagctataaaaagatgacgattgttggtggataacaacaaaaaagaaggaagaaactcaattgaaagttcaataaatcacacaatacatcaagagggctagagagagaagagtcaagctaatggaaacggaagagatggatcagccttctaatcgttggcatcaaaaggatttcgggtgtatgtcagatcgtcgtcactatcctcctgatgtttcttgtccgtcgactttatatccttttcagtagtactattcagtaaagcagcctcgtcaagtttcctgaccgcgcttctggagtcaggcacgaatgatgctgggatgggagagctagaaggagacggaacgccaggcgaaggcttgccgtctagggagatcttttgtttaggaagaagtccaaatttagctgcgcacccacggaaaagatcgagtgtgataagtgaacggctggttttcaagtcttgagaaagaaggaataagcgcgctaaccgaaatcgatcttattgttaacaggagaggtactgatgcctactcctgatctgggactagttcccaacattcctgacgatgggctcatccgaccaccagtgtttcggatgtactcatctgatcttctcgtagcagtcgacgaaggaaggggagatgataggtttccgtttgagactgaaggaaaaggacctgaatcgttcagaggtgcgttcgtgggaagtggggtggctggattgatttggattttggtagacgctgtagagtaagaaagcaatcagcacagcgcaacgagcaaaggtcgccaacgttctatcttgccacatacaaaacattcaggctacacgagaggaaacaaactgacgagcaacatgccaatcttcatctggccagtctgggttttttgtttgaggtcgatgtggttcagaaggagatcgataattgttgttgtatccgcttatctgattggtgctgtgatcctcggtcgattgggcgttattttgcacagaggacgctaacgccggtagagaggcaagcttggcctgcgcagtaactccagcactgtatcgaacgtcacaataagtagcccgttttgcttttgatgaagaattctagctctctgattttaacataaaaaaaactcactaggcaactttatccttgacgttcttcataaagctactacccatgaacccgtcgaacttctgttttccctgagtggccaatttctggaactgctcctccaggcctatgctttccgcatgctggtcatggtattggttctcggatcgatatccgtaattttgttctcccgccgcttgattatcatgatgctgcgtggaagacgaagggttaaaaccttgctgatattgataaccttgcttattctttcgaacccgtggctgataaggaatattggatggatcaaagattggttcagagggatgctgagtggcaggccgctgggatctttgttgcatccgcagggcgtgcatatggttttcatcttcgagtgcaagtgcacgggcgacgctagcatcatagtcggactgtgattggagctagtagatgataatgaaagcgaagaacgccaagttgatgggttaatattcgctctgaagctcagattaatgctgatgtaatcattgagagacaatgaacgtacgacatcagcccctggccgttcatctccaacataggtctcatccgtcatcctcagaagacttccgactgctttttcttcatcgccataatgagcctcgaggatattttcgataacaaccgtttcgacggtgggaaaaattgccttgagcgaggtgaccttggggttaactgccggaggcagtgggtcaggtgcgatcggaggagccatggctatctttgatgtctgctgtaagaatgtgatgggtgaatcatcaagctagtggcagtaccgaaagttgaacgggccggggcggtgtaatgtggcgcgcattgcacacgtgacaaggataagtagtcttcaaggcagtgtgatcactgccctgcgggtcaacagatgacatctccgccggctccggtccgaagaatctatggatatattatacctgccggtcagaaaatcaaggctttcttcataattgttctttctcatcctcactcagtcatctatcgacattcaagcagatgtccattcctgtccgaaaatcatctcaaggcgctgtcctgatctcttatcatgacttggttgaaaatcctttggctcttcgtcagagtatagaggctgggtttggaagcggagaagacgcgcttggaatagtagttattgaaggtatggtccaagcaatgctttccaacatgttgctaagctcaaacgagtccttaactaatcgtgtttttgtccttcctgttggaagatcttccctctgagtttcctcatttgagagagcgactgctccgactgattaattcctatgccaacctgccagaggaagcaaaggcgagctcgttggcaaacaagtctaacggatattccttcgggtggagtcatggtgtagagatcatgaacggggtaaggcgacttattctcactcttcatcagttctcctttgaactgacagatgatatgtttgtatccatcatccgactattacgttcatgcgataaacaggttccagatttgttcaaaggttcatactacaataatccgttgacagacaacccggacgtttctgccgccgagcgggccgcttatcccatgtactactcgaacaacgtctggccggatgcacgagagcgcgacgtcgatggcttcgagtcatctttcaaagagtgtgtccatatatctccctatttcaatctgtctagagcgattactcgcgatacaagcaactaatggctgaaccacatacaaaacttggtcacacagattgggcaaattcgtttttaatgtcggatgtttactttctaaagcgtgcgaatctttcggtaagtatctagtcatatcttcgtcgcttcctggtgggaacgaagtctcaatcgcttgcatttaattatctcgatagtatctgaggctctcgtagatgcttctcagacgatcgaaaacctgatctcaacgtctcagtgcaacaaggtggagccgatttctactttgatataggctatgttactcgttcaataacttaaatgtttcggctcataccgtgtgttcaatggatataaataggcccgcttgctccattacttctcgcctcaagatacagtgaagccgaagaaagagggggtggatgatgatctttgtggtattcatctggatcattctcttttgaccggactctgtaggtccattgcttaccacatggtcttttagatttgttgttgctgactatctgttatctttcaaaaggttctgcgctttatctgttccatcctgaaggcgtcaagtctactgaagatctacctccaaaggctgtacccgctccttatccaaattcgggtaagctctgttgaatctacattcagacattaaggtagctcgtctgagtgtctcttggttgtatttccgacacaaataccatttaggattgtacattataccccgatcgagcacgacgcccgtgagggtatcaatccctgctgattgtctggcttttcaaacaggtgaagctctacaactatgcacaggttcgtgtttttgttcatcaatgtttctctctctctgagttttgtcgttatagtaatgttggtaacgagtgttcttaggtggaaaacttcgagcgacccctcattatgtgcgttattcttgtctattcaatgattcagtagtagtatcagtctgttgacttatctaaatcatttctttcctcttatttccgttaatatgctcccaatttgcaaatgtaggtccaagcgggatctccagatatacatggagagaagattacgatagacgggcaaaaggggacggtcactcgtgagacatttgccttttttctccaacctgatgtgggagcgattgtttccaagagaccagacggttcgcaggaatcattcggcgagttctcgaagagaatattggtgagcgagataacactgtagatcttttcggaacacgaagactcatcgagactgatcatcgctctttgttctgatgccccacggacccatatttcgaaacatcaggataagcatcactcgttctaaacttgtattgtacaaaacaaagtcaagaacgaccacgctgtgtgtgtgtgtgtgtgtgtgtgtctttgcatctacatatctgtatctgcgtctgtatctgtatcctttgagattatggaatgaatgtgactgatggacagacatcagcttgcgagtaagcatgcgccatattagaagtaggcatgtatgtcatgatgagcaaagatgcgttaagaataatcccttgactgtccaggtcctcgattttctctccatccgctttcctctcactctcatgttgcggatcatccgctcgtgagacaacttctgaatgatagtacagctaatgaaccggtcattcactcgacatcgttcaccggtcatgtttggtgaaaaacttcatgagcaacagcagcaacatcagcatcagtatcaacaacatcaacagcagtctttaccgcaatgctatcaggtcatatgctgcgatcaacctcatcacggtgaaccttctaatacttcgtctcattctccgacaacaatctctcccaaaaacttttcggtttcccctgcagcgacctatctgtctgcagttcctcctacggatgtctccatgcattgctgctctcctcccgtgtcgtttgatccagagtgctatgattgttcgttcgagtgcatcgaagtcaactttccgaactgttcggtcgcacttgattctgcctctgcctctgcctctgcctcgccagctcaggcagtcgattgtgtggattgctccatggccatgga

SEQ ID NO: 2164 - DNA, 4360 bp, Xanthophyllomyces dendrorhous
gctccatggccatggaggaacattctacgaccggttggccgtttatcaatcctcaagagatagggtgctgtttcgaaccggattgctcggatgaaccgccaaagacggtttgtgaacaagccgaaacgagagctgaagaatcgggcgaatcaagctactgtcatggctgcccaagcggagctgacaaacgaggagcaggatcagaaggcgaagaagaggaaatactggattgctgtggacggatctgtggacatcaacatagttggaactgtggtttcgacaaaccggaggccggctttgatcatattgtgcgttctctctccgactctctttctacttcacaggagggcagtatgaattgttgacatgcttgaacatttctttccttgaaatttgccatcgctcccgttcagtttgcatgttatcatcccaacacaacgcctttctcgacgccatcagagcttctttccaatcagaacgcttcgggatgcgcatctcctagtcattctcttccgggtccctccccttcgcaatgtcaagatcctcaatttcatttaccatatcccagtctcgggtcatcggctgatggtcctctctcggccctgaacgtacttcttcatgctgccaacgctgcttctaccgatgttcacgtttcatcgtccagctccgtttctttatccaacactcatgccaacccttccgaatacaactttcccatggattcccttacgggatctcttcctgatcctgatctatcatccccttcatctatcgcggctattaccgtcaccgatggcgatgcttatcaaagctacactctgactcccaatctgtcagcttctcctcgggcgacaccaccctcggatctagaaccattaacagaatcctcattcatgaattgtcaatggtccgattgccacgaaacgttcccctcgttggacgaactcatcgagcatttcaggacaacctcgtcccatgttccccttgcttgtttgacctcaacggaaaccccaatgggcgccgtaaatgctccggcagagaccatggaatcagtatcgttgcaaacgacagcagcggctgaagaagcgagaagcatcatattccaacagacttctacagatgaagatcctttcggaagggcccaaccagtttcatcgcaaccggtgcatctgcattgtcagtgggggcaagatcatgctttcaccctctctggctatccaacagtgtttcccccggcacattcgaccttggattcatttagtatagacgctcaacaatcgttggacgatcagttgtcacctaaccaagtggattttcttctcaaacatcttttggaagagcacctcaccggtaacactaatcatcgaaatctaatccaaccgactcagtccgaatcagcacagggttcttactactttcctaattacccaggaaccatcccagcaaagccaatgacttcttacgatatgatgtatggtcacacattaggttctgcactcaacggaacctcatcctggaacccttctatcgatagcctctcctcgccctcttctccttcatctctatcttctttgtcgttagatcgttcatccggaaaggcttcaacgagtccaaatacagtcgctcgtatctcccagagtcatccttaccgttcaaggacgacactacccgtgccatgcgcctcgagaccacaacctcaaccttcatccagccggcagatcagatcatcgtcccacacagggaaagaaaacgctgcagaccatggtcttgttcgacgtatcaagagcgaagagaacgatgagctcaaggcagagagatttttgaaagcagaggaagaacatgtgtgtggatacctgggatgtaaaaagacgttttccgacaccgcgagcttgaccgatcatttgaacaacgtgcatgttggaagtgggaaagacgtttatcagtgtgggtgggaaggctgtgagcgggcgatgcacggtcgtaagcattcttcattgtctcttgttgcgcatatgtcttgttttggtccaaacagaactcctgatgactatctgttcaatttcattcccttttggcttctaagctgtattcaaatcaaaacaaaaggtcagcgcacaatcatagcttgcattgtatcgaacgcaactgatttcctccgctatcattcattgacttcaactccagatcatgcgacatttacaatctcacacgaaccacaaaccgttcgtgtgcgagctttgtaatcagacattctcagaggcagcaacacttcaacaacatatcagacggcattcgaatgagagtacgtactgagccttgttgtcaattccttctcggatggaccaacagaactactgttgatgatatgtcattgcaccctgtgtattgataaccaaaacaacacaaaaaaagaaccgtttgtgtgtgactttccaggttgtgataaagcgttcgctttgatcggctcgcttacgattcacaaaagaacgtacgtgtattcatctgttcgagcaaagcatccttggttgttttgtcacttaactcttcacccttcttgaaaactaatcggatgaggatggccatacagtcatgacggaattaaaccttttagatgctcgttctgcgacaaatcattcgttgaggcgagtaatctaaacaaacatgttcgtcttctcgcaattcttcaatctgtacgacatggaagtcttagctgataagcaactatccatggacttggttgcgcatagatccgaacacacacgggggaaagaccacacaagtgtgaatatctcggttgtgacaaagttagtctgaaaccatcatcgtatcccttttcgattagattgattcacgccaacggtcgttccaacttgatatcctgttctctcttgcagagattcgccaggccggaccaactaagcagacatcaaaatgtccatcggaagaaagaagccaaggcgctggctttgaagaacggaataagcactatcgtatgagactcgaagtacacatttcaaaacacgaaggagatcgggacctgttcaaatgattcggacattgacatctatatacttgagattctgagatgatcaaggtgcatatttattttgcagccacgatcaaatagattcgatccttcttgcccttcacctagtcccgcatgatcatttattgttaatcacttcttgatcatctcaagcaagctctttctttgctttgcctaaaagaccgtcaatttctttggtgtatttatcggtgacttcttgtagctaaaaacgagatccgattatcgataatacgtcagctcgtgaatcaatactaaaatgaagagagacggcgaaaagataggagagatgaatcgatcagacagaagtgaaatcgacaaggctcacctctgaggaaccgtcctttccgaggatcttcatgcttgccattctagcctgtcgaacgttctgctttgagctctctgccaggctcatcagattttttagcatcgacgcccgatctgacgaagacggcctgcccaagcgatgtacagattagaaaaacaaagaaacaaaatcagaatcctcaagacgctcatttgaaaaggccttccaggtcaagaaacaagtaagcgcaatcaaacttacctggggacggtgatcttgattgtccgagcatccgtcgaggaaggactcatcccgggcaagttggctttgtggatcgcattctcgatcgtcttggtgtgctgttttgaagcaaatcaagttatggacggtgttgtgcatgagtagctggggtttcgcttgagaatattgagtgaatatagagcaaagagacgcacactctcatcgaatacgtttatgatcaaggcgtttgctttgattgagatcgtagagatcgcgctcagcgagagctcatttgtcgttttgggaaggactacccgaatagaatccaaggcggctggccgacgaggaagaggcaggtgtaaggaatcaaagagaatgccgttgctttagtcctgccgacatcatacacgattcatctgggctagaggatgcaaagcacacttacagcttgagaccttgcctcttcctcgatcaatagcctcctgggtcttttcgctgaaccactgagagaaacccttcatcttgattcctgccttcttcacttcagtcgcagtgttatcgacctcgatttgttcagacctaggagttctcttttgagaccaatcgtcatcgtcgtcatcttcgtcctcttctactgctttggagcccttcttcttggaagcgatcttctcggcaagtttaatcgcccccttggactttttcttggctttgacttctcgaccaccttgaccggaagcctgaagaagagc

SEQ ID NO: 2165 - DNA, 2946 bp, Xanthophyllomyces dendrorhous
ccggaagcctgaagaagagccgaattggtgaatgttcgaacggcgggaacaaacacgggtgttgccggtaaacgagcgagcacaagagctgctggctgtctgactgaaaggcttcgaagtgcgagtcggggtaggaaggacatttgaggttgaagaccggcgagaggtatggtatggtatgatatggtatggtatggtaccgagtggatgaggggaaaatagaaactcaaattgatcaacgatctgatattcgactacaacaacgaccatcatcaccatcagcagcagcaacgacatacacgcgttcaaacacctgtatttacacactcattcccatctgttcgaggctgatcatatacatagataccactcatatcctcctaaattaattcgccgccatgtctgaagagtacaagaagaaggagctcgctgcgagtacgtccgcctccttcattcatccagcctggtagagtgaaaggcccgaggttggctggttcgaggaagacatcttcaactttgacctttctttgcttgctttgttcaaacagtgatcaagcttccaggcaacaacagtgagcggccgtttcttgtcagaagtcatcaacggccgatatagcaatcggattgagctgaagatccatcgccaggtgaggttctgatggcccgagctgaccatgtttgcttgtgtttttatcgattcgcccgtcagtttgcaatgattgtccggcgcccaatcctcagtgggcttctctgtcgttcggtacattcatctgccttgaatgctccggggttcatcgtggattcggtgtgcacatcaggtgagctgagtccttctcgttcctcggtttcctatatatgaagagggatgctgattcaacacgtccgtggtgtatgtctacaatttgtcgttcttcctcatagttttgtgcgaagtatctcaatggataagtggtccgactctcagatgctcaagatgaaggttcgttccgtgtccttgttgatacttgcaatccacccgtcgcctgaaacgactaacacgtttaatgttctgcgcttgggtagcttggaggaaatacgaactttcaagacttcatcaacgcttacggtcccgaaggaggttacaagaaaggcatgggcatcaaggaaaagtacttttcttgggcagcgatgcaataccgggacaaactaagcgcgatgacggcctcacctccaaccgaatggtcgccttctcctccaccgcctccgtccgcctcgtcaacactctctccgcccggatctaacgcgtcgtccagaccttcttctgcccaaggagttaggaaaccaagaggtatgggtgcatcatcttctcctttaggctatcaggatgacgcgaatagtcgaagggaagcgaacgaggactttttcgccagcatgggcgcaaagaatgaagctcgatcgaccgatctgccccctagccaaggtacaatatcaagtttacttctaactttctgcactgctttactttcaggctttttcttcttcttgtttggttttctaacttggatatggtcatttgttgggttaggtggaaagtatgccggctttggaagcggaggagttcaacatgacgagcagcagccaaggcgtcaagccaacgagagcttcttcgccaacttgggttcccgaaaccagtttcgatctgctgatcttcctcccaaccagggtaagcgctttctatctcttggttctttgccatcttactgctatgggtttccgttctgaccgagacccaatgttcctctgtcttcttaaggagggagataccaaggttttggaagcactccagaaccctcatcttctcaacatccttcctttgctctctcttcccacaatgctccttccctcgacgagcttcgaacagatccgttagcagctgcagctaagggttggggtcttttctcagccgccctaggtgcagcaggccggactgttcaatcctccatcgtcgatcctactcttcatcaactcgccgacccgaatctccagtcaagcttccggagtggactatcgtctctcgcggagaatgctcagcggttgggagcgaatgccggtggttttgtcaaagagcgggccggtgtcgacctgacagggcaatttggaaacatgggtttgggaggagggcgaggaaacagaggaggatattcatcggcgtcggtttcgaacggggactcttggggaaacgggcccgcatcatacagtgattatccagaggaggacgactatagctcgaactcggtacgttgtcttttgatgagcactccatctgtttgaaagaattcaacgacaactcaatctttttcttgttcttgtttccttttctgctcaatctcatgtccacgattttagtacggtaattacaactcggcttcaagaccggctgcccatgcgccagctgctaagaaatctgtcactcctgcctctgccaacaagaagaatgaggattgggacgactttgaagacttctaaaaaaaaattggattcttgctctttcgttttttttttcttttgttcctgtttccggattcctcaagtctcttcttaatttgttatctcctctctcagagctctttcctttacaattctccaatctagtcaatagtgataccgtcaagggaaaaaaattcaaaactccccgaatatcctcctatctcatatcttaccatctttccttctgtcttctggcgtttccgcgtagatgtataaatctgatatcagcgaatagagaaagcccttgaaaagtgcggatctgacttatggttcaatgtcatgtgatacagtatgaaaccaatgaacaagtaggaagagacaaagatcagaagaaggagaggaaagaaaaaaagaaaagaaagaacgatcctcctcaagtcacatggcgtagggaatgttgaacgggaacaagaggaatat

SEQ ID NO: 2166 - DNA, 3922 bp, Xanthophyllomyces dendrorhous
caagaggaatatcgtcgaaccaataacgttctcaaacacaacttaagtaacataaaaacaagatcgtcggtgaagacgaagactcttaaacctccagtctatcagctatgccgaataacaactcggctaccttgtccgcttcgctttgggcttcctcgaccgacgcatccaatgtcagagcctctgtgatcgaagggaacgtggtagctccataacccaaccaccgacctggtgccgtcccagtgtgtttgtaccactctcttcctttgaggccatcaccaaggaaaccggcttcaaacttggaaatcttccggttgatcgtttggatctctttgagaaccttgcgaatcttgtgaagctgtttcttgcagggagcttttgaatgcgctccaacatgctttctgtcaccgtgatgggtcaaccggctaagtttgtcaagcgcagcactggtctgggcgttgagtttgacagtggcagcctggacggaggagatgccttggtcaagcttggtaagattgagcggagtagaatagtggaaggttttgtgaatgtattcgaccctttgatagttatacggtgaaaagtgttgagggcatcaagtcagtcatcgtcctgctcacctcagctcttatgacggtacgtatgaaaaactaaacatacttgttcttgtagtcggatagttcgaatgcatactgagtgatgttcaaaggaaccaccaaactatcggccacacggagcaagaccaaacccactgtgacatccgagatgcaaagcgatggcagtcagctagtcatgtcttctacatattggtacaaattgacttacagatcttggcagtcacgatatgtctggagaatccaggatctccgtacttttccatccagtactggttgtcatacaccgagtgatagtgatacactgcatcacctgggccaggagaaaaccctggtccatcgctggaagcaactcctaaatgttgtaagaatggctagaacgagggagaagttcaatcagtcaaggtttctcggtacatacagtttatctcaaaaagagcttaccgtgtaatctgatccagatccaagggaagggattccggtctgactggcggtgaagagcgcctcgaatccgtcatcgctccgttcgggcttgatgttcttgtaagcgctccaactcgcggcctcctgtccagcagcccaaacggagagcctgtcacttcctggataaagaatttcctgagaggtcgctttcatcaggtttgccaatgaaggagaggcagctacgagatcacacgcaaaagagatgtcagcgaccgatgtgtatgtacatgatcgagttgacctgaacaaaaaaacatcgaaaagacttacatgcgccaaaaattgttcctgctccggatgaatccaggttcaagtacgcgacaaggttttctggaatccaggaagcaaagtcctctgcaaattcggtctgtggagagttgtacgaatcagaacagataggtcaatacttcaaatctgttgaacgccagcaaatctgtcaactcacagatcccattagtccatattcctcggcatcccaagcacctatatagatagttcggagaggtttccagcccttggcagtgagagttcccagacctttgtagatctcatgggtcaccgccgtacccgagttgggatcggcggcacctagtgtccaagcgtcgatatggtttccgatgagaacagcctcatcagaaaggtatccagggatgacggccatgacgttccagactgatttattgcaagaaacggtcgttagtgaacattcagtatgatagaaggaaaaatctacaaagctgtgagaagaaactgactgggcatgactttagtatccacttcgttaacaactctaacggttctctcagaaggacctgtccagtattcgactcggtgcttcaagcctccttcccaggtctctcccaggtcggcacctttgatacctttcttctctaatagcttcaacaaagggattgcatccgaataagaaataggaagagaaggaatctgtggaatgttcccgccctcgatacgagtcgcattagggtaggcaggagtattgggggtactgatagttcgaattgtaatgatggtttgatcagggacgttgagggaaagacacgcgcttcaagaaagtcaatcgacggcttacgtagggtctccagggtataatgagaggtattgaacggatcctcgctggacggagttaggctgtcgagctttacctagcgtacaaagaggtgttgtagaacagttagtctaatgagaaaatacattcgagacagtgagaaaactgatgcgaattaaccatcagggtagggcttctctccattctcctcagtcatcggcccatcatcacctgggtctgagtagatcaagcaagcaagtgctcctgcatcctcggctcctttgacctgtaagggaaggcgatgagcatttcaagagatcagaccttcctcaattatgcagcctgtacgagcagacatacttttaatcctctgaatatagctccgtacttcaccaaaacgatttttcctttaacttcgactccggctttagcaagcgcatcaaagtcggcttttcgtccatatccagcgtaaactacctgagcggtaacgtttccagaggtgctctagatatttgtacgcaagtgatgggttagatggttgattcttatgattgtcaggagaacctaacaaaacatgacttcgagagaaagggagggacagaccagaccgtggaagacagggacactatctctgaacttggagaacggatcttcatcaatgatgtcctctctaagtttcccagaccattccgtcagtcggccatcctccgataagatggacaactctctagagacaggctcgttcatcacagggtagtactacgttgaatgaagaatacacgatatctgagttgcgatctcttgaaatcgaaaacaggtttcacaaaagcagctacgtacggtatcgatccatacttgaggggtcttctgagtctctctgatccgacgctggctctcttccgaaccagcgtcgaaaacattctcgaaaggaccagtcacagggagtccaaagctataatacgatgacaggtgatatcaggtcgatgatctggtcataaaaaatcgagagagcctcatgaaagaagcgtctgtaaggctgagacatacaactgttcaaactcctgcttgagtcgcaaggcaaggatatgctggttgccagaagcggctttgtgatcctgatacgtgtatcgtcgagatgccctgtggtcgtgatacaaggaaagagaagtggatcagaatatcaaacaagtagatctagatgaagagatctgaagctcactccatacagcttgtttcattagggactttgagaaagatctgtggatacatcagaaaatcagtcactgttccgcgaattagaaagtggatgaagcgacggagctgaagaacatactccttcggccaccttaggaggaatagggaagtgcttcggatgcttggtcgtcttgtggtggcatcccttttgctttcggtgcaagttttccatttcatcggcaagatatatcgcaggatgaactttcatggcaggaggatcagcaatgtaggcaggagcgagcttgaaagcatcattgataaagcctatgaaaatacagaaaagatcagatgagtaaacttgaacatgatcaagacacaaagtagacgacgaactctgaaggtaaccgtcgaccccggagttgtgctgatacttgagatccttcgctccgctcacatgcttctctcctgagagaaaagggacgacaccatgaactaacaactgggatgtaagcgcaccgccgacgagataccataaacgacgttttgatccggagcgactctgttt

SEQ ID NO: 2167 - DNA, 27851 bp, Xanthophyllomyces dendrorhous
ctgtttctctccggtcttaacggtgtgttcgacgccatcaccagaagtgggcagagtttctttttcagcgagggaatctccctgccaactaatagatttggtcttgaggcctagaaaggagaacaacatgatggctaatcagagaagacttggaaagaacgcttcctttcttccgtcttcttatatcatcttttttcctccgtgctatctggatgaggcggcttcggacgaagccgatggtttcagttagactaaattatttgaatttcagcagtattcatttatgttatctaaccttcgttcggcttcacccggctgctgcttagccgggtcggcctaatgagaatatcgagtgacctttccttctatcctttaaagcgtctcttgatggatgaggttgctcttggttcgactttcatctcatactaaatagttgtatacactttcaaactccctctcaaaccatgaccgatatatcttcctctgaagcagccgcctatggctcgcgtctcaaaaaccaaactgtagttttgacaggcgcggcctcaggaatcggtagggaagtggctattaggttcggcagctttggtgcaaacctcgtgttgggagacttgaatgaggacggactgaggaaggtctcgaaggaggtagaacaggctggagggtgagttgagtttcatcggattttctttgtgttttcgaagtacctagtaggtagattgtcattcgtcggtccagtttctaacgccatgatcggttcatcattcttcataacaaggaagagcgtctggtcgatatgtgatgtgaccaaatgggaggatcaagtcgaattgttcaagttgggattcaagacgtatgtcgttctggtgtctctactctctggccctgatcattaatgggatgactgattaaattcgcacgtttgcaggtttggaagcatcaacgtcgtccttcccaatgctggaggtcagtgaactttgcactcatacatatcctgcctaaatcagctccttccactcagatcaatctcacaagattagaactgactgttgttcttttgactttatttctgattctgtagtcaccgagctggctgaattcaaggaggaagatagtcagggcgagcgtacgtgatcaaccgaccacctctatacgaggatatgcattctccccgttagaagactgaccttctcgtgctgcatcgtttcagccctaccacccaacctcaagacgttagagatcaatcttcatgctcctctgtactcttcgtccctcgcatttcactatttcgctcgtcaaccggtatcgacagcctccctccgctcactcgtcatcacaggttccatggcgagcttatttgggactcgaccggaagccgttcagtattctgcctccaaggcgggagtgcttggtctgatgaatggaatgaaagaacgatcagagacggagaaggtcagactagggttgatctgtccatattatgtccagacacctctgctacctacggatttcaaacctcaagtaggaagtaagtggtgttctccttttactacttcagtgcctccaatattgacgtctgttgattcaatatttactgttcatcttcaaacatgtgcttaattgccgatcaccaataaaatcagacttctccaaaatccaagatgtcgtctctgccttcctccatgcaagcacccatccagatccaaagacctcggcctcgctatacaccattccagatgaacgaggggtgtttatgatcaaacagcgagaacagatcccagcaggtctggctcagagatggtctgccaagaaggctgcgaaatctcggctttgaaatattcttttgtacttatcgtcaggcaccttagtcaatatgggtgactgcgtcctcttcttttgtactggctatcgggattctagttcggcgtctttgtaaagtttgttagtcgtatcggcgtcttgtatctcattctatgcagattttgtctcttttcgtgctcaatctaatcactctctgtccatcggcggagacaaagacacaccactgagacaataaacatgcgagtcatctaacaaaactacatccagacctacccacacttaacccttcttctgaaattcacactcagatcttgcctctgtagacctccaactcacaagcctctcctcctactcccaacaactctccgtcccagtcacctcctagaagcttctccatacccttcttgtcctccttgagttctctcttcacgcctagcaaagcctgcttgggtgatcgagcatcccagatcttgatctgaccgtcgtgcccggcggtgaagagaaggtgggaggatgtcgggtgggatcggatgagcgggatagaagaggtgtgagcagaggggaaggacagcgagatgacggttgattctgatttacaacaggatggtccgagtaaaaagaaccgagaacagacatcagacgaagcgaaaacacaaatcgagacctaaagagaggaactaaccttctcgagtgtcccaaagagaaacagttcgatctgcatgggaggtggcgaggacattgcccgttccagccataaggtccatatcgagacagatcttatccgagggcccttgctgtaagagtcatagatagtttatccacggggtgtcagcgcttgtattaagaatgcgacgaaaggttagagcatgtcgaagaaaagggcgaactttggtcaagtgattcatctccaaatcgacatcccatcctctcacacttccgtcccatgcacaactccatactctaccttcttctcgtccccagatcgctctgccaaccctagcctggtggcccttcagcacgacttgaggtcccaatcgccaaccaccctgtccgacctcgagaccctcagtaacctctttagcttcgagttcctgctcctcgatcaacgcggtgtccaacttgcgtcgtttgctttccctgttggactgcttgatcggtgccggtacggaaggatcatgagccgtaggaaggggggagaggttgaagattgccagagtggaatcccaagaagacgtcagaatgaggctcgagccggaggacgaagactcggttgtgggtgaatttgactgaatggacgagatgggagacgtatggtggtggagctccagttgagctttggctttaagggtggacccttcaaggagagcagaagggttagcagttgaaagagagggaaacgaaaagactcgagtgattccgtccatgtttccggacgccaaccagtcttcgttggaagaaccagagaaggaaggcgaggacaaccagcagacatcagtgactccaccggtagaagatccggtagggatggtgcagatcaaattttgggcatgtgagaacactcgaagtcgagaatcatatgaacccgtaaggaagaatctgattaagcgggcaatcgaaagagaagcagggatttagcccagttgaatgcgcgtttaggatctgtagatagaatattgaacattgcgtgtcgccagctcgccatccctgtgaagaacgaccccgttgatacctcatacgggcgagacatagcaagatagcacatgataatggttgaacataaaactcaccctttcttttgagcggaaacagaagaaacccagtcgtcatgctggtaggtgttcaataatgtcggcggcagcacactctcaatatactcgatctccaacacactctctccaccatcaccctgtcctttgctttgactccagtcacccaagctacctctgaggagctctccgtcgatcacaaagtcgaacggaacaggcgaagtggaagctaggtcgagaaccttgttgatcaactgagagagctggaaccgcttccaatgggatgggatcaagtactgatctggtgggatggcatattttgtggacctagtgaagagtctgacgggaaggttgaccgtaggggtctgtgtggtggtcattataagagataggaagtttgtgcaagactattgagttcgccgtcagggtttaggtcttgtatccacgtaggaggttgaacaagaaattattaaaaaataatttggtgggaaattatttcgtcaccatggaaaccgcccgggcgataagccatttctccatcttctccttcctgcccgtccgcgtacagatcccttctcttccatctctgtcgcacctgttcttatactcttgattggtactctttgactcgtttaacatgcggcttttacccagggatcaagataagatccttcttcatcaagcgagtccttttttatttgccgtcaatatatcgtttaattcttatcgcccattgactgacacttcggatggctcgcgtctctgataatctctttcatatcttaacctcaggtaggattccttgcacagaagcgactggctagaggactcaaactcaaccaaaccgaagcaaccgctttgatcgctactcagcttcaggaatttattcgtgatggaaaccactcggttgcagagctgatgcagctcggaaaggagatgcttggaagacggcatgtcatgcctggcgttgtgcatttgttagaagaggtcatggtcgaaggaacctttccagatggttagttcttactctgtttcgctgttgatactatcgaaggctgaaccaaacttttctactccattgatcggactctccttgtcagggtgagttttaccaggatatcatggccacgtgatttgtcttcggaagagaaacactcattcaaattcattgtatcacaccgtatacttttcttggttcaagaacattccttgtgaccgtccatgagccaatttcgtcagacgatggcaatctttccaacgcgttgtatggttcatttttacccattccctcccaggatctcttccctctcgatgcaccggacgcgtactcggcagcacaggcggccggggcgatcgtctgcctcaagactggaattgagctcaacaaaggaagggatcgggttagaatcaaggtgacaaacgtaggagatagaccggttcaggttcgtatatgatcattaacaagatcctcatcatcatcaccattgatcttatagtttcagaatactctgaccattaatgtatcgatttgagaatctaccaggtcggatcacgtgagtatacttacagttcatgcttaatgtctgattgatagttgagcttcactgaaactccttgacttttcatacatagactacaacttccttgagaccaaccccaagctctcatttgaccgtcgactggcttacggaaagcatctagacattcctgcgtgcgttccatcgtttcatttattctaattcaaggatatttctgacgagttatggttctgacgatacatacatccctaaatcagtggaacagctgtgcgatttgaacgtgagtattgattgttatcaatctcttgacaaatcatcattatttgtttggactcaatctgatcgttctctccaaatcgcgcgcctaaaaattaagctggagagtcgcgcacagtcgctcttgtctccatctctgggaacaaaactatttatggtggatctagcctgggatcagggatatatgacccttctgatgctaagtgggctgagatcttggataacttgaccaaaggtggattcgaacatgtagtccaaacggaaggggtgaacaagggtgaaccaaaggttatttctagggaaacatgtgcgtctgatttgctttattttcttgaaacccatgaccaaatagtcagaacagaagcacaacatagaagactagttgatcttaacgatatcggctgttctattcgggttttagatgccagcatgtatggaccgactactggagaccgagttaggttagtgctcttgaaatcgatgcacaccaacatagttgacgaaccttgcggagatggatgagattctgatgctgcgtttccttgactgttcactcaatcttccagactaggtgacaccgagatgtggattgaagtcgaggacgatttaactgtttatgggtaaataccatttcaaatatccttgctttcatcctgaaaaagttctcgtgaaggcaaacttacgcgaactttgacctttctagtgatgaatgcaaattcggaggaggaaaatcactgcgagacggtcagggtcaggcaacaaacaagaaagatagcgagagtctcgattgcgtaatcaccaacgcgctcatcgtcgattggagtggaatttacaaggtccgtacggttggcatgcataccgaagacgataagagagagatgagggtcctcaatagccttacagagagggctgacttcaagtatcgaaatctgttcctgttctcggtaggcggatattggaatcaaaggcggcctcatccaagctattggaaaggctggaaatccggatatcatggagaacgtgacgcctggtatgattgtcggagtcaatactgaggttcgccatatttttcatgcgatctctgtcttgtccaacgatatgtcgtatagtgcacataattgatccaacctaatccttgtaactaccctgaatgaaaggtcatcgctggtgagaaatttattatcaccgctggagctatcgacgcacatgtgcattatatctgtccagatacttccattgaggttcgtcatgttttccacttcctcttttctttcggtctcatccgtacatcatcgaaacatcgtatttggctgctaactctttccctgacgttcgattgaaacatccaaaataggccctcgcttcgggaattacaacactcatcggaggaggtacaggtccggctgcgggaacatgcgcgacaacgtgtactccttcagagttttacatgaaggctatgatgttagtatagcttcactatctctgttcttatgtactaggctttaccacctgtccgaaaccacactcatgacgacatacttgtttctttcccttgtttcttgattatcattgatattttctcaggtctgctacggatggacttcccctgaactatgccttcacctccaaaggcaacgattcaggaaaagaagggttgagagatagcgtcagatcaggagcttgtgggctcaagcttcacgaggactggggaactactccaagcaatattgactgctgtctgtcaatcgcagatgagtacgacgtccaggtgagtgctgcttcctcggcatatgacactgaatttagttcattgtattgagctcgtgccgtatgaaactatctatatagaccaacatccacactgatacactcaatgaatccggctttgtcgaaagtaagtctcatatatgagcttgatacattcacaagggaagaagtgcgacttgctcgtataatctgacacgtcctacaactactttgttaaactgctaggtactatcgccgcctttaagggccgaacgattcacacgttggttgccttgtcttttcttcgctctagataggttctcattagctgatcaaacatctctggtcggcacctccttcaacacagttaccacaccgaaggtgccgggggtggacatgccccagatatcattgtcgtgtgtggtcaggagaatgtgttaccttcttcaacaaatccaacccggcctttcaccaacaacactctagacgagcatctggatgtaagttgatcaaataatgttctcttatcattacctgcaatacagttcccaagtgactaatcctccgtcaaacttcaaacgcacgtttgttcgcatatcgatgtagatgctgatggtctgccaccacttggagtaagcgtggttatccgtttacctccttacaagatcttcaatcagcgttctatcagcttatgcatctcatggtttcacagtaaatcaattcctgaagacattgcttttgcagattctcgaatcagagctggtacgtgacatatatatcgttttcgagattggcaacggctgatctagtatattgtggaacatggacgattgtacagaaactgtggccgctgaagatttgcttcaggacatgggagctatttgtaagtatctctcaacttggctgttagaaatccatcccagaatgagcgtttctgactcaagttctgtgttctatttataatgacagctatgatcaggtgagtacatgtcaaggttgtggatagaaataggatttgctctgctcacttgtctttgctcgttggataatctgtctgctcaaagttccgatgcccaagctatgggtcgaatcggagaagtcgtttctagaacctggcgaacagctgccaagatgcgcgagctcctcggtccgttgaaaggagatgagcagggaagagacaacaaccgagttaagcgatacatcgcaaagtacacgatcaacccgttagttttcttcctgctattgttctatcatgcaagacccgtactcttcgttgtcggtgctgacttcattttatactgtgcagggcaatcacacatggaatgtcgcatctcatcgggcaagtcgccccaggccagctggcggatctagtcgtctggaggccagaagttagtattcagaatgctatcttctatattggaaacacgaaaaaggagctgacgagggatattttctatagaacttcggacaaaagccagagatggtcatcaaaggtggtatcatcgcttgggcacaggtcaatttcatttatctgcctccttccatcttaaagatgcacgaactgacttgagacacatattcaacgggcaaacgaatatatttagatgggcgatgcaaacgcatctatcccaacggttcaaccaatctacggtcgaccgatgtgggcgtcattcccgaaagcagccgcgatgtcttcagttatttgggtatctgaatactcgattgcttccggtacgatcgcctcgtacggtctttctaaacgggcggaagccgttaagaactgtcgaaaggtgaccaagaaagatctcaaacataatgatatcactcctactatgcaaggttggtctcgatcttcttctgatttacccagatgtaagataaatctggctgaacatttcctttgcttatgcttgcttcaccgattcgatagtcgatgcggagacgtacgacgtccgtgcggatggagtcttatgcgacgttccccctgcaattaccttgccgctgacgaaggcgtacatgcttgtaagctacctcttttctgtctatcacaagatatttattcaatacttgactaatccatttttcgtcgatttttttacttttcgaagttctaatgtctatactctcatgttgttctttaacttctcatgaatatatcacttttcttttctgtctattgttcaacgatcgatgctccttatctttgatctgcagcagtccattgtttttttcttcttgcttcgctttcaatagactaaggtctgccggacaacacagagatctctacacaaaagttatcagaaaaagacagaccaaggatattagatcataacaagatcgggtatccccgaaggttagtcaccttggatatcctgtcgggcagtgagtacaatgttaatccagatcactcgtcgtatgtcagttgtcgatgtccatcacagacgttgtcatcttcctccttcaacatactatttccttctcaatagcgtgcaaatcttactgatatgctaacctatttgaatatgttcgacctgcgagaacgatactgggacgatgatgctgatcttctctgcatcagctatattcatgcaccatctattccatagcatcacttgtaaatatgcatcaatagagcatatacgccatacgatatctgtttaggaattagctaaccgcagatctgacaagatgagggtaacgctgggaaccccatcggtctggttctataagacgccagggatcgacgattccttcaggaatctctaaccatccccattctggcgtctgaaatgtcagatatcctgtctcgtcttcttccggagataagtcttcggatcatcctatctctttctttacccacactcgcctcgttcgaggctacatgcttgacctggtcacaactctttcgggaacatgaggatctgatatactcccggtcggctaaacgtcagattgcactggacgattgcaacacagaagatttgttgaaagaactacgtgtgaagctcgagaatagatcgtttaggaagttgacctggatagaggcatacagctggaaagcgctgtgtaagtttttcgaacgctctcttggtgatcagatcagggtcgacgttttatgttcgagacaacatctaaactgattgatgggtactatatttgcgttattttgcttgagaaggtgtcattcaaaacagaatgaatataaacaagtctgatgctgccatgtacctgtccagaatctatccaaacaagccacgccacagacgtttctggagattcaaagttgacctgaagaatcaacttctactgacgacattcatttcgtcagagatgagagtctatggccttgaatcgatggtccagctcttcgtgttccgcgaggtaagtattctttattccccctttcatctcagacttgctttatgttgaatcaggtattatttgtattcgatcggaatcgttgcccgaaggtgaaccattataatgctctagattatgatcctgatgcaggtgttggggtattcaacagaggagatactttggaaatctgaaaattaagacatttcccgcctgaacaaaatcctcgttacttcattcgagggcagttcgttaaatggggtataattcctgctatccctggaatgagagagtttcatctcaaaaacgggtaggtcaaacaaggtaactcgtctctgtcgtctgaaaatcacaaacgatttatgagacgatgtttgagttgtatagaatacttgttgtttcctctcgactgggcaccacgacgttctatgacctactagcttcatctgatcggccgactttccttcgaacgataaaccatgacgaaggtatcatgggtcacctagacaagacatctcttgtcctcgctcttcgccatcagcactcaatccgacgctactgctctctcactggttctctacttgatatatttcctctaccgcttactgtatctgttgcacattatactatttgtcgaccaggcgcgctagggttctcagatgagctcgcgagcgcgcaggtcgtgtacaaaggaatgatcgaaccagatgacttcgaagatatccgtccagcggcatcctatggtggaaatgaatgaattgcatgccaagtagatggtccatacctcgtcatactctcatacatgtccaggttgtttgtttgtacggactatcacgctgtgttgagagcgtcggaaggggaggaaaagctaaggatagtgaagagtacttgttgtttcttcgatatcgaggtcgagatcggggaaggagactttgatccgtttctggtcacaggtatggagagatatacgggcaatgtcaattggttgtcagtctacgatggacgtgcagctttcggagcaacgtacgctttctcgtatgtctgaaattactctgcatactgtctgactccgttaatctctttttgtttccctaatgaaatgtctttcaaatacacaaagtgatcatatcatcatccttcctcttccatcagcacttacaaccacttatttgacccctgccaatgcgctctgtcttccaacggccccatcggtagaagtctcctgtctcgtactcacccaagatgcgttgtttaccatatggggttacaagcaacatactcttctttcgcctcctcacatccagacgatcattagaaatgctatcaggatcgtttggttcgatgctaggcaagaaaaggtcaaagagaaggatagagcatcggcgcgctcatggacgctcactgattttcagttagaatatgaagagttcgacagcactgaaaccagtgacgaagaagaccatgaagaagcgttgattggtgaagcgttgactgatgaagcgtggttcgaggactttttgaatgtttgaacgtggccttataatgatacggatgagaatgatgaatacgatatgaataaaaaccagactacgaatgcgtcgttgtttaagggcaaaacataaccgaatcaagcacatgtttatcgcggagagtagaacagatcaactttcaagtcaggaggagtcaacgtctgacgactggagggacatccttaactgcaagtggagagtgaatagagtagactcggtcggtacgtctctcgtttccaagataccgtgtatatccgttaaaacatgttgttcagttgaattcgagaagttggaaacaaacgaaacaaagaaatgaatgaacattaaatgaatgaacatcaaatgaatgggtatcggatgttacacgagtagatggacggcacaaacgaaagggaatatgagcggaggaaggacttggataagcgagggattatgagaagtatgggaagagggatcgtgtggggaggagaaagaaagaaagaaggatcgaatggccaaaatagaaaaacagagattgaaagagatgatatgaagcaaggagagcctatgaggggatgacgctccaaagcgttcaaacagcagcaaccaacgacttgaaaacatccgaactcgagcgcgattcccactgccagtacataacccctcctaaacttccacccgacgcattagctgtcgacaaagcctctgacaggcaactagccatgagatccgaagacatgtacccattcgacgcttgcgctgatgtactaggttttccgatcaaaagcttctcgattggaattccttggttcgcaatctcgaacaaagaagaaccagggtaggtagacgaagaggtgtagagaaggccttggcaatcagtgtattcggatgaaccttggttgtagaactggacgttgaagaagtcaataccagatccggcggaagaatagactcctcggtagcctccatcggcgtaggtgctggctgaggtgaaccagggtgcgacaggggcgtgagaaatcaagtagggagagggaagggcggcacgtagtgcttgttggaaagtgatcaacctataaacatagattcgaaatcagcacgtcaactaacttcaaacgtgttctcctctgagatagcggaggagttgaaagactcaccaaggcatggcagttccagaagtgaacgcagggaagtcctcataatcgatatcgactccatccaggtcgtacttctcgacaaaagcagccagcttctgggctgtttgtgtcggatcgtatccggatgtcgtcggtgtatcggttgatccgaaagcgctaaccatgagatacttcccgttggctgcataatcagctttcagcgccgctcggtccgaatcagacatagagacccctttgaagaattccattgaaagcacgtctcaataaattagttggctgttccaatttcatcgtaaccatcgacagaatgaacttacaagcggcagcgttgtcgtaagcaccctcagaaaccaaccagaaagcaagaatgaaatgggtgatgtctcccaattcagcggaggaaggtggttgtgacatgaccggataatcggctacgtgtttgtgtgagatgataccgccagaaaaccaaggaagagacgatcgaaagactggtcaaaaacagtgtatataatgagaagctcgagaaagaaagtctgacgacgcacaataaacaacccatctcgatgcactagagctggatgtaccggagctagatgaagctgtgctcgatgcgactgaggcgcctgaggtcgttgccgtgcctgaagcggttgcagaaacggctgaagtcgtgccctgagcccaagctgtggatgatgatccagcagatacaaccgtggaagtcccggttgatgtagtagttgtatcccaccagtgagtctttgtcttcgtctttgtggaagacgaggaagaagaagaagcagaagcgactaaggatgcagttccagttccagtgccagcgccagaagtagtttgagcagcagaagtggtggcggtagcctgtgcggtggtagccaccgtcgaaactatccagccagaagataatgcgtgagtgacatcgaatggttcaagaagaggactcaaatgggtgtagatcgaggaataaacaaaccagaagcgccgtttcctccgacttgatccggccagacacatccgatgtttgcctgtacagagttagacgcgttgcagactgtatcagccgaacaaacttgaagggtcacccatttaccggatgtagcgcattctgttaaatatacagaccaaagcaaattataaagagaatgagctctacggtaatctataatcgaactcgtcaggtcacacatgagaacaagacctacgttttaaggtagacccgtcacattcgaaagatccaacttcgcaggaatccctggcggtaaggctgagtcctgctctatgatgatgccttcgacgaggttgatgcgctaatgtatatgtatggttgtttcgttcgttcgttgagtcaaattggttcgttcgatcgattgggtgcattaaaatcgatttgaaaagacaaagtcaagccacaacgccccgaagagaggaaaaaaagggttaatgcacgcgcacccaaaagcaggttcgttatacaaacaaaacctaagaccttgaaactcgagaacgaagaaacctaccagctgaaccaaaagaagtcgctatcaaagcgaacaaaatgaaatttgaaaagaccatgtttgaagaatgaaaaggacaggtagaggaaggtcaaagagcgacactgggaaggggatcaacgctgaaggaattcctagaaagaaatggtgaaattaaagatactgttcgtcgaaccaccacacatcaagtattcaagtgaagaaggagaaaaaagccaggacatcaaggaaggcgaagacattgtcagaatcatttcgacgtcatcaccacttccgttgttcgaaaaccaaaaacgcgagagaacgaaagtggaacaaccaggtcgaagcgagagttgaaagggaatggacgagaactggaaaaaaggggaaaagataaaacatacgagacaagtctgatcaaaggggtaagaagtttcggaatctggtcggccagcgacaagatggactttcgttctttctttctttccttttctttctgctttcccaatatcgtctcttttctgagagttgaggcagatggtagaggagaaagaagaagattgaaggtttaaaaaaaatggttgaaccaacttcaattgttcatggacgtggcgggtagagcggactagccccacgttttctagactcgattcccgcagtttttcgatcatctagatgttcttttttttttcttttttagctcttgccttcccatcttgtcttccaccttttagttctcaagtttcgacaaagatcattcatagtgcgtcaatggatcaatacagataattcctttaatctcgatccacggatagcctgattgaccgaacgcaaacatacattcgttcgtacaaccggtcagccgggcctgtctaaataggaacacagatatatgaaagaaaatggaatgaaaggagcaaaagaaaggaacttaccccattgagctagccaagtcttgaccgaggccgatagacgaattttggacgagcctcgagctgcgtcctgcgtgcccgtgtgcttctgctcgcccacgattgcataagctagaaatagagattccagaaaacagatagacaaagaattagatcactacgcaatagacgctccgcttggaacttgtcaaatgaacttacccagtcccaaaaagctctctccctctaaagcgatcaagaatcgctccaacacatctactgcctctgttccatgaagcgcatgaagatccaacaacgcttcttctcgctcacctgatgtcaacccggccgcaccggctgtcgtcgaactggccacaccgagaatgacgccaagtccagccgcacattcttttcctttgcgagatctatcgagagggtctgaagaccagccttgacgattgcctttgaaaagagaacaaaaaccaaagagaccaatcatcagtaagctattcattcggatgtctgtcatggggtaagatatacatctttcagagagttatatgacaacagaggaaaggactaacgggcagcctcttgagcgatccgtcgtctctcccggaccaacctatcgattcggttcatcaaaactcttggattagatatctatcatgtgtaggtcaagcaagaagccaagtcctgaagagactcactttccggcggcctcagcgctctcaatggtcatcaactcgttcaacgcctgcccttcttgggagaacttctttgcacctgctccgtcctttttcttccaagcctcggccgccttggccaggcagacattccgctgcattccaagctggatagcacgagatcgagctgacaggtacatctggttcagacttgatcctgtaggtaacgtcgggagtagactaggcgctcggagattcaatcgaggagaaggccgagacgtcggggtaggggttgagacaggaagtagattgctactaatagagttgataccattggcggaagacaacccggcaagtgtggccttcccacctgaagatgaagtggctgccgaggtgtcatggataggtaccggtgcaaccgccggttttttcaccgcactagatggtatgaggaaatcaatagagccaaggggtcaataacaaagctggatgaatgagagaaggctgaaatggttcttacgatgagaaccgagtccgagaagcatcatgtttcgccggaccagacgcctttttagacattgttggggctcctagttgtgggaaatcttcttctggtgggggcgtcggagacttactctctggtcgaaggctcgcctcactatgagaaagattgatgttcgagaccgcctgcgagagcgcagtggcgtcgaacgtagatggtagattatggataaactcgcattggtcacctttggcgcattgccctcgaagccagaaccgacagagcgccctttcaatgtcatgactgaatcgacagtcagcccttctgcattccccgttaagataatatctgcagaccctgccgccgaacgagttgttgttcgccactcccgggctcttgctgagtccagagccgttcgagtttagcgcattgctcggtgggacgactgggatacctccattccggccaccggccacaacatagccttccttgggaacgaaaggctttggtgcattggcggcggagagcgaggcggaaggtagggtcgagacgtaggtggtgctcgagtcgttgatctgtccgggtgccgcagtcgaaccgagtaggcctcggatggtgagttcgagatcataaccgtacttgtgaagggcaacctcgagctcatgaggggtgagtgaggtaaagatggagccaagcacatcgagtggggtcatctgaagggttgaatcaagctcttcttcctggaggacggcgtcgaaatcgttatctgggtcgaacgtgggatcgaaagaggacgagtacgaggaggaggaagagtcctgccagctgggtccatctgcttccccagtcggggcgtacgccaaggtatcctgaccagagtagaacggggtggctccgcggggaagagaagtgccgaagggagaaaaatcatcctgatcctcttcctcgtcttcctcgtcatcgatccggggatgtccaatggaggatggaatagcaaatggagagggcctggatggactgacggataagattggcgcagcgatggccagattagaggatgatctggagagcacgtatggtgaagatgacctggcggaagcaccgacggaccaatcaaccgatgcggcgttggctactgatgcaaagggaatcgcgactggcagtctcggagagggcttgaactctatcgccttggctgatagaggccttgggctggagagcggagagagggtctcggaaggcagactggcgagcagtgtgcttggagaggaactactcagcgagccagaccgcacgaacgatggtttcgagggtgatgacccgaggagagttggctcggtgaacgaattggatgtcggcagggccgatgtcaaggcgctcggagatgaggtggacgatattgcggtgaatggccttcttgggattgtctttgctagagtgggagcgatcgacctggaagagtttctccgaggtgtcagagcggatggaaagaagggaacgttgttgttatcatctgtagagggatgcaaaagtagagagtcagttcgataatgttgataggtctcgcaagaagaagaggggagaccaggcacacggcgaatgatgacaaacaacaggtcaaagaataaggaggaaggagagggaaaaaagaactacttgcctctcaacgtgtgcatcaacgtgaggatgtgctggtcaagcgtagtatcattctgaaaaaacggatgatcgaaggatggggtagataaacggccgggtcagtcatgttgggcatatgcaatgtctatcaacgtaacccatctggatggacaaaaggtgtcaaccaattgggacttgcatgaatacccaactgtttcttcaagacgtccttcaatccatcctcgtcgtcttccttcagaaggccgaggactttctctcggaactctactcttgctgtctcaccgggaaggatatctggatgtaagttggattcgctcctgaacgaggacgggccggtgaaagtggcagcttcgacctcgcttggtcttctgtcggtagaagccgaaaaggtcggcgaggacgggttttctggtttggcatactgacggaagagggacgacaagaaatgattcgtgtgtgggaaagggtctggcatttgagagtagagaatgtgtgtatgttggtcgaaggaaggaaaggataaggaaacagtgaagaggcaggcgagatgggacttccctagaaggcctacaacgttcacccacacaaacacggtcgagatggaagggcggtttgtgagggagatggttagggttggtgattaggtaatcatatacctcgactgtactcttctcctaatcatcttcgttagtatcgttagtctgtttgtctagtttgtccttggtgaaggcgctgatagtgtacatccatctgtccatcccgttgagtttgtcgtgcattttagagaaaggagaagacaagtagagagcaagacgagtaagagtggaggagtactagactaggcaggtggagaacaaaacaacatgaaatcatgaaagtactagcgagtatgagcatacatcacagccgatccgaaactgtgaagatcagagggcgaaacctagtgtatcactttcaatagcccttctgcaagtgttgtgcggacacgtacagtctcacaagccatatccagatgtatacgggacatctggctgaacaaagactggcgggatcggcgcgatgggacacccatcatctcggtggaggacaggctgctgattatattgcatttaccccttaattacattctgtagtattttttgttacgattttctattatcttttcctagtctttattagaatatttcttgtattttctcttgttctttttccatctcttttttcgtccccatctcttttctttccttttcttttcttttcctcctctcatttctcatcgtcgtttccctttaagcactcctcacatttgaatacccagacccagacccagacccacacactcacacacacccacacttacacacacatctctatacatatacatcatggttcgtgccgtccaatttctcatctgttctttctaccaccttgcttccttccctcgttcatcgtcgggaaaataaacaagaaacaatcaaaacattgaatattcaatgacatcttactgacgctcgatctctttcccatgtttcgctccctctttctgataatctgctataaaaccaacaggacgcgatcaagaacgttagtctgtgtctcctccgatctgaatcaatcttcgtcttctgcgcccaaccgtgtgccattcatctctgcagccgtttcctcttcagccatctctcttcgggctgacagcgaaagactgacgtgttctacatcgatctgctctcgatagaaactcaaatccctccgagacgaggcggacgcctccctcgctcgagctgaagaggccgagacgaagaacaagcaatatgagcaagatgtcctcacaaaggatcaggagatcgcttcgctctcccgaaaagtccagctgttggaggaagatctggagaaggccgagggcaagctctccgaggcaaaggacattggcgaggagtttgagaaccacaagggagcaagtgaaaacatgagccgaaaactccagctcttggaggaggagctcgacacagcagagaagaacttgaaggagaccgtcgagaagtatgtgtacctttcgtttcttcctttccctcaacgtacggcttctcatcatctctcctgatttaactatcccccactctcgctctatccacccaggctccgacaggtcgatgtcaaggccgagcactttgagcgacagatcacccgggtcgagcaagagcgagacaactgggaaaagaagtacgaggtccgtaacaaactcccgattatagtttctccctttcatctctgcgcacatactgtttcctgtccactcactcagaattctctgctctctctgtcattcatatgtcttttcaatacaacaggaggccttggcgcagtacaaagagtccaagcgcgagttggacgaggtggtcgctcagatggaggtttgtcctctcgtttgacctgggatcacatatcgagagagagaagagataactgatgtcccctactctcattttcttaaatccatggtttcgttgtgatttatatcctgtctctacagtccctctgaatatttacccatgcactctctccctcttctccttcttcccctgcctctgaatctattttctctacgtctaacgaaccttctgtctccacgtcttcttccctatcctcccttcctggcgcgtatacaccattgacctcgatacactctcccttcaaccattctttcgaatcaactttgatacgagatgatccggttgatggacaggcgtactttcagcctggagcaatcgtcctcactttggtcgtccccattctcatctatctggtttccgtttagaagcctccacaaggaacaaactctttctttcgcctatccgcctttcttcacccttgcttctacctccttcctctgttatcgatcttttatgttgttcacgacgtcgtgtgccttggcctatctgtcaacgtgtctctttcgtcacgggtctaaaaggaaaggaaaaagaaacagaaggagaaggctaatatctcaaacgagcacatattaacataggtccatctcagagcaagagaggtcacgtccacaagaatctttgtgttgctcttctttgtgagtatctatccgaacaccatccaatcaaacacaatgctgcaccaccaaggaaaccctcgaatcaaagggcagccagcgtagtggacatcgtaggcaaactcttcaccgcctctctgacaacgtcaccagcaggaatcgaagatgccgctaacaccgaggtcaaatgaggaccggagccggtcggggtcagactgctggaaatcggttcattgaaaaagtaggctataaggtttggtatagagtattcggatctggtgccatgtacatatcagaggttcgtcagataggaaagaagagaggagagagcaaaagttaggatcaaggtaagacctttgtacctgaaagaccatagaaggtcaattcagggagagaggaaggaggagaaagtacgtacccaaaaaagtgtatgaaaaagtgatagatcaaagccaatatacccatgaccatcgggaccttgaaggccgagtatatgtctgcaacgattttcatcatcagtttggtcggtcaacaaaaagctcatgatgtcaatacaaggaaccagggaaaggagaaaacaaagaagaagagagagagacgaaggcgaaccagaggtagtgtatccggtggtccgaccctgtttccataattctaaagatcgccctagtcgaggtttctgaaactcttccggacgagcgtaccggttgatcatcttgtgcgatggaagatggcttggtcatgtacatatgtgcgtgagaagagatcagctggcggcgcaaactgatgtgaggaagacaataaacggaaggtggggttcactagattgagattgtaggagaccgaagagcgttaaagtgagcaatcaacgccgctctcgacaatggtcgaacgtaagagtattcctgttgatcccaatcagaaagatgaagatgcacaaggttaagcaagacggtcgggcttaagaaagtctgatgaagactcactatcggatcatctatcccctccctaggcaagacatacccgtcctcgtactctgctgcagagacaaaatcttctcctcttaacagttcgctcacagcagccggcgccggtgtcttcgacatcggtgcaaaatccgagccgtcatggaacgtcttttggtttggatatcatgatatattaacgtcaaacgagcactgcaggagcaacaagtcgagagtagaaacgcgtcctcaccattcgtagccaaggcttctgttgaagagactggcgcatgtcggattccttggtatctcctgagacgtatctgtataaggttctattcagtctcctctttctgcttgtgactgtcctggattttgatcagagaatgacgcggcttacatgagagcaaggtcttgaccatgctttatcgtcagttcagtcaaattctataacagccggtcgttttacaattggatgtgaagtcagcttacatgaatatcctcaacattcgaaaacatgggatcagactgtgtaaaaatctgataaacgaaccttatgtgaagacttgaaagtgttgtcttcatccgacgatccaaaataaaacactatgattttctttccagcaaagtagctctttatatcatgaattggctgtccttttgggttctctaagcgaatcctatgcgcgatcatagccggttgattgaaatcaattagagaaaacagaatatgaacaagaagtaagcacttattgctataagtagaaggaaagggttcgaaggtaatgaacaaaccggcgcagaagaggatcaggatgagtatataccgcctggttgtgaactagatcatctggaatctcgactccttcaaatgagacattatttttcttctcggatgtttgcttgggtgccatcaggacagaaccacagtttattgaagtagatgagtgattgaagtgagagaaagagagcgagatggagttgacgagtattctcgctgtgtggctgatttatacagcattggcatcacgtgcaatttattcggcgataccttctctaatctacatcattctctttcgttcatcgatgtgagtctttgttgctcactgaatcttttcactagccagtttgttgagcagcagcagcagaagaccactatgtccacagcagggaaggaaagcttaactgcctacccacttccatttgatgtcccgatattgagctcgaccgaagcctttgcgttttccttctttctcacagcaatctacgtcggatccctctatctttccaagtcatccagagtctttcgtcaagttctgtccgtccagtccacagaaaaagatcgcgtccgaaaagaacttggaagaaaccatccggatgttattcgagccagaattaaagccgtgatgggtgcaacattcatctgtgtgtttggcatatgggggctcgtccaatacggatcggaggctcacaaggatccatcggaaatcgtacgtgttcatcactggctaaacgaacctgattcaggctgatgcatgtttcggtggttcactcataaacggcccaaatatccttgcttcttatgacagagtgcagttccaaaaatcaaaactctcctccctacgctttctctgcttggcttcccgctcgccatcccagcttcccctcttcctctcgcagagctctactcgaccgagccgggcagacttatgcaagcgttcttctggcttccgtcacccctggttccgttcatgcttgcaccgatcttatttctcggaccattgtttaccgatgtcggtttggaaggatttaacccaaggcttgcgtttgagagcctaggatctatagtcggaattagaaactatattgtggtgcgtacactttttctagatagactatgatgagaacctgtctatctagtcggctcatacttcatatttgatgatatttcgggcaggctccattgacagaggagattgtgttcagagcttgcaccatcgctatcgcccagctttctggagcgtcctggactcaccaaatcttcatcactcctctatggtttgggctaggtcggtcgttggcttccttttctatgtcaatcaatccgagtttcatcagctagtactcgtgctcagttacaaagtactttgatccttccacgtatctatgaacagctcatgcgcatcatgcgtatgatgtgttcgcttctggcggaaagacaatgagagcttttcagatcgctttgggttcaagtagtgcgcatactttttttttccttcttgtttcgagtggtagactggatggactgaggtcatgatgatcaaacagttttccagtttatgtatacgacggtctttggttggtttgcagcctatctattcgtcactaccggtatgcgctctctacgttcccacctttagcccccttattcagcctatctattccttggttctgactgtctttttttcgttattgtcgggactgctgattatcgaatgaaggatcgattcttgctcccctgtttgctcatacattttgcaacatcatgtcccttcccaatcctgcttacgcgatgcagagacacccggaccgaaaattcgacatcatcgccacttacatcatgggggttctaggattttactatctcttacccaaaatccaatagaatgtctcttcttctcctttttgctgttgagctggttgtattaagagctcgaatctattatcatatcgaaattactgaaaagaaaaaacgtgacgccctaaacatacattccgacaccagaactcgatcgatctattttgagaatatcacacgcctccagtccctttccgcttggggattactacgtatttttcataatctggcaaaacctggctctctaccgaagggctgtaccaagaccagaccgcgaatatcgcatttaggaatttcgacagcacccccgtgctgagtatcgcaccgaatatctttgcaacatagcaaaataatttaacgcctctatcagtctcccagaatatgagccacggtataataggtgagataggttgagcttcttcaacgatgggtctcatgttggtctcataccccttcatagctgcttcgggatcgctcttgtttttggccatctcaccagctagaatgtaagcgccggctacagaaagagaggctcccaacccgatgaaaggggtaccgcaccaggcagcatcaccaaccaggatgactctaccggtttcggtgctccattttggagcatgcacttgaccaagatattcgaaatagagatcttgactgtcttggagacctcgaatcaaccgctctgcgtttgggccgccgtccgcaaacaagtccgcgatgatagctttctgttcgtccggagggagcttttcgtagcctttggattccggagcgacgaacgtcacaccggctcgactggcttgagccttaaagtcaggtcgaaagtacatcatccgtttgcgtgttagaggaacgatatgccattggtcggagtatggagtggtttcttcaagagggatactgaaatacgcggtatctattcacaaggaagatgatgtaagcgtgttagaattgctctatccgtgctaatgtttttcgacttttgagaaagaagagcgtaatcaattctcacaatacccaatggaccggtaatcaaacccgctttctccaaagacaaccttcctggtcctactcctcgatccgtcggctaagatgacgaaatcgtagacggcctccttgccggtttggaaccctatcttgacctttcccccttcaatctgctcctcgacgctgacgatgtgatctccaaacacccactcagtctcatccttggtttcttcgtagagcatctctgcgaaatctcctcgaaggatctcaaactcgttagtaggcccgtttcctacgggtagctgcatgtacatctttccatctttgtcggtcactgttgtgccttgttcgccagtgaaccgagatcggattgctgactcgaggcccatgcgacggatcgcttccagctattgaaagtaacacgatatgcagacagtcagatctccatacctaaacagataaaacggcatgacgagccaagatgagaacagaaccaagagagatataggcatacgccgtaatgagaaacatcaacactctggccaccaggtcttagctctggccatctctctacgattgtcgtctgaaatccgaatcgatttaaccaatacgcagttgctgggccggctatactgccgcctgatatgagaactgtcttcttgtctttaagttgttctgtcatgaagaggtaatgatgatgacgacgatgagccgtgttccggagaaagaggacaatctcagcggttccgcatatattttatactgaaaagattgtgatcgaatactcggcatcgagataagcttcgtcatccggccggctgctacgatcgtttgacctcggtacttcttatttcccgcatccgtatatctggacacacacgcgttctttctctttctataccgggcacaaatatcatgaatcagtcgtcatcggctaaacagctcgatggcccagtaagataactataaggtgatgattgagagttgagaattgttcatatgatcatctataagcgaaagctgcccttgaggtcgatcaacctgtccatgatatacaagatatagtgttccgatacttcgcccaacatcaggtacctaaggaatcgattttttgaaaccaggaaagtgactgtcggttctggtgtagacaaaaagagagcaacgtagaagaagaagcagttgtatgtgttagttgttatttgtcgagttcatacggccatagaactaagaaagaagaagagatcaaagcacggaagacgaggagagggctagaagggaaaaggctggataaagggatcatattagatcatattacgtcgtcacgaggtccctccgtttcacctctgtccctagcgaggacagaggtgtgctctcttcttcttccagaaggaagaaataaaggagcagacgtgggtccatggatcgggcttctctggtgataatcatctcccttttgtttcccctctgtgcccatcttccaactcttcgcgtgtgactcattctgccgagcaaaatgcaaacctgacagggatctctacttacccaaatgctagactctcggaggagaccactacattccaagatcacgagtatcttgacttgttactccttcgaaccgccggaggttgctcctcttttgcgctcttgaaaatcgtctttggcgtcccttctggcaaaggcgggacagtcaacgacacatgctcgtaagtctttggatcgaaggatttggcatcgtccgactttacgaatgacg

SEQ ID NO: 2168 - DNA, 5282 bp, Xanthophyllomyces dendrorhous
ctttacgaatgacgggatcaatttagtggagactgaagtcgagccagtgccggatggttgtcttgatgcttcaaggatggctctgattcgaagaagtcgcgctcggtcgatacgttggaagatgagagtttgagatatggtgaacaggtaggttgtcaaaaagtagacttgcatcgccttaaagaagaaaaaaaaacccccaacggtgaagcaaattgtgggaagcgtacgttaaatacaatagatgcactcaacagcgaacacggtggatcatggacaaagaactaaccacaggggcaaatatggaaattgggaccaacgccaaagcacctgccctcatcacgttgctccacaactgatcggtccatcccttcttcgttaatctctcgatctcttccgtttctccttcgactcctccctttttaggcactttgatcgtctcgactaagttcggtttctccacgtgaaacggattcagtgcatctcgttcttttcgggcgagtcgcatgatctccacgttggcaaacaaggtcaaaccaacagcgataggtagagtacctgtagagtctggttcgaccaagggagttgcaccaaggaaagaggggaggtgctcgtagagcagaggagtcggagacattgtagccgaccgggtgatgtagacgagggtcaggaagagagggaattgaacaagtataggaaccaagaccgtaggtagagggtggcaattgaacacgttgatcaatcgtttgctctcagcgctgatctgggattggggaagaggaaccctatgtgcgtaagcagaaagaaacgaatggcacacaaagaaggagcgtatacacgaagagaaaacttactctttccttaacgaaggtaaggtattgctcgtgactatacccttctttccgacagcctggtacgacttcgagtcgagctttatccctgaaatgcatcagcattggcatcgccttttccttcagcttggcttctctccgtcttgcccataccgagacgggaacggtgatcagaaatctgagcgcgatacaggaaacaatgatcgtcgtgctgtatggaggaagaggggagggaaacggccaaggatggtcgatcagtagatgtgcgagccaggatggatttgtttgggcaagcgcgtcggccgctgtactagtcgacatggctacatcggcaggaaggtcaagattgatggtttgaatcgtcacaggcgacgacgacggtattgatggtgcagctgccgaggccggcggcgagatatcaacctggaaaggggaagacgatgcgaaccggactgaacgagggatgcatgctgagggtgatgttcgggcaaagatcaaaggagaacggcgaaagagaggccgaatagggagcactaaacgggatcagttggtcgtggtcttggacaacataaataagcctatgtccagacacgtatgctcacttgattattgaggccaaactagaaacaagtttgagtgttatacagatgatcttgatattcttcttcgtcgtcgtcgtttggggaaaagaagaagtaggaaaaaagaaagcgtctggcaaacttcagccgtccagcaaaaatggttgcgcgtaactgggcttccgtgtaaccattttggagttccccgaacggggctgtagagaatgatggccgacgcaattccattcggtcatcgctacgacatacagataccaccaacaacaacgacgacgacgacgacgacgacgaagaaagcaactagaacaagaagaacagaaagaagatagtcatcgccgaatagagtccaaatttgatcaagatatatcgttcagaatgggtctttctacaatagaggtcttcgcccaagggagctcagttgttatcagcacgctattcaaacgtgagtatattttaacctaaagagcagaaaccaaaatcagctcacaacagcgtttggtcgttctttaaaccgagcagattatcttaataggaagaaggtccgtcagataacacacgtcttctccgttgtcctgttgctctaactaactatttttcggcatgtcatagactacgcaagattccaaggctaggagcgagcttctgtttgatgaaatgttcacagtcatgtaagcgtgttccacctgatgtgtcatagagatcggacgcatgaagtcatccactcaacactcattactcaaccctatgtcctcctacaggaaagcgttcctggagattgcaacaaagtgtgtaatccagttgttatcgcgacgcgtgctcaatcaaagctaacaaattccctaattctcctgttgtcgcgtcttcggacaataagaaatactgttgagggtaatttatgttcagcttcagtttggcgtctcatcgttctcgctaaccctttctgatctcttaacagacctgcagcagttctcaaataccagaattcctgcgcctcccaacatccttgtcgtccgtatacttatccctctttcgagctgtcacatcgccgccaagtacctcctccaggctcttggaggacccgaacaggccaggaagattgtaggcggtcaagaatggtggcaagttcgaggaatcaaaggagtcgaagcagagtggatcgtcgtcaagaaggaatggatcagaagagagaaggaagataaagagatgagaaacaggaaagggtcgtcagagaagaagtccgggaaagggccctctttggagggtctagaggtcgaagatcaggatgaggctctgagggacgagggaacagatggaatgaggacgatgttgtacatacatggtggcgcgcattactggtgagtacctcagctgtcaaccatccttctttccagaaagagtcatctcttctaactgcttagaactatcggtgctccatattttccccccaaatcaggggaagcagtgagtaattagtcgtctgatttcaatcaagattatactcactattcgtcgaatcacgggtttatctagtcaacacacatagatacaccatctggagatatgctcggaagatgaagggaagagcatttgcaggtaaatttagctgccaactccaatgattgttttatgaatcaatttgtttcgcttctgacctcatctttgagtcaaacgtagtcaactaccgaaagtcgcctcagtatccgttcccttgtgccctgcaagattgcatcgctgcctgtaagtcgagatggtttcctttagccagagctttaacaagttttacatttaaaaacatgtcacttattactcgtttgcatattggttcattcaacattaacaaaaatgaatgatgaacagatttgtacctgcttgacccgccagcagacgcgaaacacgcgcctgtttctccatctcaaattatcttggccggagactcggcaggtggaggcttggttcttgctcttctccaagtcattcgagatgtaggtcttcctatgcctgccggagcggtgctgatatcaccttggtcggacctgacgcattgtttcccaagcacgatggagaactttgcaacggatgtgatgcccccctatgggttcatccatgtacgttctatcattttatatccacgatcatcacctttcctctgttttctcaagtattttcttcgtatggatcacaccatgggtcgtatcagaaaccgtccactctctggcctccacccactccagaaatatcagaacagatccagaagaccctcaagctaaagacccagaaattcatagcagaacttaagagccgagatcaatcagaccttccttctcaaatgattgaccattctatctctccaagttcgggcgtgtcaacgacaacaaattctcgtccgaaggatggcctgcctacatctgattccgatttggtagagtctttcggcgcagcttggagcgatagaaaacacgatggagaaaacgatacttctcctgacccaaccaagacgactgcgaaaggcgatgtgattcactctgagttacgaaaagatagtactgatgtattaagtcagggtttgaacgtcgacgagcagttgcatccaatgacgagctcaggaatcaaggcagacaaatcaaagcacggaaatccgcctgctcagacttcggagggcaaggtccaccagaacgccgtcgacccaacgatcggaggagatttagaaatcgagatcgatggcaagaaacatcacatcgtaagcttcacatcttctgtcattcttttgtttctcttcatgcttgtgccaaaactgattcaaactttggttggtaatcctatatatacaacgatgaatattagagaggacaaatccaacagtatgcgacaaatgctcagctgcctcatccattcatttctccggccttcgcatacctgggaggtctttgccctctgctagtcatcgcaagtgacaaagagctactcagggatgaggttcgtttccacgtatttttcagaggtacacgcagtcctgaaaggagacgaatctcacagaaactaaactctattcttcctgtttgggttgtggtcacatctatcagatcctctatgtgtcagtctcctaactaaattccgaattttgaagactcttttttctgtatttattaacgaaacttgactatcttttccggtttgatttactgacctacagcgcgcacaaagccgcagacccgaaagcttatccgattcctccccacgtggagcgcatgttgccttctttggatggtattcaggaccgatatggtcccacgaaagtacacctccaggtttatgatggtcagtctatattgttcaatctgttttggtatctgtttcgttgtctaacaggtccccatcttctgtctttacccacagaggtttgccatgtccttccgatttattcaatgacaaccccggcaaaatattgtttccgtagtatcgcttccttctgtaaatttgttacgacttctacgcaaacggacgtcccgttctcacctttagggtctgatgtagatgaccctaaaggttcttccggttccaatccttatgttttcggctcatctgttcatcctgattcgacgtctcccaagtcgccagtgtgggagtcggcatcttcagtctcgggttcggactttggatctagatcgagagagatgtcggcgagttcagaagtcaacttggctcctcccattatgacatcgacagtttctaccgagcccgagccgatcagtccctccaataacattgtgatgactgagcctggtcagatctatccaactgggctcgacggacctctttcttcaatcactacacc

SEQ ID NO: 2169 - DNA, 20838 bp, Xanthophyllomyces dendrorhous
tcactacaccgtcatcctcagttacctcttcagtcgccgcttcgcctttggtatcttctccgaacgtaagctcccaaagaccattcaatcggaggttcctgtcgctcaagacaattacagcctacaaaggcggagaaagctcgtccggatccgttccaggatcacctctggggtctgaagccggcgcacaagagaaggagatcgattggaaagcgccaagtatggcaggtgactcctcgatctatgtgcatccccaggtatgtttgttcttttacgtttgtcatttttttcatcctctgctcacctaaacggtaccgcctcaaaagggagagccatttggagaaaaaaatatcattagagaacgagtctcgaccacaggagtgttgcgtccgctcgagccagaggccgatctacccgggctgcatgtcccatttgacgaactcgcgaaaattaaggaactccgtaagctttctccttctctccatcctctacctatgcgtccttgccctgtcaaggtgatgatggcgccgattgttgatctctttttcttttttaccttgttatttctgggttgacagccgcaaaacggtatttgacaggccaagcgctttgggataagaagtttgcgtgagtcgagttcatcgtcacatctcttcttcttcatgagtcactcaacagctctatccttctctcacgtctggtgcgtcgatagacacgctgccactaaggtcgagcgagaaagaaaaaagaacatccacaaatctcaggaagacggaatgaaggtcaagtcgagaatcgttgagcaatggacgaaacacgccgctgagagacaacatgctagaggagagctgaataggcaggagcaagccgaaaatgaggcggatcaagaaagcgaggatgaagaaagaatttttttgttggattatgtaggaggaaaattcaactggctcttcaagtgagtagtctcaataagttcattcacaggatcaattattcatcgtatccttctttctatcatattcatctcgaacgaacgaaggggagagagtccgcccccctccgccgtcgtcagccgacgagacactgtatgtatctttcacgccgatcaactttcagttaggtgtccatcaacttaaaggtattgcttcttctactatcattagaatgaagctcgaaagttggcgaagatcgccgatgacgatgctgatgcgattctcagtggaggtgcaaacctctggtcagttgcccctactgggttttgtctacttctaaaacggttttttaaacaagccgtcctgaaccttttgatattccgacaaactataggacattggcgatcgaactcctctcacccataacggcttcacgggaaagcagaaccaactcgacctctacaagttcttcagtagcagacacaccagacgtcaagtctgatgccgctgaaatcttgcatgagaaccgacctcgggcgaaacggcagtcgtttcttcaaaagttgaaaaagcataagccttccgaagacctttaacagggagaagaaaaagaggtctctcccacaggtcttattgatgtactgattgatactcgttctgattcgtagacatgtactattttcgttgatgatttctcttactgcgtcttctgctttgatcgcttcttgatatttttccttcttcgtgtatcttttcgtaactcgtccctcgttcacatgggtcatgtaagattcgatcatacgaaactcatatttcatcttctgttttggcggaggagaatcgatcgttgaaattggacaatgcgaagtgaagagaagatcattagaaaaggagcaagggaaagactatgaacacaaaaacatgaaaggcttcctttctaagcacatataagagccaggtcatacacagtcagtttattttcggacggatcgtcgtattaagctagcagcgacaacgcctatgactgctaccattcctccggcgagggccatgccgatgtaaccctctgaaaaagagcgagaagggagcagatcaataagtagttcgtccgtggtagaaaggatccaacgaaaaagagaaaacattatgaatgtcttcatgtcaactcttacctttggcgagaccactatcgatgagttggttcagcgattgagcttgcaagtttgtgggctctttgcttaacaacaaatctacagttttcaaaaagcaaaggaccaacgcaaaacagttgagtccgagaagcacactgaaccggaaagtaaggggtaaatagaagaggtagaaacgagcagcgcgtaccattgaatttcttggcgttatcccaactgcctaacttgtagtaacccaaagcaaggtagtagaggcattcccggcgacgttgaggctcagccgcatagatttctgaccaacagcccaagatagtttcaagatcagcggctagaacagtacaatggatgaaccagaaaattcaaacagaaaagatcgaatacgaatgacttgccttgaagtaatttgacaccctcagtctgaagatctttgctcccactcttgacgagtccccaagagtagttgaactttgtctgaatggtgagatgaccagcgtatcgttctttctcaaactgaagcttgagcacgttcaactcctgaggagagagcgactcctcggcatctgctgcatagggtagatcggagggcatactgttcagagaaaggtggcaagataagacgtgatgcttgtgggtggtgtgagaagtcgagtaaggaactagccaaagagagcttacgcgttggcggataagtggcatgcacagctttctgctgtacgtgtggcgtctattgcggatgtaccaattctcgttgatgactgcttaggttgtgtgaatatgaagaagaacgagaagtaaacaggcagaggaaagcaatactcaccacgaaggccagcacgatcacatccttcgtgagaacaccaaccgaatggagctacaggtgaggaaatgatttgctggccagactgtagcgccgaggagatttcgctctgatgtgtttctttccttctttcaacgatctctgaaagccggtcgcgtcgacttctaccacttcagcccttccatcagttcagacaaacaattcgttacaaccttctttcgacgatgcctaccttctttacaaacgcgttcatgaagagttgtattccaatttacccgccacaccctctcagctgagctatttatgtaacatcgctaagcctcaagtagagacgaattaccactgtgcgttgtatgacccggatgagtcgatgttgatcatggaggaggaaccagtcaaatcattacccgagtccaagctggtcgaagttcaattcctcgggggcggaagtgagtcttcatcttggagggatgcaacccctgaggatgtgacgttggtgcccggtttaggtgcaggactgagcgcagaatgggccaagtgtttgatctgttatggaacaaacatcgtccagccagaaccaccctacgtgttcgcgagaatactcaaaagaagtgcctacactccagatgaaaaggtagctatatattctctggggaaaagatgacagagagacgtttgctgatgttatttggtggaaacatctattgatagaacatgcaatacgttccaactatatcaaccatcaacccatccaatcctccttttaatctccggcattatgtgataacctatgatgaacaaggtcttggctctttagaacatcatgatgctaaaggtatgtttgattcagaattccttgtctcatacccaacatcttttctttctatatacatgtgaatatgcaagctactgattcagagttttgggtagatgactgtattttgtatgaattcctcggtcggctcctccatgcgtatccggatctcgactttgatcttttagactcatacgaatttcttccattggcatctgtcgagatcactaatctgccgatacacaacgatatgatcccatacccttcgtcatcactgacatcgctgaggactgagaagtactctcagtggggaaactcatataacccgttagtggagtgtcgaagagctataggggaaccgagttatagagcggtgttgaaggatcaggaagcgtcgttctgtccgatggcaggatgtggagaatatgactgtcaagttcacagtgagcattctctctcttcaacacgtacaacaggagattttcttcttaggaataaagtctgacaatcagcgcgacttgcttgtcaatacaacctcacagccgcatatctggatgactcttcgagcttcgtaaacgcaaaaaataaaggggacccaatttcaatcaaccaactgtatctcgatacaaaaaagaaaggcccatgcggaccgacatgttttctcaaagtctttggagatcgatcggtatgcaaactttcttctgaagcttcgtgcaattcagtatcatcctgtatattactttctcaatctaacatgtgcatcatcaaacctaacttagaggaagacatttgaaaaggatctgtttgaccaggtcacgtcgaccaagccatggccggacgaacagatagaggaacttatgacgctcatcatggccatcccggatttcacgccttgtcagatggttgatctgtttatgaatgaagatgggagtcaatcatatacgtgtgctgatgtacgtcaaagtgccattctttctttctacttggaacgaccttttcttttgttgacctggtcgtttcatttctctacgagaaaagtatttcatacatagatctaaggttatggatcttgttgagcctagaccgtcttttactagaaaggcaaaaaaacctagaacaggttggcctgggaagaaagttttcggtctgtctcttcttgccctttcacgttcagtcataactgacgtttatcaagactgacaacgcccatgtcatatacatatagatttcaaccatcagcacatgcgcttgtacgtttgtcgaactcgatatagtttcatcctcttccgtcactgactggttgtatggatctttgtgtacgagtagaactcggccttgtgaccacgaagggccatgtacgattagtggtatgtactatttccccttcctctggatatgtcatcaaacagccccaagataagatttgacaggtttttctctcgggcgtatgattcttctactattctttggttgcacagtatgcgactgtcatgtgaataaagtttactgcgaccggaactgccattgccctccagactgtatgctcgtctttttctctctctcgcgtctttttcgtttcttcgcagcttcaactttagaatcaagagttcatggatcatcatatgcgcatatatgctcgactatgctttcttgtcctggagggatttaggtacaagaagatacgcaggatgtacgtgccggtctagaggaatccggtgtcagacgaaatcatgcaaatgcttccaggacggactagagtgtgatccgttcttatgtggtacctgcggcgctaggtttgttccttccgggtttcctttgctttctgatagtggttgtgggttcctgatatcgatgtcttgggtggacaaataatcaaccggtgggattgaactatagaggtcagtgtttgaacttgtttcctatatcagcttgctttacataacaatatcaacttgtgtttctgatttttaaacacgcgcacatacaccaatgatctagatcctgattccaatcaatgtggtaacatcaacattcagaagggtcatacgaaacgagttcggatcagaccttcttcccatggtcttggtttattcgtcgcccctggagaatttatagaagagggagagttcattatcggtttgtgtttttttttctgtgttctctcagcagtctcttcttgatctggctgaccgagtttcttccttgcttgacagagtacaaaggagagatcatctcagaatttgagtcaaacagaagagggtgcgttctggtgactgacggtgtcctcgtgttgattctaactttttgcacttattgaacgcttctcggataaagtcaaatctactcgcaagggttccggaactaccagtttgatctgaacagagatcaaggagtagatgcttaccgaaaaggaaatgagtccaggtttatcaaccagcctgatcctgataaacgacagagcacgggaggcgtgggcgaggcaaactgctgtgtccgaggtaagacctcttgatcctatgcttgcgcacacagacttgtaagcggtgctgatcgaacataatgtttccgataccttttcagtcttacatgttctaggtgaacaccggatcggagtctttgctcgtatgtgcccatgatgctatgtctctttgctgttgcacttgcatgatgatggcatgaggctgatggactgacgcgagcaaatccgttctttaaatactcatagatcaagacatattctctggtgaagaagtgagcgcgatcggtgttctttctatttttgccttaccctcgctcacttgaatccatgctgatcggtgtgtgtgtgatcatcctattagttactgttcaactatggtgataagtttgatccgaactcctcccggtagaagagagtttgtattactggccggcctctatttgtaatgattatatatgacaatcagcaatcttgaagacataaacgtgaagggggggttgcgtatgtctaggatgactagtcagcgaagacaagcaagaaaaccaagaagacagagcgggcagaatatagaaataccggcagatcgtaacggacgataagctattttctttgactattgattccttccgcagtccatcggccaatcctctccgtcagggatgacgctcactctccgttaagacctttttcttctttccttgaccttctcttgtgctttttcttgacaaacaccttcttcgattcctttaggtggtcagccatctagcttcgaatcaccctgtcatcttggcttgtcgtgcttctgctcgctcatcctggtatcagggttagtttgaatttgtccggtatctactgttgttttcgctccgcttcggtccatttgaaaccattcggtcgtttgtcgctcgtccaagacccttagaaaacaaggaaatagaggacttgagagtccaatacgggtttcttctgaagagtcactttcgtgagtgacagtctttcgtgtccatccgtctctcaagctgaggcgagacgaaagtcacagccttttgtatgtccattaggcaggatgccaaactgcaacccgatctcgccgattggacctgcaccggcgactcagggttttagtggcatattcacgacaaccccgaggacttcctgttcttcccgttcaagccttacctaatattctttcagctaactcatccgcttttgtatcttcctctccgtcttttctaccaaagtctgcgtctctgtctcactacgcatcacgaaggacgagcaagaaagcacgtttgttcgaactggaaaacagagagctacaaatcagtcatcaccagcaaattccatatcctctgttctctacgcccaatctttagccctacatgcctcagatattcaaacgaaaaacctcggttgatgaggggactggcattcggaaaaggtcgatggatattcctgctgccggtacggccccggttaaagctttcaaatccatcttcagcaaacactcccccgccgctccggttgataccgcctcgccaattcccactagccgaaaatccttggatcccaaggcatctttggttcaggctgataacctgactgattcgccgaatttgacatcaggaagaactgctgaaaacccggctcagatagttgctcctaggcaacagcaggtctcttcattcatgatctctggtgcgtgttggctcggtcattttctcgtctctctgtgtatcttctctgtccttctctgaccaagcacccatgcatcttgctgtctcttcctcatctcactttggaattttagatactgccgacaaaccgtccttatcagctgcttcagtcacttccaacttctcctcggccatgtcggaaggaggctcatctcccgttgtgcccgacatatcttccactccgacaaccccgtctccctctggtgatctgataactctcgatcctccctccgcgtccgctcacgtgccctcctacaagactaaagccattcctcctcctctcccggccttcaaacgaaaaccatcgagagcggatgtccctgcaatcctgtctcctcggatactatctccgaggatgacggggtcttcctcaatgccattcgctaccgaaccctcattctccaacatgaatggaaccatcccgagcttcttcacgtcaacacccttttctgccgggggctctatggacaacacgacgggcgaaagttcgaacacgtccatgactgcgtcattctcatcatcctcgtctaccaacacggcaacctacaatccttatttccaatccggctctgtgaacagcgaacgatctatgaccgcctcccgacctttgcctgctactagaaagagcttggtctcggcattccctagacaagtgccctcacccatgccacttacgaatctgcccatgcttcctcctatgtcaccgacaccgagagcagagaacccgaagaggacagtccgggcgatgccgatgatgttcatgacaggtcagtcggcacatggaccccacgaggaacaagaagaagatgatgacagtggagatagcgatacggatagcgaggatgaagcgagacgatcggtcggagcggccaggccgacggcggcagcgattcccttcccacgtgtttcgaacgaatcaaactctacctctacgtccggatggaccggacaaaccaaacgattttcaagtagcatgattagtgttgatagcattaatgagggagatactcacccaaatgggcccccaagaaatgaacaaaaacggggttcaatagatgccttccgattggacagtacgttctatttttgaaccaagtctccgattttaagacggactatatctttgtcaacttccccttttcttcagataccgtcatatatgtcgcatcgtttcattcagtactaatcttttctttctccgcttgctagattataccatttacggaccagtttcctcatccgatttgttacctgcatcctctccattgacagcccctctttcagaccgccgaaaagtctcccagcctcagctcgacttacatagtgtttctccatctttgtcgcctgacctgaacgctttatcagagccatcgaccagtctcaagataattccagcgattccttcatcaaactcatccagaaacccattgggttcgttcgacaggtttgccaattcagagtgggctctacctgccccttccgaaagcgagccatccaaattgcctgtcggcgcttggactacgttctccatggctactcctggcgcaactcctggaatattcactggtggtaccaagacacctagcgctgaaaagagtcggacccctcgagccggaaagagcgcaatcccccccatgtcgtcttactttgatgcccaggataacatacctcctgcggatggaggaaagaccccaacggctccagggtcgaggtcacccaagcaaataccagccgctgtgtcctcagcattgactgcaacgcaacctacttccgttttggccggacccgaatcggatttgacggaatcgggagcagagaccgatgtatcattttcttcctttaccgatacggacggagagaccgaaagtgatgtggcgtctaacggtcagccctctccggagctcgatgatagtactaccactcctgtcgcatatacttcgactaggcccacacattcgactcagccttctgacgactttgtcgtcgtgcagcctcctacgcctggcgcccggatcccagatcgtacccaagaatcgtaccgaccgagtctttatcatcaggcttcgagaagtttagtcaacttatcaacggcatctgatagacgaatggatttcgatccgctcggattaacgaagaaagaagttgccccagtaaacactcttgggcctgattcgtccgttctgaagagcagcgcgattttcaatccatcattcagcttggaagcggaccaacctaccaagagccctacagtccagaaaaacccatcaggtccgtcgacagagctaccggtaggtagcccttcggcgtacaatgcccatgtctatagatctcccccaccaccgatgacacccctgcctgtggatggtatgttgcgacgacggaaatcaatgagcgatgttcagacgtctccaccagagtatacacctcctgaaccgggtagcaagattccaaggccaagagaagaagagggaaaagaacctttgccagcttacacatgccaggtacatatcgagggattcatcccgaaaaagatggagtttgcggctcctggtcaacaggctagggatcgagcttggaaaagacaatacattggtgattatcttttcctttgctctacagaagtagatacagttgaggaaagcttttgtcgatcaaatctgaccttttctgttcatccgaatttatttgcacgccatagtgttacacgggacctgtctgagaatttataagcaggatcctaggcgatatctcatccgccccacttctccttcagacggagcggtaccggaaactattgatcaggtggacaatgccgcgcctcatgtccattttcctggggtcgctgccccagaggttagaccaccgctcagagtggtgaatccagcggcatccaattcatctgtgacgtccgggccgactgcagcaaacgcttcactccaaatacgtcgggcaagcgagacgtccagtaatggagaaagtaccagctctagtagacgaggaagtatcgtgggtggctccactcgtcgtcgatcggtagacgctaattcaaatttcagctcgtttgggtcttcatccggagcaacaggaagtaactcgagtatcaatcgaacagctgccaacatgcttcgacgaggctcgattcccagtagtgcttccccgtataacacttcctctgtgtcatcttcaattggccattcgaatctaaactcgaatgtgaatctgggccaagctatcggatcgggtaatcaactttcgttccctgagaccatcaaaacaagaatcgcggattcggacgatccgggaatcattagaattccaaaatcgactggatcgacgggttcagtttcgcagacaggatcgaatcctattcacttgcctttccatggaaacaatcagtgagtttctatgtaaatcccatgtatgcatgagagataaacagcactgatacgtacagcgacttctttctcccaaaaatttcttgtgtatcaaccgatacagattgatcaaatcgtatactttacagaacgcagaatccggtttggccgctgactatctcaagaagaagaacgtcatcagggttagagttcaaggggagcaatttttgcttcagatggacagccctaaggacgtggtcaactggatcgaagcgttccaagccggaacgaatgtatcattggatctcgatgatcgaccgatgcccaagatcatcacgcttcctcgacggagaagaagaagaagatatcctggtgagaccgatcctgtcaacccggatgctgtgcaggatggcgtggaggatactccagaggcgaacgttcgagcggcggcagcgtcggatccgtcggtcatgggtgtcaacgattcgatggagcgtatgctgggagaggatcatggtcgggaggcgtcagacgtcgtctagacgttttgataactgtctttattctatttcttctttactttatcccctccccttttttatatattgtcgttcatcaattcctcttattttctccttcttctttaactctgaccatagtaatcactgtggctttggtgctgtcttacctttaccttttcctttcttccagactatataaaatgatacagtacttctgcttccgttttgttctgggtttttcttataattagctccatacgctgtagtgattactcttctcttcaaatttctttaccactgtagctctggtgtatcgtttctacattcttctttcgttatgtttatgtacatgcccttcgcttgccttgtttcagatttctctgtcatgccaaaacgtttcgttggattaatcatttatcatcatcttctcttcttcccgttacccgatccatcgatttccatcctgtcgccactggcgctcccattcacaggagtgaccccaggtttgagaacaccaccgacgataccttcccacatcttgtcattcaatgatttggccttgatcagatcttgcttgagcttgacaatttcccgttcaaggatcgggatttgcgcgttcggttcagcaacgtcctgccctcgtccttcagtgacaaccgtagaaggagaagaatggtcggccggtaggccgaaaggtgatgaaaacaaggagagcggtgatgatgtcgatgaagggctttcggacaggattgctgacaaaaaatcgactgtctcaggcacaggagaaacgacgacgtgtcgttctctttcctttctgcccactctcattcgttctaacacgccgacggatcgaatcggccatttctcatcggaccctccgctggaggcaccagaggttgagcccattcctgtcgtttctagagagacactgccgtgcagatcaacgggcttgaggaatgtagagacatgggtgatcggacatcctttgtgggataagggggagatcgttcggataggttgaagtgtggggagggagtggatatgaatctgaccggttgtggtgccgagtagtagataagagagcgagagagagagcgaaagggtcgtaatggtgtcgctaagaaggggaagtgaaaatgacaggaagcgggaagtggtcaaaaaaagagagtttgaaaggatacaaagatactgtaaacgaacctgatagcaagttgaccttcatcacctctttctactctgacaacctctccacgaacaccgttccctcctcttgctctcaacacgccctttcctttctttccagtactcaaaccatcctcatctgtaccatcatcagccaattctccttcacgcttctcgtacattcgaacagtgaaaacttctttgccagcagacgcgtagaatgctcgttcgagcgggtccagagcgagcgcggagataggtgatgggagatgataagtcgagagaagtgttggtggactagtgagctgccaaacctatagagcgaacagttataaattaaatacattgagattgaaatttttagaggaaatactgggtgtgagattgttggttgataattaggatgatagaagtaaaagatgaagagtgtgcacacgaaccttaacagtgtgatcgagcgagctcgtccaaactctgctttctcctgggaacccgccaagcccaatctggatatccgtcacgggcaatgtatgatccgccaagttggcgaatgccgttggaatctctctctgtaagtcgtttgatacgagcgccgctacactccagaccgatactctcgagtcatccgatccggacagaagcccatgaccatccggagtgaatttgaggatagaaactcgtctataatgagcgtcgaacgagttgaacaagagtccagaagagagcttgaagaattaaaagaaagatggtcagcatcttgcgcttacgatatggtgagaaacagcattcaagttaagagacaaacctcccaaaggtagatatggccagtgccagttccaccagcacaatatgttcctgtgggcgaaacggcgaaacacgaaagcttttctggcagaggaatcttctggtgtagttggtcctgtttgacatgatcaacgagaaagcgaaatgagctgatggttttgacgagtttgaagtacgaaaattgaatttaccttctgccaggcccaaacacccatcataggctttccctcttggacggtgatacacacacctccctgacctctagctgagggaataacggcggtcgaatgaagagcaggaaaggaaggtttgagggtagaaagcagctgggaggtggtaaagtcatgaagggtagttgaacctgtagaggtagctgaagatgacgacgacgaaagtacagtctctatcggagaggccatgatgatagtgaggcttctgggccagctggtctagaaaagcggatgtaggttgaccaaaggacagtatgtcggtcggctggatgaatgaatagttgggtgttaagcgttgaaagtgaaattattatttatattttatttatattttattccccgccacaatgctgtgctcacacaatgccgctcataacttacccaggctgctcttcctttccttcactctcaccgtgtatcttgtcctgaagattgtcagacaaacacgcataagccaccgaaggacatacggcatacgcttactctgaacacagatggaatctctgcagaggacattcctagagtggcaagaagatcaggttgcaagctgggtcgaatctatcgggtttcctaaccatacagatagtattcatcgtgagtgctccattgtctttgttgtttgagttgactgatctcttttcggctcgaacttactttcttctgttttgtcacgactttgtaacataaaaacattagagcatggcataacaggtgatgtcttgagcgtaatttcctcagaagatctcagagatgtaggaatcactagcttgggccaacggctcagcatcctcaagcatgtctatcagctcaagctcgagcagggaatcccgctggagaaggacagctggatccctagcacatgttcgtctcttgagatctcatcgtacttcctccgagacttatttcatacctaattgaaggctgcttggtttattttccaaacccgttgcgatcttagtggacggagaggaaggagttgaggcctcatttttgaatttgtacagtgaagccggatcctcacccaaccttggctcagctgcagacgcgctcgacatcgagaagctctacaggattgttaatgagcagagtacgacttcctttgtagtttcctgattttcctttgccttacgatgctcacctttcgtttcgttcacatacatagatgaaagattgtactatctcgaacaggaacatcagcgacttcaaggaaccattctccaaagcctccctcttcagccgacggcgccaactcctacctcatccggacctccacctgcaccttcgtcttacacgaatttaccaatatctcattcctcttcagcccatcaggactttatggtcaaacgtcagccatctttcaaatgggctacttttggaaaacgaagtccgactatcatgagcacacccgcgttctttgatccaaccacttcagcctcaagacaagccagtatgaattttggaggatcaaacgctgtggaacattggagtgagaggtcgggaagtccagggatagagcttggagtacgtcttagtctttctcacctctactcttctgctctcttctttctgtcacgcgtatgcattgaaaacttaaaagacataagacgcgctgacatgtcatttctctgcatactcttgttacgtgaatccttacaaaaggtcactcctcccagaacggcccctctggcgagacatcaacccccactgacgcatacaatctctgtccaggcttatccgcaagcaacatcgccttctatacccacgcatccttccataccccacttttctacttcctcctctgctacttctccgacagatcaatctagacaggctcctggtctcaacacaagttcgtccaaaaagacggatttggacatcaaagagtctgaggaaggccggagagacgagaaggagagggctaggaagtcgtcgagatcaacctcttcagctgtcctcggcacagctgaaaacccccagcgattcaaagtaacactcgaagatccatgttggaaagttcttccagccgccctcaagaaatacaaaattaacgatgactggcggatgtacgcattgttcatctgttacggaaatactagtggtcggttaccagattcgtacttgattttcatcttacaaaaagtgcatcgacaagtgaatctgatctcggctctttctccttttcgcgtacgctgttctcgatgccgcgttttaggaactggaactggtaccgagcggtgcttatcgtacgatgagaaaccactgttacttttccagaaactcaaggaggctagtcagagtccagtgtttatgcttcgtcatatagtacgcctatacattttttgtgtgtttcataattttcagatcataacctgacgcgtgtacgttcatcacagcgcgacattaaatcccctatagctatcgctcaatccaaagtacaatctagacaaatcacgactgctagtgctgataacagtacatctagctccgagaatctctcttcacaaggcaacacgtccgctccacaagccagctcatcatcaaactcacacccctctgcatcagtttatgcgaagactaatcggccggccgaaggaacaaatagggatgctggcccatcttcctccagcaacaaaactggaattacagatggagtggatggggtaacatatgcaatcagtatttacccatatgcagcggaaagagaggatgaattcagtgtcaacgtgtgagaccttatcttctctgctatctgcagtagtcctctctatctttaagattcacagacagctgatctgtacatcgtgtgggttatatctccctagcgacgacacatttatcgttcttgccaaagcgaaaggctggtgggttgttcagtgcgaccctcaaagcgctggccgggttcctgtcgatgtgtctaaagcaggctgggtacctgccggctgtttacttgaatgctctcggcctcctgggttgtctttcccatccctctcaccatccttgccttcctctccatcctttttatctcctccatcagacgtcacgccacctggttcatctttcaccacacccacgccttcttcccctgccatctcgtcttctccgacttcggccttcggaacagcgcaaaccgatcgatcgaatcatcagcaacaacaacagcgactccaactggattcgattctatcgacaagtttcccaggcgtggttctgatggactatgcgagcggtaggcctgaagagatgtcactgaagaaggacgagaccgtttggatgtttaagcgatactctcattggagttatgccgtcaaaaacggaactggcgaacgaggatgggttcgttcggattttctttgtacatctatctgccgtcaaaataagctgtcctgaaatatctcatcgtctctcgttctacaggttccctcgtggttcatcagttctcaacatacaacctctactacaccaacgactacatctgctccttcctcaactttaagcacggggctaaccacctatcaatcgactccatcctctggtacatctacaccttcaactccactgacatcttcaggtccgacgtccactttatcgttgtctggtcatataccgccgacgatgtcggtaggtagcgcaatgtcgacaccaacgatggaaattgtccccggaggtggatcagagattttggtttgaaacacatgtggacaagctctctttcctgacctattgaatcttttgtttgtttctcctcgttctccgttctctcttctctcttctctttccttgttcatgatatgttgtagagtaatcttttctcggttgcgaaatattgttcataccttcacattcctttgtccgctgttcttttcctttccacccatcacatttgttctctcggccctaatccctcctctctcaccctcatttttgtacaaggtgatttcatctcatttaaacaggcatttctttgaatgactgaattcttattcaaggtgttctaatctgaatccagggctgatcagtaggttcataaattggagatatcagacgtcacattagccacagcagatgataacaccgagagcattgttgctgctgctgctgctgttgttgttgttgttattgtggtcgttgcggctgtcgtggatgctaatgctacgcttgataaagacgccgtagatgaagctgctgaggatacgactaagggcctcaaaacacgaacgtttcctcctgccatggctgccgcttcgaatgccacaactattgtcattttttgtatttttatttttatttttttgtgaaacagagggaaaaatgtttgtgttgttatcagcatctttgctactctctttttaaaactccaggacaacaaggtgagaaaaagcaggacacttacataacaagagctgaccgacaagatcgattaccgatgacaagatagggagcgtgtgtgagctttttattttcaattttccataacaatcaatccggcaaacaaagacagaaagaagtatcgctcagttagaagtgtgttgtgtttcgaagatatgagaagagaagaagtgaaaagatgagggaaagaaaaaacgacatactccgggtctagttctctagaccagaaacataatgtaaacctatcggctaggtacaacgagatcgctatctaaatttcccatcgttcaagatatcagagtttcctcatcagctcgaatttctcgcgtaaagaaaaggcagaaggaatgatacacataccgtcaactcggccacgataaagaatgaaacgatcagctgccactcaaccctcatccaaccggctatcgcgaccgccagaatgaacatcgccaagactgggaccgagaccgcaagcaaagcaagcgctatcgttctcggtgaaaccgatccgatggttggttcatccggcgttgattttgataaaggttctgagaaatgtaggactgtcgaaagtcgagatgcgtggatggagcctactgcgccagataaacctgtttgtcacaaaggtaagggcacgaatccaaggggatagagagagggtgatgagattcatgatgtgaacatgcaaattcttcttcttcctgaggctatgaggagggggtctgtgtgcttacctgtcatggcaacagcaaggatagcaaacccctcgtaccgatcgacgcagcgatccaacactacacccgttgcactactgatcgtcactgcgaccaataacggtgtccacccggtgttgattgaatccgaaacatattcatttctcaacgtgatccatgtgaagccgacgccggcaaggaggatgataggtagaatcatcaacggcagtggggtcgagatgtagggaacgatgaaggagccgatgacagcgagaataaagagtgtgacaaggtcggacagacaggacgcgatgggtgtacaaatgttatctatacgcatcaaggagaaaagggcgcaaatgatgagtagggcgcagacaaaggcaggcacacagacatgaatcttacccggattgattctcagcctcctactgagcaacaccaaaccactcatgaatccacccagagtggctccactcagacaggccgcaccgattccggtgaccaagaccatgatcaactctttggcgcctggaggcgtgtaaccctccttaaaggaatcgatgtatcctaaatctggatcgtctctctcacccaaccagagaccggcagcgaccgctaagttcctaggctcttccaatgcaatcattgaacggtttgtcatcatagactgattgaaggacatgccaacgatgtcggcggacactcgatgaggcatcgccagaccaagaagaaacgagacgagtccggcgagagaggcaatggcgatagcttggacttggagcagcgaaagttggccaaggatgagagatcgacggaccaatcgaatatcgagttcgccaatgttggcactagtactgagtctcgctcctaggcacatctctaagttaccttttagattggcgagctatccgagcatggacgaagcgatcaacggacggtccgggatataaagcttgcttggagggtagaagtacacaccataggcaccaagataaacaattcatcaactctctcaaagactttccaccgggacagatgttctaagagggcgccggtaaagaccagaccctgaggacataaaccaacacagttctcagcacgacgtattcatggaaagctgttgtggagacattaggtccaaaggaaagaggtgaatacttacaagcagggtaagaaggagagtaggtccaacctagaaccaagtataaggaccggatcgcatgacatgataagcgagggaacacaattttgataccgagcttgcacagtactctttggtgaaatagaaacaggagaagaaggggataagaacaaaaacgaaaagacagacctcatagacgagttccttgatctctctccatccagctcggctcggcttttcaaaaccaaacagagctgtcgtctgccctctgatgatcttgtctcctctcgcccatctgcctctgatgctctccttaggttctctcctttctgccctcgaccgactttgtccgtcaggaccaaatacagacatttcgtaaagtaagccttggccttcatctccgtgccttccgtcctcggtatcgtcgtcctcatcatcctcgtcttcatcatctttctttccgtcgacatcaccatcttcagtcccgatatcattatacaatctgtgagaggccgaatgtcgacgtgaaactct

SEQ ID NO: 2170 - DNA, 2516 bp, Xanthophyllomyces dendrorhous
ggtatgaggtgaggatctttcgagtatgtaggtagcagtgacgatatactttctatcgatcgttcatcgattgattcctggggtgaaacagaagtcgatagagaggagagcggagatgtggttgaggaagaggaagaagtcgaaaggttggtcgtgccgggtttatgattggatgcggaatatgaagaaggttgaaatgggggtggtcgatctttctcaccatggaacgtgatgatgggagacatctcgactaggtgatatcgaccgggaccgactttgaatatctgatgaccggaagagtgaaggtaagagtgttgttaggtgttgaatgtgagagagaaaacgagagaatgcgaggatcccggacgcggggcagaccggtatgatttcaagatcttgattgactgcagaataatgtcaaaatatggtgtgcattacgcggtaaaagagacactcgcttcggctcttttcggtccaacggatggaaagatatcgatcatatgattacacaagcccctaagaggagaagattacgctgaggttcgttatagattcgtaaagaagaacaagacggatgaagcaaaatcaaatgaacagaggaggagaatagtaaagcaagcagatcaagaacgataagaatgtaaacagacagcaaaacgatgaacaaaaagagcaggagcaggagcagcaacgaacaacgattaaagagaaacaaggcaaaatcaaaagacacctgaattgaagtaagaacgaagataagagaagagagggacgagggcgaagatacaggcttgctcattcaaggcaccgctcgaatgtgactccttctactgaggcccaatgagaagcaagtcgcatgtccgacaagtcttctcctctggtggaggaggatagatttaaaaagttcttgactgagagcgtcgaatgcttgtagacgaccttgtcatcatggttgatgtcccacatgtgggtgaacggaatatctctatagcctgtcttgagtgctcctcgaggcggcagatgagggacgggatcagtcggtgaagagacgaggtgtatcctgttggaaaacgtagcgagttggtccatgacgtgttcgacgaacggttggtttccgacccgaggcgagccgaacatagttacttcgataggaatcgacaagtcttcgagcgacatctggatgtgaagagcgtgaaggagtgcgatcgagccaccaaagccatgaccgacaagctcgatctttttgatatgcttcgagttggccagctcgtttctgacctcgttcattaactcctccgcagactcttcaaagatctctttggccaaggggtctactctgatatctttggggagatcttcgaagaattctgtcgattgtaatgagacaggctcagtcgattcggaggagacgaccttgtcgagaaacaggtccatatatgacggttcgatataggtaagatatccatgtttttcatccgacaggaacaaggtaggttcgacctggcaatgatttatcgatctgagaaataggcaaggggggaacaagggaacaacaggtaagtatcaggacatacgagaccaagagaaagagagtacggacgtgatctttgcgagtctggcaaagtctggtaaaccgagacctagggttgggatgacagggtatgcgaaagcggttgttgagagcaagagcgagggtattaagtaagagtacatttttcttcctggtcggagagagtgattgcgttctggccaaacagattaatagttgtatatgatatgtttcttgtgggcaaggatgggaagaagaagaagaagcgaacaaaaggtagaaagcgtgataattctcgagtctcttttatacaaagagaaaacttcgttctttgttccgttcgttcaatgaccggatgttcagaaccagaagacggtcatttaggcgtttcggaagagaatccagatattaaagctgaaccggatcagcaagggaagcctaccggggaaagacattcccgacaccgacgggcagttcaagtgaatacggcacatggaagagaggtgatcgacagcgcgcagtttactcttcaagcggtgatgataccaggcgcagcaatgatccccttcatcgagggtttgaggctctttttgtgccctgatccacagaggcaaagtccggccctggcaacagatccaagacattctcctcctatgatgcatgcgttcctcgcgggtccgttacgagtgttttgaatttacggtccgtatgtctttctcagtatgacgcgtgtgtagaggtttgtgtttgcacatctgatcaagtcgtgaatttccatgacttcctgtcttgcatcgatctacctctttagagaatatgtcttaaccttctgttggaactatttatgcgtgtagacaaggatcgctcaaaggggaaagtcgtgtttgaagaatatatgagaggcagagaacaaagaggagaccaatagagaaaggaaaaatagttcgtagacgaataagtatataat

SEQ ID NO: 2171 - DNA, 33122 bp, Xanthophyllomyces dendrorhous
gtctgagagattgtcgtgtaggtcacataccgatgtcaatcgaagatacttcttctcgagcttagtgcacgttccgacaatcgtttgcctgtcccaatcgattacgttctatgattccaggaggcacggatgcgcaaagatatatcagatagagtcagttgctccatttcgtttccagtttagcagtgaattccatctttgcttcccccccccccttatccatctcttgaaacagaagaaatgagactctacgaacagggtcaaacttggcttcttcttcgccacccccaaagaatctctttcctcctttctttccgaactttccgccaagaaccgaatttcctccgttcgtcgtcccgttcaggacgcccatctcttgatcggttgaccgaccaagctcgatatctctttctcgggcgaatcgtttcttacgcttctcgttcgcttcttcttcagctctgatattgacaatttcgaagaataaacagatgaggaagaagtaagcaaaacactgagaatcagtgagaaactgagagtagaaacgactgctgacttggtattggccatgacaaacagattgcttgtttttttcttcgattccttttccggcctatgatcgcaagaccaagtagataaaacaagctcatgagtcaaccaagatcccttgatcccaacttgagcgacgtcatctctttcttctcccttgtaggacggcaacaaagatcgacgagctcactttttacgtttgttgttagtctgaggagatgcagaaggcgaagctgcagctgctattaacgttgggtttgcttgagaaacaataggttgggcaggtttcctagttgtaccactgagttggtcgcgaagtctctgttgttgaatactagtgccataaaatccccgaatcgagccatatccaatcgaggattcccccggaatcgaaaacaccaagttagtctttcagcgtagaagtagaaacactgctagatggtgagctagagaagaggatctggaccgaacctatctaggactagattactccagtcagtagtgtcaatcgtcttgtttctgtacgcatcaaagattacctgatatcattcgattccgatatccaaacaagtcaagtcagcttattgagtcattcaacacctggccacctcccgcttcactctagaacgatgcgaaacccggtgtatctctctgctagccaaaccctcgacctagttattcagtcagtcggatacacatactcactttcttgagctccgcctggactttatctttattctctggggctgcctctaagagagactgttttacccagttcctacgttagatagacagaatgcaagcagtcaacggtcaatcagagaagcaatgatgagaaggaagaaggaaggaggtagacgcgatgagtactgattcaacccttccaaagacccttttggctagacgaatgaccagcttcctcgaaaggaaaaaaaaaaatagaagcctttctagaagtactcacttgagtggtgctggccatcctccgttgttcatgacttagttatgaatgtataaacgtataggtcggttctcgctgtagtctggttattgcttatgatcgtgctggtgagtgtgtatgccgactaggtggctttacccaactctcctcgcctttaacacgtgatttcgcggcgtttatctgttcttcaaccagcttctcacactctttcccatattgcgatcttcttgagaggactcaagatttgaacaactgtgtacaaaatccaggctgacccagcatctgaaacaatagaacagggaaagagaccatcgacatctgtttttagaaagttcaatttatatgatcaactccctgaatccatcttttcgtctcatctctctgtctcctttgccttcggtctcttccaggaaatcttgtgttttctgcttcttgttcttattcttctgtctatttggaagtatctcccctaagcgcagacctcccagtgaagaagctggtggcaccgagtattgaaaagattgcgaggaactgaaatacgatgatacatttgttaggaaatgaagtcttatgaggatttaaccctatgttccttttatcggatgatgcttcgaagagaaaaactgaccttgaaaagtttgatgtatccaatccagtaaactaaagtggtgctctccaaggcgagcagagtagtcaagaaggggtatgccacgctctgaggaaccaacttgaaggagaggctattgatctatatcatcaaccatgtttgtagctcaacgtcagttcacaaggtctttggatacctgcgatatgaagaccaaggacagaacaatctcttctagcgcaaactcaccaagccagccaatacgacccaaggggcccaaacagctccggtccctagaagagagatcaaggcgttcacgcccttttcatcctcccgaaacgtgtggtgaatcaacttttgcttgccaaagctagagaatagctcggcagagtaggtatcaacatgggctttctgcggtgttagcactgtagaaggcagggagagagtaagtagggggtaagactgagcgaagggtgaaagcagtaggcacgaagcacatcgcgtcagtttgattcataagatattgatcaagccggtggcacagcgaagaactcacgatagaagaagcggtcaaactgccgacattcaaggtgaccgtgaaagttccggtggtcgaaaggagttgagatggcggcgaggcggtatcctagagacaagtatggttacagacacttcaacacccatctacatggccaagagacaagctcagaaaacagaaccaagactaacgatctcgaatctcgtctttccttttgccctgacattcaaaggtaacacctcgtccttgcctgtctcaacactatctcaacccaatcatcgagagattcgcgaggcagtcagacccgacagacatacagttaggccagaatagtcagggaagaatttcaacctactcgacaaagctcagatgagcttgatgaggaataatcccgtctccgttttcatctgtcacctggaaggctagcttgaaggttgagagcggaggaaggaccagcggcgtagtcagactatgagggggttccaaactaattaatacatgaatcatgataaaatcaaagaaaggaaaacaggaaacaaccggatgagcatgcataatgatgagctgacaataagcagtattcggccatcatctcctactatcagaaacacaaggtaggggaggttgtgacgaacgtgtgggattgcaaggtgctaccctcagaggagatcaagctgatctggggattgttcaacttgagagcagagctcgaccgagcaacaaccgaagcggcgacggccagcaacgagacagacagaaaagtgcttgaccaacgcatagcaggagagacgaaaccaagaaaggacggtaggacgaaaaaccaacgggcgatggaaaggagagagattgaaaaagagacgagagctagagatgggacaagtgattgccagtaaccctaaccatgaatgttcgcatttgagcccttcagacaatcctcatcatagattctagagagcctcgactcagagatacattttatatgataaacatcctagaagaaacgaacatccagcaccaggtttccattggggtttcgctgtaaatttgattcgaacgagaaagaaggtggtcagatatggaagaaattagggagaaaaaaggcagaagaaaagcaagatcagcaatctttctggccagaatgtccttagtagatagcgaatcctaccttgacccaaagtaacctctgctcatctatacaaagtcccgagagtctgtcatcgtccaagcttgtctgttgcatctcgatatccgacgacctttccacatatggtagtgcatgtcctgaccagaccggctgagaccacaccgaacctgcctcacacaccgtcggcttggaaatcaacctgcctacgtccccatccgccctttcctccactacttggatatcagtcccgtcggtgaatatcgttttcgaagatgtgtgccctaaagcaccttgagattttagccgggcgacggagaatggggagaaatcaaggactcgggcagagatcccgacagagtgatcttcgtcttcttcgtgcgtcgtgttaaaatgtaggacggaatgaacgaagctgagatgatacacatacaaaacccaggaatcgggttgggctgaagacagaaagtaataccagaagcccgtcttgtcaatcttgaacgtcttagtctctccactgatagaacgacctgacgagacaacctcgacttacgaatacgatgaagcaacctcgctttagccgaccaatcctcccaagggtaatcaaccgggctcacagtctcatcatctacccaaccgtcatcgtcactcctcaattcgtccccaggagccaccgtctttagacttgcgctcccatccaaacgagtagagagattccgctcggcagctgcattctcgtgaattatgtgaagaggtggatgatgtcggagagctcgtaagatagttgattttagagtgaatagcgtatatctttcccctgtgttgtacagtaggtccaacctatacccaagaccaagaaacacaatcgtcaagtcagctaacccccgatacaacgagagaaaagaggatgacatacacaacaagtcgctcagctccatcggcctgaaacatgggcgtccgaccgggtccttcagaaaaaggagggacaacatctcccactgctggcgctgggtctagccggatggacattatttccggtggttgctccatttgaggaagttcaaatacggctagtcgtatcggctgtggcgcttctggattaggctcatttgccggtggttggtgagccgagttaaacgtctgcatgcaagtggaattgtcaatggatcagaaaaacgttgatctgaaagaaacgagagaatagagatagggagagatacacacgtagagttccatagaggcagcttcatcagacgtattgcacacagctgtcagaagaagatcaggcccgatgaaggctaccgattggatagaatcctcatttgaagttggtagactctgtatacacaagattggtcgtgatgagggaagccttcatcagcaaatcatccaaaaggcaccaagatatgcgagtggaagaacgacaaacttaccgagacaatcactcctgtcctccaattccaaatgaccgccccaccttgagctctatctctgaaccgagactgggcgtcaagcatgacgttcgagtccatcactgaaacaaacggactaacgcgaatgcgcgattctacgagagtgaacggccaatcgaccacatgttctttcgcttccggatgaggcgcgaaagaagttaggttgaagaaatgtaacctgtaggagagccttcgagggatcaacggccgaccattaaaggaaggcgtgtacacttgaataaggacgagaaggtcttgagaaggatccatggtgaaatccttgattgtccaacccggagaaaacattcgagaaaagacttctgtaggaccatcggttgaagggattttgtagaaccgaagagttctacaagggctctctaagccctttttaaatcatcgaaagaacaagtacctgtttgagcggtaacgttccatacgacaccatagagaacaccagagtcaatacagtagcccaggacgtacgatggcgaggacacctcctagatagtcgtaaagcgatccacgatctccattcagagcgacgacctcctgctttctagcaggcttgagtgacctccacctctggtttcgtcgtttcagtgctgccaacttgtcagctatagaagccacgatagcagtgccttccggatcatctgccgatgacgatgatgtgttcgaaattccgtccttcatgtgggtcacttgaagaaggaaagaatactgaatggctgtggattctttgaagagtgcatgtatggatttgcatgtatacgagatcgccaagagtgaggagagagggagagaagccagaatagtctctaggatctctaccgggagatcaaacagatttggcatggcctgatatagtcctgtgtatgtaaagaatgtatatcgacgggatagacgatgtgatcgtggggagaagttgtcgaacctgaatgtttattcgcctcggttatggtgtaacatgaaattatctttttccaaaggagattcttgactctaattggattttcaattatcagtcgacgattctgactctcatgtctggaaacaatctcttgcaaggattgcaatgttctagcaggaaagtataaaccatggctgcatatccaaagcgatcgcaagaggttttggtcaagacacaaagtgacaatcagggatgctcaatcttctcatttcccagtgatttcgaacaaactattttctatctgatcgtccaggtagggctctaaccttcttgccttgtcatctcaatgttatattcaacccttctgttatccattctgggtttcataccggttaacatatgtgggttttctcagggtgctactatcctttctccgcaacaggtctaggatgatcatgagtcatacaagggaaagcatgcgatagggtccaacaagccaacactcgaattgttcagaactgtacaacgccatcaacaggacacgtacgtaatgcacatagcggaaaagagtaagtaaacctcagctgatctaccaaccttgcctaataaagtaaagacagaaacgtactcggaggggagtgaagaaccatcggttctttccctgggtgtatcgctcctcaaggaccttcttgatgttcttcttggcatcctcccgctgggaaggctccttgaaggtctcaacggtgacggatcccttaagagcctcgaggtcaagagcgtatcgagtgggcataaggtgggtgtagttgtaagcctgattggaagaacacggaatggaataaggaaatattagcatgcgtgtcttttagggttgattatacaaactcttttacgcctagccagaacaattaaaatagagagaaacgtaccttgatgaagggcttgaccttggatcgtcgggagacccgcttggcacccatggacttgttgaccttcaaggggtatcgctcgataccggcaacgatagcgtgggggtaaggtcgctccttggttccatcatcgtactgcttgacgacgacgaccttcttaccggcctgtcgaccagagagaacgacggcaacctagtagtattgaataaggtcgggttcaaaagttgggcagacatagtggaacagagtgcaaatttcatgatgtagtagatgcgttggatttcgaggaaaatgagcgacatcgaaagcagttgcgttatgtgagttgtgagaaataggtgcatgagagtgtcaagatagaaaaaaggtagaaaacagtgagcgatccattcttcgtgcataatgacttttttaaggtcttcttagcaaacgtcgagataaaagagatgccactaacctttccgggcttgtaaactatagccatggatggaccaaagcaacccaaatcagcttcttctgttctttcctttcaatctattttctcaggttgtatgcgtggtcaagctcttcccgagtctcctcaacacgatccagcctgttcctggatgtcttcctaatccttttcttccggctactgttctgctcgacacgtccatttccagatccttctctcagacacaacttttccagccctaatcgtcaggaatcagatggaggataatcgataggtaggggaaacttttgcttttatcggagagaaaaaagggctttggaaggggtcgtttcgcgaaagagaaggggggacgtatatgatgctgttaaagatactgttctcacctgtaaagaaaggcaaaaaaggaacgaatcgttcacatcccagtcagatattccaccttgcccaacagcattaatacgagaaaaaaattcgagggctcacctttgaccatcttgagaattcgtatcaatcagtttccacaagagaaagaaaaaaattcccgacagcaaaagataaagaatagcgtaagcctttattctttttcgacccgaccgacgacgggcaggaaacgcgtatcatatcatcgcttcccatcctatgcaaagaaaccatgctgtatgaagaaacccaccttgaagacttagagacgacgaaaggttaggagctaggtctaccgtctgccaacagaactttcgttaacctggctgggtcgtcgatcggccgtggttacaggctaaaaagtcatatgacaatggaagcagaagtcaggacgcttattcgtaacctttcagggcttggttacgcgtcgcgtcgcgtctcctctctgtggtcgcttttgaacgtcttttactattccaggtttgggaagatgtgctgtatggttgaaccccggctatacaaatggatgcaaggtatccttggccgtattctatgtcgaactgtcctggtgacagcttcgaaattgtattcaagaaaactcaaggaagtcgtctctgtttgtttcgacaaggtacaaacagtctccatggatacattcaagtcttacctttaggtttcatctcaaagaagaaaagagaaagcacaagcgggagagattttataaaagaaagaaaaagacatcgagatcattcacacatacaccatcctcacagccgcctctgtgccactcttcccgcccaagcactttgaacggagaattgttcaagaaccaatttagagggcagaagctccagtaataatctgtttgtttgtttttggaggagaaaggggagaagaaaagaagagtgaaagatagacgtcagatccagcaatacttgccgtcaacgagtttgtcgagaacaaatcaaagatgaagatacttacatcgatactgtatgagaagagatggatcgacaaaagatgaccagatgctggtcagctacgaagcattgtgtcggatacgttgacaaactagggaaacattgaatacgtacagctcgttggtgataacggcctgtcgtcctctgttgtactgcatctgaagggaacccatcatatccttggcgttctagtagacccaaagaaagacccgcaagatgagacaaaacaaaacagttgtatgtcgttacaggagatacggggtgtgatgtgatgacaagcagaagcgttagaacagccgttggtcaaaagaagtatagataaaagtgtagtagggagaagagtcagtcgttaagttctattcacgctaatcaacctgcctcaacgacaggtgatgatgagagaaacgaaccttggaagcgttctccatagcggttcgtcgagcagaaatctcagcggcgtgtccctcaacgagagcagcgtagataccgttggcaagggcgaacttgacctggtcgtcagtgacctcctcttccatctcgtacttggtgaatccagctgatgggtcgtgtgttgtcgttatacagagaattcaggagcagatagggacgttgtgatacggagcatccaggatttaacccgatgatccacaataggtggtaaaagatatatgccaaataatcagatactcagactctttagcgcaggatactagacaaatatagactgacctccgtccttgagagccttctcagaaagaatcttgatggtttcagcctcgtaagcgatggcagagatgaacttgttgtagatgagatggatctatcgaagtggtatttacgagtaaggatacacaagcgcgtaagagacgagacggtcaattttgtacgtttatcttcatttcggcaaagaagagctatagcttgctttgtgggattgagaaaaaggatacgaacctcatcgaactcaatgccggcgttcaagatctcatcggcaacctgagaagcagtggcaaaggtggggatatcctttccaacagcagagaaggagagctcaagcttctcagggaaagctctggagagctgagccttgggtcggtcaccaagaacgacaatcttggcgtcagggttggcagcgacggccctcttggtggccttggtgatggacgagtggatacctccgcaaagaccagaatcagaagagatggcgacgagaagaacctttccaccctcagacttggcctcggcgttgttgaaaagctctgtcgagacccagtagatatgttcgtgagtcaagatgcaggaaggtatgaacaggctataagtaagctggctaagagacgaaccgttgttggcagctccatacttctgagcagttcccatagctcgagtagccttggcaagtcgagtggaggcgatgaccttcatggactgtgagatcgtgaagacagaacatacgcaaagggtagagaaaaggtcagagtcaggacggagagatggcgtaaagagcgatacgcgtggatatgtagtgaagatatctcaacaatccagcagagacagctcttcaatctgatctccattatatggcaccgcactcaacacccagtattttgaagccccttatcacgagctcgaaattatgaagattaagaaagcgattttgtcgaggatgccttcacagtaaaacgatcgacaaagagctaacaaccaatcacccctctccgacccttcttagcgccttcatttaccctcaatcacctcagactagggtgatgacagacacgagatgtcggctattcgcaaagcgatggtgttcaagaattttctttcgactgtgctcctaacgctttcctctccagcatgtgtagaacccttcgacatgaaaggagatccaagagggtttgctcacgttggtgatcttctcaatgttcttgacggacttcaatctaaacaggtaaaaatgagccgaaaacgaaaattaaagacgagaaacacacaattagtacatctgtctcctggatgagcatctcatctcaatccagaataggaaagagagagagaatgacgttaaacaaaaaaggaggaaggaaaaaaagagacgaaccgcatctcgatttctcgaagggtggccatgtttcggacctggacaggagccggtcgggcctgaacaaggttcttgacgaccggtcgaagggttcgggtagagaaagacatagctggacgtctattagagatcgaaagaggaatgaaggaggggatagatggaggtggagagaaagagaggagaaatgagaacagagtgaaaacgggaaacagagagagcggggtttcgtattttcaaataccttacatgaacttacttatgtatgctggtcgtctccactgatcgcccgtcatccattatatcccatcatcttgtatgtctactttgctcatcacccatcagtcccaggcatgtcctctagtccacctgtagtcggcgagttatgtccgactctgcctgtcgttcctcctacggaaacatcttcagagaccccgtccgaatctgctgccaatactgccatcactgctcccactaactcgactcctagaggaaagcctgcaacagtagaagacgcttccgactcagaggacgaaacaaaatttaattccaagcacgaggccagctcaaaatttccttcagtagagaagggtaaaggaaaggagaaggatgatgaagaaaccagtgctgtgaacaacgaagattggcaagccgtatggagtgctcctcaaaatggttagtctcgatatgtactctgaacgaggtctgtacaaggatatactcaatcgaaatttgatttatatgcaatagcgtactacttctacaacaccaaggtaacttcatctgtctcactcttttcttgaattcgccgagcagcgcaaggtctctacttttctttgaaagctcaacattcttctcaacacatttgtatggtgggccatttttgtaaataacagagttttgaaacaacctggataaatcctctggctccccctcctacctcggaacctccaaacggaggatcttctccgccctgggacccatcagctgagactcttcctggctcgggttccactcagcctcgatctgcccagccattcagttatggtagtgctcatcgccaacaatcccaatctggaatcgatccttccctcgctcatctcctccctggcggagggttcagcgcaaccgatccatctacctacacagcccaagcgagattcaacacacgtacaggtcggtatgaaactccggctgattcgagccgtgcaccagatcacctgtcggatcatagtaagatgaagagacagaacgacgcgttcttcgatacggaggcttgggaacgagaaaaggatgcggcatttgagagagaacaggctggcggaggaaagaggaaaaaacttacaaaatcggacgtggtgcgtcctctcctattcctttctttcgtgattacacgtttcgtcaacattacatcacctttctttatcggacctgatgatagctaatttcatcagtatattaactacaacgttcggcgatttcaacaggaacgattcaaagagaagaaagaagctaagaagaaacaaaagaacgcctggttacgaagctgaagtttctctcttagccatctcccttccagagaatgacctcacgtcccgcctcgacgtcagcgcgcgcgcgcatcttattttcctatgggacttcttccgatgggcacataatacctccatgtctatccgtttcgatctctccttcggttctgtatctcttcctctttggaagtagatatcataaatgtctgaaggcgtccttcatctacatcaatatacatgccttgcatagtgttgcaatcacttctatagatgaggacaggattacgtcttagttaactgtccttcgaggcgaaacagcaggatccggagaaacatggatatctagatgctaggtgcagacgatatagagcagaagagtgacaagccgaagaaggtgaaggaaaagaaagagaagaaacctgacgagtagagaatctctagtccataggaggaagccgatgcgtgatcggttggtcattgaaaaacggcgtggaaaaggtggtaatacagaggttaagcatgtatgttaggaaagacaaaggaggcgggatgcgattgtgaggatacttggacgagctaagatcgaagaatgcaagatatctattggtccaagaggaaatatcgatgattggaacaacgaaaggaggaagaacgaatatcgaataaactaaagaaaggctaggatagaagaagacagcgcagaacagagacatttctacttgacgacaaagcctgatgaagtgcgtgccttctccagtgacttcacgtacactttaaggctctgtagttccgatctggcctccgccaactgtctatcagatatcctcttcgccgcctctaacacataaacgtgttccacaatagtcttgttctctctcgaccggagaatctttgtctcggcgtaaagttgattgaactctgcattcaccttggcaagttgtcgttcggactggctcagtcggtcttggagagaaagtttctcagtcgaatgtcggagttgagcatcttcgagttggagacgaagttgttgctccttgtcggctcgtcgctggaactctgccatttgagcagcccagttggctttttcacgttcgatggagacgatcgcatcttcgtaatcctggttcttcttagttgctcgggagagttgtcgttccagtgtctagggcaagcatcgtgccgaatggtaaggcgttgagaatgagaacgcaggaattgagagaaagatgtagaaaattgacaaacctctttttctcgttgactgtctgccagagtggattctatcgtcccaactctagactgtagactggagaactctgccaccgccgtctttttcccgccctctgcttcttcagcctccttcaacgctctcgacaactgttccttctgagctttgaaagagtcttcgagctcggcatgcttcctcgttgtcagatctatatcccgcctggtagtctccaactccaaggtgagcttggcattcatctctgaagccaccctcgttccttgagcgagctcggtttctagcttggctacttcattccgaagcgatgatatttctaaatctttactctttgccgcctcggagtgtctagattcctcagaacccatcgtcgctcggagatcgtcaatctctcgttcaatcttgatcctagcctgggtctcacggagagcgatatctttctgatgagaggcatcctgtgatatactttgaagagaggcttgaagactgttgttggattctctgaacgattggcaggtagattccgtttttgataagtctgattggaattgagcaagttcggccgtctttgctttgagccggctttcgatagagcttgtgtgtgtcgcggcttgggcaagttgttctttcgcatgggtgatgtctcgctcgagatcagtgaccttgttctcttcggtcaatctatcgccaagataacgcaagggagattgggcagcgttaggaactagctctgaaaaggattgaataaacacaaaaaaacgcgcgcaaagaggaaggaatagatttaacgcaccttctcttgttctcctcttgaatctttgtcttcatctgagtctccaacgaatcatacctcgctttcgactttactaaatcctccagactcgcctttagattcctctcgatctctccgattttcgagtttgcttcatctctttccccttccaattcgtgaactctcgtcgaccgtcctcttacatcttctaaagctgaagcctctctttgcttcaaccgattcctctctgcttctagctcggtcatcgaggccaaaagcccctcatagtcttgtcggtactttgcagactgggtttcggaggccaattttgcgtcctgcgctcgttctaactgagtgatcaacgtatcaatgtctgccttgatgtcgtccgtctcttgctggagttgattgatggttcgttcgtggatggaagcctccgacaaccgaagtgttcgttctgcctcgagatcagcctggacgtctcgcttgtcagactctagctgaagtctcaacgtctgcagattgatccgttcggcttcctcccggtctgcacgttcttgggcaaacaaaagctcggcattcctacgttgaagttcttggtcagtcctcgtcgccgccaacaagggttgaacggttgtgaacagttgccaccagggccattctcgaagttccttgtgtaatctcgcgtttcgctggatcgtccgcaccgccgcgtcccggttaaggattttgaataatcgtcttctggcaatgaatcttctggcgttcgcttgaaactttgcaacgagctcaaacagatggccatccagacgttcttgaagatcagcaaggacgccaaccttgaagaatactttggtctttcctagtttgacaacggaagggtccaactcaagggaatcaatcatcgattgacaagcttgccttccatcgacgaaaccctgtttgaccgctcctggtgtcaaaagctcatatcgctgacggaactcggcgaaaggtaacctgttgggatatcctcttctagcgattcgaataccttcgagcacaccattgcatcggagttgatccaacactaacggtacgtcaatctttcctggttgtttgaatcgattgggtacaatacatcgaacgaaatgaggttgggtcgattccaattggttcatcagttttgtcaattgttcttgatgccgttgagctaccgttcggaaagcgcctgtcttgactcttctggctccaggcacggacgaatgatcatgagatgatatagttcctccaggtgtagatggatcttgaaattctgagaagagaccagccacgaatttgtttgtcgaactagccaggagggaggtgatgttcgagtttaatggatctttgttcttgtcgagccaaccggtggtacgatattcgaccttgccagcgtaatgttgcacagtgaatccttgatggaacctgatcgttccaaacttagatgctgtcgatggagatgaagaaggtgtagagttgtctaacgttgttgagccattggttccagatccagacccagagaccgctgacgaaggaggctgtttaggatcagacgaaggagcccaaagagtagtcaacttgttgaggaatgtaacgtcactggcttgtggcatgatacactcctcatccaaacaagagaatattccgataggttgtttgacagaaccctcgattaattcgatggttgattgtagatcgtgtccgaaatcaacatagtcccattcgatggcttcacgagcgtattcttcttgttcaagaacgaacatgtggtggttgaaaaactgtgagaagaagggaatttagacggattagtgaacatggactagtcaggggtgaaaggaatagaggcagagacacgactgacttgctgaagtttctcgttcgtataattgatgcaaagctgctcgaatgaatttgtctgatgaatagtacataatcataagccatgtaaggatgagcgttagtatgacgaagacttgacaaagagaaggaagagaaaatgaggaggaagaagaactcacctcaaagatctcgaaaccggcgatatccaatacaccgataaactctccgtgatcctttggtctatccaacgccaagttcactcgttcgactacttttccaaatgtcttttcgtagatcgtcttgcacaaactagcgagttcgtccactgtctgttgtttcgtcctagcctggacaacgatttctctaccagctttgactctcggtcgagtgaccgctttggaaaattcagacggaggtataccaagcaggtgacatgccttctcgagtgattctagagacgagatttgggcttgagatgttcgatcaccttgcaattggatattaccaatgtgtaggatagcggcaataattcggaacaggtctgcttgctctctatccggtgtgaaccctacaacgtccagcgcagtctgggaacacgaccaagacaggttaacctttcgtgtctgcgctttctgacagaatgctcagggacctgaactcactcttagtaatgtccattcttcgaaatcgttcactccgtcaatctggtgtctgctcttgttcaaatattcataactttccacgcgcccatccagcaacaggctctctattttatcgacgagaagaaatcgatgtacaagtcgaaatcggcgttcagtctgtattttcacacacgcgcgccgcacgcgaggagaaacaaagaaatgaacaaacctctcaacctagcgccttccgaactgctatccttacatccagcaaggagcatgtaaaacacgtggaaacttctttctccttcgctcctaaatgcaactcttgacttctctagtaggtaccagtccacgttcgctcctgcaatcgcgcccgacggcgcaaagaatattctcacaaactttccctataggccaatacatgtttcaattcacaagctcgtatgacaactcggggaagagaaaagaattctacgaacaaatctggacgaattgttgtttctcatcgtctgcgcgtttccaaatgcttctaaaattggattacattgcaagatctgttgttccaataaccctttggattctattgagccgttctcgtttccgttcccgttgatttggctggaactgaggctgtctttgctaactgttgaggctgaacgaagagaaatggattgttgaaggaaaggaggggccgagctggatggatgtggaacgagagatgaggtcgcaatggccgccaagtactggatcaccttcttcgtgttttccgtcttccctgcgccagattcacctcttaagatatatgattcaggcgcgaaaccaatgggttaacgtgagccatagggtcgaaaagcatgacggtacagaagaacttacgtgatcaggacactctgactctccctttcatccctcatgttgacccaagctcgttcggcgacggcaaatatatggggctcattgtcttcccttcgcctgtttctatacttgtcaatgtgcgcttgagaatatatcggtaacgacctgtacgggttcactgccaccaagaaaatgcctgatagagagaacagttttcgacacgttatggcgttggtctcgaatgagcgaaaaggcacacagagaggacaaagcacatggagatgactgactggagtaggtctatcgcacgagtgggcaaagaaaagggttatggtatgatcaggtttagttttccttagattttttgggaacagtcgaagcgacctctagctctccaaacaagagacagaagcgaacaataaggtaactcacgtagatttggccggacgaatagcgctgtctgaggttatggacgaccgaagcttcgttcagatacgtcagatccgcgatatccgacgcgttgtcgaatctgggtgggttcatgtccgagagctcagtattcggcatggtcaccgtctggttactttctgccaaagtaacgattgatcgatgttctgattctaattccttggatatccagccaccaaggtagccttccttgacgtctgggacccagacccatctgacaagaaagagaaggtgagggtttcaatcgcaaggtcagctcggagaacgacgtctgggcatgacaggactaggtaaggtgtaaaggatgctcacttcttagccgcctaaggaaagaggagtggatagacgttgttgaacaaaaggttaaacagatgttagctatcaagtgaagcacatgccgataggaggagaaccgacagagggatggatagaacggtctcacaaattctgcgtctctttccttcccgataggcatcgttcttgaggaaatagaggaaggagagaaaaggaagccacagagggataagtatatgtgatgtatttgttggactagactggggcaaaaacgaaaacagaccagagatggaagaagtcaacaaagaatgactggcagaggaaacagatcaatacaaggtgtattagggtttgtattggggatcgtgatagaatgcctaatacaaagcgtactagaaagcgtactacagattatcaaccaaatgtcccaaacactctactcgctcactcgaactgtgcagaaacaaatcaggccaagaaaaatcactcaacggacgcgtcgcgtcagagatcgcgacgcgtgttgattagtcatacataaccctaaccatcccagttgatctttccaccaccctacgctaccatatcgggtctcctgggcgacttacttcctctcctaggcaaccgtctctacgagaattctcatctagacttcaaccctgtttggttccctttgtcgtttccttcgttggagcgatgtccgacaacaacgacgcgctctctgttctgtctgccttggcatcccaggcatctcttcaaaaggctagtctgcccagttcgaatcattctcatcctcatccttcatcccagcaggacgtagggctccacctggatgagcaagatcatatcgttcatatcgggctcgacccggatggcatgcttctcatcccaaacatccattccgcagaagatgaccagctctcgatcacgcttggccttatggaaggtgcggatgattcgagtgttggccctggctcggaaaatggtgctgggcagacccacaaccatggtcatggtcacaacctacagtcctactccagacgaccggatcagaggagagcagagaatgaacagcagatgacagaaatggatcatgacccgattgatctctccaaacaactcatcggagagcaagaagggagtgaggagaacacactcgtcgatggttctgaacgtcagcaaggtgtacattcgggcaaaggaaaatctacacctagtacgtctctctcactatcgtgtacatatctggtcgtcacatccactgactcgcagaacgcgtctttgttcttctgttggaccgtgtttccctcatcatagacaaggacatgaacccattcgcgtacaaatggctaaatgaacactacactttctctaaacataccactatcgctaggacggccgtgtacgcgagttatacagccgccagtgaggaagcaggtgtaaaggttcgtctcgacattcttctttccttctctccatatgtaaacgcgagaatcttacctctttcctttgtcatggatatattgaaatagcctctcaatgcggcgacgtttggaaaatgcatcaagtcggtgtttaaagatgtcaagacgcgtcgacttgggactagaggccaatctaggtacaattgtatgttctcttttcactctttgtcatgctccttctggtacatccgatcactaacctcaaatctattgtttgattatcccttcggacatgctcgaacaaaagattgtggaattgcaccctcctccatcgaggaaacgacgcggctagcaagattcggcgaagtttccacctccgttccttcgacctccaatcctgtatctcattcgatgatcgcgtcgaccagtgcaagcacaagcatcaactctagaccaactctgatttcgaacgtcggccacttcaaaaaacgacggtcgtctagttcagctgtccacttgaatatcgtagaggacgatcatcttgaagacgataacgacggcgatgacggtgggatcgaaggagagtacgatgtcgaaggagacagtgtattttcttctttaaataaggggaagaagagaaacgtaaccgatatgacggaagatgaagttgatctggacggagagcgagatatggagggaataaccgagtcgaataggaaaaagtcaaagcggtcgacatcccttttcagtgatgagggcgaagctgccaatgctgcctctactactcgagaaggagaagaaggcgtacaacatgaagaagatgaagcgctgagatcactaagagaatgtatccctgctctgaggtcttcagcttcgtatgtctcctctcattcttctttcccccccaaatcttttactgatctttcatttgacggctctatcatccttctccccttgtagccctccattgaatccacagttcccgaactcccaaacaaacctgactgatgatcctccggtcccccatctatccgaccccgactctcactcacacccccttgatccgcctgatagactctcgagacttgcaatacttacctacgcgaaggactatattctatatataagagctgatatggagaagctgaggaaggaaaaaagcgaatgggaaagcttcgcgagaagtctagatggcggagaggaaagttggagagcttggcaacaacgacagaaaccaccacaaccgcaacatcagcagcggcaacaaccctccctcccgataccaaccccacttccaatttcactcccgcttccacttccatcggctcagccatcgtccgccgcttcaagaataccatctcgatccatcacccatgagctcagctcggacatacgttctatcaatccggttgggtcgttggagatctcttcgagcatccagcctttagatccatcagattttgaaccctcatcgatgcctatgagcggtcttcctcatcctcatgctcattctcatgaggacacacacgggcagatgaccgtagaagatgtgtacgacgctcaacaggttgtagagccgctagaacaaacctctgacgaccctcatcgccacgatgtcgatgtcgatgtcgatcatcaccacgatcatcatcaccatctaaacgatcaacaccatgatgcacaagctcatatcgaacatcacgatcatgggcatcatgaacttgaacaacatgaggttgaggttgagctggaacatcatcaccatcaccatcatcatcaccatcatcaccatgaagttgaaggtgaagcagaaatagaagaagaagtgcaggtcgaggcaggtattgaaggagaagagggagaagaaatagaccaccaccaccaccaacaacaacaacagcaacagcagcacgaagaagaaggtgatcactcagaggatgtcgatcatcacttattcgaacatcaaacgtccctcctcaacgaacaaatccagaacgaccaagctctaagggaacaactccaacggatgcagcaagaacaggatcatgatcaaagtcatgaacagcccgaggggtatcagaatggagaaggagatgtgtttgaggggtatgagcctctcggacaagatttggatcttggagttaatgttggtggatctcgtccaccaggttcgagcggaatcgtcggttctgaagaaacaggatcgagcgcgaccctcggaggtgtctccgaaccaggagaagtcgaaggaagcagagaagtcggagcaggtgcgagtggaactggggaaaccagtgtcgtcgggacgacagttgtgggcgtaggtgtagaaccatcaggcggacagactgaacaagaagtgatcgacccttcatcagctgcagctttcactctagcttcccttcatccgtctttgtcagatccggataggtttcatcacacgcatgaagaagaaggagaagaagaagctcatcatcttgcgcatgctcatttactcgttagtgggttggacgaagaagtaggcacaggctcaggctccctacccggtcatcttcacgatcaccatcaacacttgcaacatcatcagcatcaccagcaggtagaggacgaagaggaacacgtccggcggatcaaaaagatcgaagaagccagagcgaagaacagagagaagcagaggttgtacagagaaagacagaagttgaagatggaagagttggaaagaacgatcagagaccttgcagcaacagctggcggaggtggaagtgggagcggaggtgggagtggaagtggagaggtcaacgaatcagttggattgaatttagatcaggatccgagtccggactctaactaagagcagctctgactggttatcgatctaggggttctgtgtgacacatataagtgtataagctcctttgggggttcctttcttttccctgtgtaattctagtgtctgtatttaaagatatcgaatagttgtatgcttcgtgaatataattcggtttttgtcttctaatcatatatatatatttaatcgaagatgaactctctttccctcagctattcctagccagataagacagagaaggcgttaggatggctgtaagagattttaccttaaccaaaccccccggtctcttttctcaagagggatatccatctgataaaccacacttgccagaccccaagcctgagatccgactctagtaccacctattgcgtccagaatgtttcttccattctcttctctctcgagattctcaacctcggcgggaagtgggttgagtgggtcgaatggggtaaatgatgggtacggagaaagtcgggttatcgccgcttgagtggattgagttgatgatagtactgataggtgggtgattgaatagagttaagaatatcatcagcgggcttgaaatggttaagaacgaacgggtgggaaaggcataaagagacgaaccatgcggaagatgggtatgtgggtcatagacaccaaatggttcgctttcttgccactttctcttttttgccaatcgatctgcgtcttccccctcttcgatcggttcaaccggcacttgttccttctttttcatatcgtgaagcccaatcccacctctccatgccatctcgactctctctagcctgtccattctcgccttagttaacgacctattcacctcgactgcatttcttgccacgctctccatccaattctctggtgtccaaccttcctctctcaatctaactctcgatcggtttcctgccgttctccgaccggcttgttcaaaaggaggaagtccgtctgaagaagggaaatgtgtggtcggtcctccaagagggtaaaacggctgaaactttgtagatgataagtcgtctgtcgattgaggatgggatttgtcgacttgagcggagacaaatgggtcaggaagttcgcctaggagactattgggttctatttgaagggaaagacactcggccagcgctttttcctcgtaataatcgtcggtgacccatctagaatctggagagagaacaagtgtcaggagatctgtcaatggaaaagcaagaaaagagggaaacaaacaagaaagacaaactcttaatcattttcgcgccctgcaacttgaaacagttgcggacggctatcatcgttacgcttctcgttcggaatcgttcgttgagttttccgttatcgatcaaatgctccttttcatcacccgcgagtgtaagcttgacgagctccttgttgtttcggaagaaatagagcgagtccttaaatccacaggtccgggcagcatcaatcgagagaactgttggcccaaagataagaagcaagcacaaaagatcatacgaagcgtgaaagaaggttgagtgtttcgtgattcatggagaggaggttgaatgccggagtacataaaatgaagaccaaaatactaaactgtataacttgttgggattcgacctgaaggagcttgtaaatgtcatagacttatactcccggcctttgatagacaaatgagtatcagagaacagacaggaatacccagacaaaaggcgcaaatcatcaatgttcatacccaaaaggaattgggacgcggtttaggtagagttctcgggacacacctcctagtagctgaccgagtgtatcaatcttggtatctcccttaggatcatccggaaggaccaactcatcttcttcaatcacataagtcttgtcaccgatcacccttgtcgctgggctagagtcggactgcaaacgggagacggacgaacggacggacgtacagatgagtcacgcacgtacacagaaaggaagacaggtcagtcttctttaactgtccaggtgtttcgagccgctatcatgtaaactaacctcattatctgaaccactgcctccttcttcaccggctcctcctgcgccccgtctaccagatccgatagacgctcttcctcttcctctaccccttcctcttcctctgcctctacctctgcctcgtcctctgggcgtacccctccctcctccgctaggtgtttgagcagcgggagatcctccatgagaccctccaagagtcaaccttagcgaccttgtccttcttgaacgaccatccaacctgccacctggtgagcttgtctggttatcttccgagtcgttgccatcgtcatcatcgtcttcgtcgtctggcctatcgttgtcgccttcgttatcttctgactcgttcaacgacgatgaagggggcggtggtggcggtcgaccgtttctccaacctttaggaggcatgcttaaagatctataagagagctcaagagaagaaagatgatggattgatggtagtttggtccaaacgggacaaaggacgcgtccgttgcgtgaagttgcataaagcgcgcgcgtcaaaggaattcatcaaaacctcttggaacgcataagccccaacatccgcataactttttctttttggccgactcaaacgagaacggcttcgtctgaaagcaacctttctctccctgtcctttgcttgtccctctattgtctctctggtcaagagcatcaaggaaagcctagcctggacatagagagaagaaagagagggaagaaaaatatacatcagatactcattcagccggtcatgtcgtccacctctctagaggctcagctgcacaagtatgcaatgagcttacccaaccacgtacgttgctttccttggttctgtcgatttgtgctggctcacttggttgtctcattggatccataggagaagaggagatatactaactggagtctatcttattttgttcgttacacctcctgatcccataccgatgcatccctcatacactacaggctatgggtcagaacgatttgaccactcaattccctaacgtcgccctatcagaacttactctggctatcaataaacttagcaaaaaggtttgcgctctcttctgtctttttgtggtgtctcggtctagctcttttggaactgactgtcgcgttgtaattgttctatctatactactcgatccgccgcagaatttggttcgaacgttggatctgggtagagctggaattaaatggcaagccatcagcaaaggagaagccaaaaagtaggtgatcctctcattgtagtttttccaaagacgagcgttggctcacatcacagcgattctctcgtgctgcccttactcttctataagattggcggcactagacgatgacgaagggatggtgtacaaggtcatcgagagcgctggaaacgagggtgggtctactacacttcattccctcttgaggaaataggcaagaccgaacggcttttctgaccacttggccctctctctgtatatatacatacatcttctcaggtatatggactcgacacatcaaaaaccagacaaaccttcacttgacgatcatcaataaggtccttaaatcactaaagtctaggaatgagatcaaatcggtcaaatcggtcaaagttcgttcatttcccatcttctcagccacgcttggtaccgtttggcttccttgtaatctgaccgatctatctcgcaaaaaaaaaacacaaacagcatccgacactgaaactttacatgctctacaacttgacgccctcggtcgaactaacgggcgggccttggttcaccgataatgagctcgatactgaattcatcaaacaactccttcaagctgtcctctcctttattcgacaacgggttagtctctctcatacgtcttgagttcttctctcttgatcgcaaggaatcatttgtgactgatccacaccaccttctctcctcgtcacctctccctcagtcgtttcccagagtgaaaggatacatgaacgcgctctttccgccgacgcatacatcctcgtacccaactgctcttcagatctgtacatggatcaagaaagccggtatctcatcgacggagctagacgtctcccacattcgagtcttgctcgaggttctcgagttcgatggtgagattcaagctcttcctgggcagatgggacagtccttcgggatggatactggggtgatggactttgaatctgccaggcttgggtctgggtcggttgggaggaaatcaaaaaggatgaaggaagatgaagataagaagagaaggaagaaggggaagaatggtaggagaagagacaggagcgatgatagtgagagcgattcggacgattcggaagataccgacgattcggacgatgaggagagacggcgaaagaggcgaaagagagaaaaggagagaaagatcgagagagaaaggaggaagagagaggagaggaagaagagaaaggcgaggaggaagaggaaggcaggggcagatctattcgatagtgaagatagcgagagcgagagcgaaagtggaagtgaaatggacgagaagaccaagtcaaagtaggtttctcttctcagatcaaccctttcatcggttcaaaactattgattcgtcagctaaacatcctcttcttcaacgacttgtccacaaaacgcctactagatcaaagacctcaaagtctaaatccaaaaagaagtccaaaaagtcccgtcagcaatcatccgactctgagagcgacccttcctctgacgatgactcttcgctcgactccggatctgactctgattctgctggctcatcttcatctggttccacctcttcttcgtcttccgacaagcgatccaagttatcgactaaacgatctaaacgagcaagcgccgccgatgtcggtgcatttgtctctttgtccgctgctgcttcagacgacgatatctccgactcggatgcgtcggcctcagagtccaagagaaaatcaaaacaaaaaaagaaggagaaactcaaagggagcaaaccttcggccggtaggaaagtaaagagaatcgaagttggcgtggaatccgaggagaacgattccgaggaggatgagaagaccaagtctgggaaagggaaacggagagtgaaggaagaggatgaggtgatggaggatgatagagacaggacaaagaaggacaacagagcatatggagatgatctcaaggtgtcgacttttggatcgttcgagaacggagatgatgctttagtctatcgagcaggtatgttgtttctctttttctcttctttcttctgctcttcctctcccactttagatcaacagctgaggtcctgatgacctgttgaaaataaacgcggtttggatagtccggccggagaaagtctccttagggtggacagaagcaccatgtggacgttgtccgctctttatgttctgtaaagaaggaggacctgttgagcctgacggctgtgtctgttcgttttactttctgcttctttcctcttccctttccttccgttgaattgacaagaagaaaaacctttggctttgggttggttccgtccagattacgatacgtggctggaccaaactatgggcgctctacagatataaatccttggctgtcccatcatgggtcgtagaaatatcatggcatgcagcataggtcgatcggaggacaggactagaagggagagagaaagagaaagaagagggaaatataggattccttcttctttccttttctctcctcaagcgtagccttctttcatacacatctttcattcctgaattgtctcttcgatccattcctgtttctcatatatccatacgttctctttcatcctttcaatcaatatgtcgctatccatccatcccctcatcgcttatcacctatcattacccatcatgacttgcacttttctgttgccgtatccaacattgcctttgtcgcagcttaaaacaagactgaccatctgacgggagaggagaaaacaagatatcttttcagccaagccagaaaacaattcaagtcctatgtgtgtatgtgtgtatatgccatccatcaagtgtctttcttgatacctgtcgagctagaggtagagcccacagggacgatcggatctttccattcggcctgttccgcgttcacgtggtgaaataagagaaagagagagaaagcaaactccaaacatgagcgccgagactgactgaggtacggttactatagagaggagaggagacagaaggcggaaacttacccagactcttgtagacttggaaccatctgtgctgttcacgatctcctcctttgtccaatccacagaaggcgcgttgacccattgacccaacctgtccatcatctctacatcaacgttgtaagctttcgcgaggtcttctacctcctcttccgtccgtgccaaaagtcgacgttcgagtagctgtagtagatctggagcttctagccggttatgataatctggggaagacggggacggggtgaaatgagaaccagtggggaaagagatcggatcgagtgtccggttctgaaggacagataccgatgggttgatctagagattgatatacgtgcaggcgcgcaagacacagagagtgaggaagcagaattgagatatacatcgcagggaacgagctcggaagaaagaaagaaagaaagaaagaaagaggaacgaacggctcctcggcgatctcgaaggtcgggaatgacgacctgacctagactagctaaactgttcaagaactgtagatcttttcctccatcgcgttcgatttctgtttgtatgtcatcaaacacaaagaagagagatcgagtcggaagaaggtaggtgatgcagacagaagataagaagatgagcctcgatcgaaaagagttaaggagaacgatcggatcgagaggtgatcccaaaggaaagactggaagcggaaagcaaagacgtcgaagaaagagatatagacgaaccatccgtcctagaggcagacgcaaacagcttttgaccactcgatgattcacccacagccgacgatgatgatccatccactgacgacgaaccctttggtcgagctggttctttcgaagggaacgagcttggcgcggcttggtagggaatagattgtttgatggcctctggagctctcgtcgggaattttttcagaggcacttccttagctatctttgatgactttgatcccattatgtgagtgagtgagtgtatgatgggtgttgagtcgaggatggtacgtgacgaaggcaagggattgctgatggtgaggatgattggtttccttcgtggggctccgagattcgatttgaccagcgactttcttttctctttctctttctctcttaccttcctcttacttcttttggttcgaacgaatgacaagctaatcattaatcataaacaagtgtgtccgactaacaactcgtccgtgtctatgcctgtgtctgtactttattgacattgactctttgcagaagaagaagaagaagaagaagaagaatttctgtctgaattggatgaacattgagagatcatgtccgtcgagatagactacgccttgcttgcttccgatccggtgttgacatccagcttggtttctgctctgaacaaatcgcttgccggtgtggccttaccctcgtttctcggtcctatcagcgtgacatcgttcgactttgggacggaaggaccggacgtcgagattgtcgggttgacggatgtctaccaagagtttcttgacatagaggatgaagaggaggaagaggatgaaggcgacgatatactagggtctgatgagtacaaacagaccagtccccatcaagaaagacgatacagtgaggatggagggatggaacgggatgaatcgatggtagaaccagcagatttatcctctccggaggagaacccccgatggacgacgtcggcaccgaacgggaccggtggtgggaatagtttggccacaccaagctatgagatgaatcgacggatgagtcaacagagctcatacttttatcaagcacctgcgagcgaggcaggttctgccaggacgtccggcacggcgatgtcatcccggacgacgacgtcgacgatacctcattcgatcatcggccggaccccgttgtacaactcgagtccattcacgtcgagagtcggattggggtcaatgtatagtccttccggtagtctgttcttgagtcgaacgacatcgagagctccttcacctgtgcggacgatcgataccggactctcaacgtcgaccaagtcgtctgaacgagaggtgaagggtgctcacgacactctctcgacgatctctccgtcaatcgatccatcgaatgagactcgatcgggtccgatgggccctgtaccgacgcctgaatcgtcttcttcctctaccggtccacccgacttgcagcttcatcttcggatccgtcattcggcagatataagactttcactctcgactagtctattgattaaccatccctcgccgggtttcatgtctttgcccttggcattaacagtgactcggatggatctcgaccttcatctcgtcgttgccttccaggcgacccatcctcccgtccaccgacgaacttctcgcggtgatcctgagggagcaggtagcgagaatgtgaacgaaggtaccggtggcgaggccaacgtcagtggaagaaggattcatgtgtccatcttggatgaacttgatccttacggaccaagagtaccgggcgagaccgtccaacgggatgtccctcatctgggcgagtccaagccggtacctgtgggggagcgaatcatcggccggatggagatccagtcttcgattgggcaggaaggcgagcatgtactaagaaacgtagcaaaagttgagcggttcgtgctggagctgctccgacagacgatcgtggatgagtgtgagtggagaggacaattttctgcgcgatcttctttgacacagtgtgtgtatgtgtgtgagtgggtgataaagacggcatgctcatctagtgttttctcatctttgtgcttgtgtgtgtatctgtgtgcgcacagtggtcttcccgtcttgtcatacgttcatcatatagagactgttgactaggtcaaacacaagacgtgcacacgtagtcctcgcaaagaagagagtgtgttccaggcaagatcatgtacccaacagaacgagatgagcagagatgagcagagacgagaccactacgattccccctgtggtcttctgccctttgcccttctgcccaccattgtccctttacagtggccgttctacactcacactcttatccttactctcacctgctcgttcctattctttctctaactacatacaccatgatacatacacacgtacatacacacactcacacacccacccatacatacacaccgctggatcgcctgcgggcggctgtcccgcggttctaattatagacggtgtttttgggtttttttaatctttttttgcctcctcttttttacctgcttcctctttctcttctctcttctctcttctcaacacccatctccctcgttctccctctctttcttcttctctttctctttctctcagttcctcttactctctctctctctattctaatcgatcccagcgtgagtgtttcgtgggtttcgctcatcccgttcgctcacaattcgatgttgaacttacacctctttgtgttctctctctctagatgtctgccgctcttcttcttcctcttctcgccctcgctccggccgcttacgctcaggttaccgctactggtatgtgttcttctacgatgccacgctctagagaccatgagcgagcgatccgttccggtatacagatcacacccaacagtacaatcgggtggtcgtatacgcgccggtgtgtagttatgcatgggcgtatcgttgaatcggcgactgacttcatatccatcctccgatctcgccaccttttgtctttcttttctctcgttggatctatataggtacccagggtgtgaccaaccctgctaccgctacgttcgtttctccattcttatctcccttctgctctggatgaccatcgtcgtttctgacgcactcgaatcgtatttcacacttctctcttccc

SEQ ID NO: 2172 - DNA, 2238 bp, Xanthophyllomyces dendrorhous
tccccccccccccccaaacattactaaaaataaatcaccgcacttgaaaaaaaaacaacaacaataaacattcacgaaaacaaaacagccttggagtgtacaaccagacatcctactccaggttgctcagtgtcaactcggttgatgacttctgtatcttctcgcccccagtcgctggtgataccatcggtgataccgaggaggaggaggtcgcttggtgcaccagtgagtctttctctatccttcaactctaatctaacattcctctgatcactcaatgttctctttccctctctccctccttttcagagccccgaaacaacgctcgagttatccctgagtatggtcctttttgcgtttagatcgtcttggttcatatgttcttaccaacacgggttccatctcattttgaactttcagcggaacgatcaccgccgctcacttcgtaaagacccctttgtacgttcagatcaccggattcggtgacctcactaagctcaacgtcctctcgggcgatgagggaggagagcttgatccccatggttccaccggactcggtaaccccgtcggaggaaacgtcacctcggacgtcagcggagccgacgttccctaccaggagtggatgaactacgttgcgtataattctttctgtatccgaatctgtaccgctgagaactcgacctactcggccgccgtcatgtgcgagcacaccttcgatctgatgggttgtgagtgggtcatgcccggtgattacgaccaggaaggattcacctcgtgtgacggtgattccgcctaccctcccggagtctaccccgtcggaagcgccgggtccggtaccacctcgacctttgcccagcgatacaccggaacttacagtgattcatacaccaccgacacctggaccatcggttacaccgtcaccccccagactccttacatgacccctgcctcttcgaactgttttacctacagcactatcagcaatggaatcgcctcgcttaccgctggtaccgtctctgttgccacctctgccgccaccgtctctagcggagcggtcgccgccgtcagcagtgccgccgcgtcctcttccggatctgcctcccaggccgccatcacctcttccgccgccgccggatcttcctcaatgaagacatcggctgccgccaagtcctcggccacggccgtcgcttcggctgctgcctccaaggccacctctgctgcctctgccgcctctgccgctgccacgagcgttgctgcctctaacgccttcaggtcgtccgccgcggacttcaccctttggggatccatcatgaccctcggagctgtcgttttgggagctggtaccgtcatgatttaaacagaagattgggctttcgcacacgttgcgagaaagtaagatgtttgatccagaggaggaactggagaaagcaccagtttggacgttatacccttcctcttctttttgtagccctcgtgattacctttggaactttctcgatagctgtttttctttaccttcgccctcgctcaatcttttctgtccttcttgcctctctgtttcttcctttacatatctttttctcaaatggacaatcgggatcgatcggattcaatcagtgcacacgaaactcacttatatcatccattgccaactacaccacgctcctttccttttctctttcttcttttctgttctttttccaacccagcttttctcgcacaacctcgtctggacgaaccgtcgtgcccgtttaggttcacttgcagatacagagagaaaagtgatgacccttctttgcctttgcctttgcctcctggttctttgttctggattcgatcttccagcgacaagacaggaccaatccatcactgctgacgaaatctgaactgagaatgaaagacaaaacaagaaacaaagaaaagtatcaacatcctctgggtagagagtcccatcctgccacctgtacgaagcatgttagttcaaatggaatgaagaaaaaggcagcgaatagcagagaatacattgatagatacattttattaccaataaaactcataaaaacaaacaaataaaacgaaacaaaacaagaacgaatatagataacagttctctctagtagaatgggaggagtaagaatagaagagtaagggttcgtactaaatgcgatatacaagacgaaggcctagacttgaaaactcaacttcagatcaagtctcttgctttttgggggggggggg

SEQ ID NO: 2173 - DNA, 7301 bp, Xanthophyllomyces dendrorhous
gggggggggggggaacctactccgttctatgacctcttcctcccttttcccatctatcccctaaagtcgtttcatctttcagtctaatggtcaaatcttgtttggattttttcttactcttgtacagctatgggaatgagtctaatttttctaatcgccgtcttgctagagatgacaccgaagggtcttggcctatacttcgtcgtcgtcgtcatgatgatgggtcgatcgggtcgttcggttgaaaaacgtggatgatccaaagagagcgcgagtcaactctgtcaactatgatttcccacagaaaacgggataaaaaagaggggagttcatttatttttatttttatttttattgttcaaaatacatgttagatgggtagtccggaacaaacaaagcggaaagtagtgggagagagaaaggagagagaaaggggcgcagaaacaaaaggaagagggacatacgtcttccatcactttcgtagtttcctccaaagcttccgcctctgcaaatgcatacagaaataccatatccttatgaagtctcgctctctcctcgaaacttctgcccaccgacagatcgcctgtcgaatctcccaggtatgattgacccgccgacgtcgatgattcggaagacgtcgaagtcgaccgacgaccaggatgaggtgaaatcaaccctttgatcacctcgtcttcccatgttcgcacagctcggcctggcgagggaaggaactgaggaagaggaagcctagatcgaaaggcatgagaacatgcatataggtgaatcatcaccgaggagatctgtatcgtttttgttcgttgttttaggcgcacataggtaggaagacgatatcagatgaatggtcgagtattgtctgagaaaccaagataacctgtgtccttacgagttctttccgttctggaagttcacaaagagagagatatgtcatgttagcgtgtcagcaaggcctagaaagagacatctcaagcgaggaagaccagatttacgttcaaggaccacatgcacagtttgttcttcaaaacagagagaacgtatgaagatatatatatcatcagccaaacgagaggacagaatcaaagttataagggtcagggcgcacctctaggaatctcttgacgaatgatcgacagcgcgatgaacagatcgctcaaacttctggcggcaacaatagtctgtctatatgctctcaacggctactccgagatcaaccagccggttaatctatcaaaattacatcccgagactagaggaggaagaaagaacgaaaaaaagaaggaagaacttactttatgaataagagtaatttctaactttagcgtgtttaaataagaagagcttttcatcaaattcgtctccactctctgttgaagtctctcaaaagccaaggtgtcgaatgagtatggaccctgctggatcaacgatcgactcatcgccagatacatctttgtcagatcgtccagcacctgagccattgtcccgaggaaaagtcgtttagatcgcgcaggaaagataaattctgtgacgagcacagcagcgacgattcttctcaaatgaaattcgaataggataagatcaacacggtggagccgagtagaagacacccgtcaagaggatagaaagacaacagactaacccaatgcagaccgtgactgttcttttccatgcgagctcaacgacatcttctgtggaaagcctgagataggggatgaacaagaccggaggaacagtgatagatctagattgcgattgcagttataaatcatcaccaggtaaagcatggcccaaatcagaatccaacaccgtgaacacgagacccttcaaatatctccgttggatgactgaataaaggactaacaagacgacaccaactcctggaaaagtggtgtacatgatgacgtagcccgccagagcgctatctcagcaaatagatgagccgtcagatacctatgattttaccaatcctctttcttctccatatgcaagatagaatagattgttgtaatgactcacccatagcaactcgtaaggctgatcaatgcataagggttgtcatgcgcaataagccaaatgatccccgccaagatcgctcctgagactgttcccatcactctgaacgttcccaccctccaggtttgaccactggtaacatctagaacaaaaagatacgagatcgggatccattgacctcggatatccgtgaaccaaatccgtccatgggaagatggaggtaagaaagctggcagagtcagaagtgtaaaccctaagccaagtttgatgctatatgtgaagttgtgttttcgagcgtggagagcttgaacaaagcgcgcaagagtcaaacggacttcaaaccgcacagaaccaacgaagatattcagacatcgaaagaacatgtacacatagtaactcgaagagccctaactcacaactcagaacgcaatgagaatcccacaagacaagaaacgttccatagaaccattttaacggacttctactaaaccgacgggcccgacgagcggggggaggagtcaaaaacacctcggcgatcgacgcctgaatatcttgtcgggaacggtccacatgctgagaaccatcttcgtctgttgacagaatcatacaaacaggttatagacgatattatacatgagatgatttgcgatcggaaccaaatgaggattaaaaaagagaggcgaaccatcttcttgatcttgatcctgagcggtctcgtcccattttgcactgagcgaactagatcctaaccaagctcgcgtgagagtgggcatccttatagttgccttaaccgaagtatgagcacggagagcagcggccgattccagtgcactatccaatgtccgagacacctgtttatcaaaacagtatatggaagagatgaacaagaaccagaagaggatgtcagatgatagttcaaagaagtttctcaactcgagtcggtgtataaaggaaaccacgaacagcaaggatcttgtacatgaacagcgagatccgaagcagatttctgtccaacctgtgcgcctttcttgacacaccttgtctgcttcgacctatcctcgatgcatcttcccacgcatcgactgctttatctaactctttatccatcgcaagaataaatcttcctctggctagtctgagttcttccctagcttgtttcaaatcttctccagcccttccatccaagacatgatggagcgcggcaaagaccttgattaaattcttcgcgaactgcctggtaggttcctcgaacggagctctctgtgaagcatttctagcagcacgttcgtttccagaatgtccgtccaattgtcgatcgtgccgctcgacttgggaagaacctgaagcaagatcctgcttcagtcggcggatagaagtggtgaatggattgagtcgatggatagagaaccgggtatatgaaatctcatacgatgcttgggcgaatgcttgtggtagagaagatgattgtgtctgaagctggctcttgagtttggagagtttcgtcagatgggcgggcggtgtctgctcaggaagataggaaagaaagaacgtgtcgatactggcaagaagaagctcttcggacgtccggaatgcctgttggaccaacccaacacatttactgacggaagtcctgggaaaggctatcgtagctataaaggaagccaagcaggcaaacaaagttgggtacagcagttcaagcgggacactagccggtaactgttaggaaggatagagagttgcaaaatgctcagtctacgacagcattctctaagaacaacgcgttgcaaaatatatatatggtgtgtttgagagagagagagtacatacattcacacgatctaactctgtagtcagcagccagactgagtggaataaagagattctagcgaaggatgtcaaacgaggagagtgactcctgatataaccacctaattgttacatagggcaccaagagcaagcatccacagatcagcccggccgaaatcaaggatcgaaagcaagaagagagagaaaaaatactcacagacacaactctggattgctataaagaatgaagcaacaatccggctctgatttgactcggctccgccgttctggcggttgagagaagcaatgatacctatccctacacaagcccagcctagaccggcgcaacctcctaccaaaccgaggactaagccgaatggtaaacacgttggttcaggtcttgctctgaaaaacaaacttatatattctcgaatagaatagggtgatactaagccactcactgctactttctatctgacctccgacggtgagacccggaaagaagaagagtacatcgatcgtcagcactaaaaacgcgtagggtcctccgagagcggccaccgggcggatgacgattgtaagacagcagaggaaagtagcaaggataggtggacagaggcttttagtggtggttccaagtctgttgaagagcaagggcagcctcatggcctctatagtaccaagcaccttgggggagcaagtaaaggagggtaaggattggaggagggtatctgaagtgaaaagttcgaagtttgtgcaacaacacccgcggcaatggaacgtcagcattccttcaggtttcttattttgagctttcctcttccttctatgcttcctccctgtgtaacatccctccttcattcattcattcattcattctgtttctgttgtttacatagtagatcttatagcgtttcatacatattagttttccttccatctgccgaaaaatccatgccaaacctatagcacgcatgatggagaattcaagagtcaggacaaagtatctttgactgaaagtaacaagagaatcaatcttacagaatcttgttgtcccgtagtatattcagatatatccgcttggaagcttcttgaaggtaagattaacacatcccctacacgtattgggtgtttatttcctgacagttgtcttggagtaaccccataccttgcaaacaaatatctatccatttcattgacagagtgaaagtgacgatgacatgacacaagaaagtcaggcttgatcttacacgggtgaaactatgaatgggcgcacctgaagacacaatccgacaagagagcaggacccgtccactccagaatatccggaaacggcacgtccttcccaccatttttcgaggctgccagagctttccgatatttagtcgaagttcgaagagctgatgagacagcatctaccatgatctatttcacccatcgacatgaagagataaaagcaccagtggtgttggttattcttctcttcaaggtaacttttcaggaagaaagaaagggacatacaggatgaccgggcgcggctgccaacgtccactggacgatttggagccctcttccgaaagtcaatgctctccaattagagtccgattggagagagtcatgctcgattgaaacgactaatgaaggtggaggcaacacagtaggtttcatgttcacagagaccttgctgggtttatcaccatttgggttccatagacttgctagtttaggaacgactcgaaatattccggctgtcttatcttccatatctgttttaccccattcttctataggtcgaacacaagccgtgtcgatatccgtctgagagaaccatgccgacaataacgcaccgtccaatcagtaggatggtcatcgagcgctccagacagagaaaaatatcataaagcacgtacatagactcctcccctgtagagcaacactagatatctaaacaagtccgccttgacagctccgattcgtttttcatctgatacatgagtggtgagaaacctccattcactgagcaaagtatccccaaacgtactctctgcccaagtgttcaacgcgtcatcactcagaaaccggatgtcccaagaaggattgacagttttccatcctttgaactgatctggtagtcgagtgtcgtaggatgtcgtgtatatctgtttgaggagcgcatctggttcagggattcgatcaagatacagatgttgatccatcagagacgaccagtaaggcatctttgtacttgatatggttcctgaaggcagagaaggcaaagcttctgttgtcggtgcagtcgttgttgccattgatggaggagaaagattctcgtggaggaagaactcttttaaagacttttgaatacgtcgtctgtatccttccaggttcagatcatccccagattccccaagtttaatcccaagctgctccctgtcctcctcccaactcccctgggatagataaggtctttgaagagcttcgagttctttttgtacgacgttgatcaactcgcttacagaaaccgaaggttccctgtcgcccgcggacggtagtatcgatatcaacggcaacgaagaggaggagctagagataggagagatgtgtagttgatgatagaagacgtaagctaccgtcaggaagcacaagacgacgatcactacgcgtcgacggaagaaacttggtgcgggcaaagcggacgtgagcgagggtgtacgcgaatgaacgaccatatgtgattatccacagatttcacgagattcgcgtgtctgaaaggaaaagaaagaaaggatggaggaaagagatgaatcaaggagaagatgtctgggtatgactgtgtgcagaaaggacgatgaacatgctggctgaacagaccaggtgtgcttctgggatgcgtttgatcccagagagaattgcggggaagcctcgcaggacgttgtatttatttttatatcggctgtgtattttcatttgtttattgattttttttaaaaaaacattcgagctttcatctttcttctatgtaccatcgctcaatcttctcgcaacacatatatcaacaaaagacgagagtccattgattcataaaacagaactcataagacaacagatgcaagatgagagccgaaaagtagtatcaggccacactcatgagaatagaacgttcttgatttgaacaatatccatcatcgacctccgttctgtccataagagtactgctgctgatgctgctggtacggagatgggtatcctggctgtccatagggcgaaggcgccggaggagggtcaggtgaagacgaggccgggtgttgctgctgctgctgcgcactcgatggtggtgcatagccataaaatgagctattgccggtcgacgactgtctaggaggagcaggtggggccgggtatacatgttgaggggcatatgaagctgaagaagcagattggtaggagctagaggtaggaggaggggg

SEQ ID NO: 2174 - DNA, 19644 bp, Xanthophyllomyces dendrorhous
ggaggagggggaaggggaggagggtaggcttgttgatgagcttggtgttgatacagttgtgccggcggagcaggctgacttggcccaccataattggagtaagtcgactgatggggactgtaagacgaggtcgaggaaggaggagcaggaggagattggtaagagctgtgagcagtaggagctgacgaaggagcagaatgaagtgtcggcactgtgctagggtgagagttgaaggcggatgatagaccattcgctccaaagtcccacgggtcaggcttttgagaaagcggtggcggcggcggagggattgttgagctcgcgaaggatgaagacaggttagagggagggggaggataaggagatgtcggagctggagaggttggaattgctcgccagtcatatgacccacccgtagatggctgtcgctggggttgcgcagaccctatactgagagaggcaaaatgatccagccctgaggagactgctcgtggaacagggggtgggggtccgacagaggaatgtgaagatgtatagatggacgaggacgagctggatccccgctcacactgttgaaccaatcggcctctttcctcttctcgagtggtaacaaaacttttaacacttctacgtaaggcgtctgagagcaacttgagctgcaaatagaactccaaccctcgtctgatatagccacaggataaaagaaaaaaggacttgtgtcagatagctaatcaattaaatgaaataaaagatacataccgtaaagcgctattagcctccttataatcctcagcttgacctttcaatctggctgtcaaatctttcactgctctctccgctctggcccatctatcctgggtttgccgcgcgcctcttaactcgttcaggtcatcaagcaattgcgaggtttccttcaacgttgatttctcttgctcaattgtatggtctagccgggttcggaacggcttgaatttctcaagctcggttgcaaataaggtgggttcaactccatgagctcggcgattcacaaggagttgttgagaaacgtcatcgttctgaatctgtagataagatcgagaaagacagttagccgaagacgaacatacgtgccaatatatatgtcaggtagaaaagaagacgaaccaagtgtttcaagtcattcaaacaaattgttctttctttcttgaacctactgagtcttcctagtctttcctccaattctccgatcaagcgtttcatttcctttctctccctctcttctccctcctcttccttgacgtctagatccaacaaacttcccttgtttgaagatgctggatcagtagatcctaccgcttctgtgtaagcctggtttagtgcctccggagaacacaaagtcgggagtgagggcaacacagtttgataaagtgcgttaatccgagcgtcggactgagaggcggattggtaggcggtctgctgagagcgaaggtcctctcgctgagatcgagcaactgatgcggatggcgcttgagtccaagagttttggtactttgcctaggatagacatgaagcgccgattgaacgaataacagagaagatcattagtacaagcgagcaaaagtggacatgacggaagtagtaaccacatacccgcagtctctcgcactccctcgattccttatccaaatcttcctggcatgaccgtaggtcttcaccaaccagttttttcttctcttctagccgaagcatgagcaccttgatcgactcctttctttcctctcctccaacctcttcaactaaatctaaagcttcgcgtccaggcaaactcaaggcatcgagtcctgctccgggcttcccgtgggaagcgacgatcgatctaaacttgttcaaaactgagggcaaaccaagatattccaaagttgtctgaacctctccctcagcaatgtcagagcgttccacttcgcctcgggatagctttgccttttcctcggagtagactgaggcagattcgtgaaccgctagaggtatgagcttatggaagatatcctgaccaacaagcttggttacttctactgagctgtaggtgtcttgaatcgatattggctgagcagccgagagcttgtcaagaggcggaagagcggcttcagcaggcaggatcgaatgatagatgagttcgttttccttggttgcctgatgagttcgttcactgacgacggccagatgggtcttggtgatctcgaccagggccgtaccagaatcggcaggaagtgtgagtgaatcagggtggttgaatgaggataagaaaaccgccgcttgcttctgagcctctttgccaagggtctcagctagtctcaacctgacaagcgcgtcgccgtgctttgactgagagtcatccaagatcgctcgatgataattggcaaccgatgggtagtatttcgccttgagctgtcaatcgcaagataatgagagagaaagcagaacagaattaagcggatcagactctgccggcagtcctcaggaaaacaatctgattatgtggcaggaaggaggacttacattgataagcgcaacccaatttcgatcgatgataccttttccaaagaattctttgacctcctcgctcaaggcggcatacatgattccagcctgagccgccagcttggccactatacctgcgttgcccggaccttttcctcctgccttggcctttccttcctccaagaccttctctgtgaacatctcttgggcttgagccagcatgattccgatgagaagcttgacgacttccttgctgagatctgttgatggtgcatgtagaaagttttcgttcacatagactagcatgcccgctgcggatcgcgcaaagttgtaagctcgtttgagaccttctggagatgatcggttctgagtcgatgacaggatggataatgtggaggcgatctggtagatgaccgaggctttctcgaacgccaatgatgtctgtgttgtcagcttgttggtaaatgagtcatgcctaaatcgaagaaaggatccaaaggaaagacccaagatcagcaataagaaagcttgactatagtgaaggaagatctaacaacatgtacgtaccaagggaatgtcactttgatatcagggaacctcaactccaagagttcaagctgaccaaaatatctgaacaaaagatctctcgctagtcattcgaaacaagagcataccagaatccgagtcagttctcttcgcaatggacgggacaagagtccatcttgtggagagaaggaagagagaacccacccgtcacttcactaccggcccctttgacagcatcctgtctggctcgctgaagggctgcacactcttccgcataagaatccggattctctccataagctgaggcgattatctgacgaattggatttgaccagtccacctctgccgtctgtttggatggtatcgatatcgctggagattgcattgtcatatcgaagagagagatggggaatgaagcaaggcaggagagatggactgtggagaagccgatgatggtgagcgacatgtaaccatttcgtaaagtggttacgacggttacggtcgtctggaaaaagaacgactcggttttatcatcaggcagaggatggactttgttacttccaacctacctcatcttcccacctccacgactacgatagtcttctccacgtttacttttacgaacagcagaaagaatcaatagaaaattatgtcggccgaattagaggaggataacatctttgctggactgaagaagaagtccaagaagtccaagaaggttgaagttgaggccgagccagaggccgcctctgaggagtctgctcctgtcgttaccaagaccgctggcgaggagaccaacgaggctgctgccgaggatggagaggaaaacttgtttgctgatctgaagaagaagtgagttttccatgcttccaggttagcctattcgaggtggccatgtctactggccactacaagtcaagattggagggcttcttgaacagacgagggaaaagaagtgaaaaaaagtgcggataactcaccaattgtgtatccacttctttgcctttgctctctgtattgctctttatcgaacacccaacgcgttcttaggaagaagaagaaggccgctcctgttgatttgctcggaaatgtaggtccctttcttctctccaccttgctcgtttcgttctcgtcttgcaacctctgctttcaagctcgcttgggactgacatctcttttgtcctcttgctttgcctcgtcatcatcggtcttgataggacactgttgaggacacccctgaagttgctgcagctgccgccgagaccttagctcctgatgacttttcggatctcaagaagaagaagaagaagagcaagaagactgctttcgatttggaagccttcgagcgagagcttgttgaggacggatcggccgctaaagagggagaagaagatgttgagggtgttccggcagactacgatgagaaagagttaggagataacgtgtttggtggtgcagccgctgaggacgccggtttggacgacaacgctggagatgagagccaggcttgggctggaaccgatagagagtacacctacgacgaggttagtcattggattgtatccttctcttctttcgtcattctttcctttcaatgtcaatggcgacatagatgtcattaccttgtctttctcctccttttgactttttctatcactctatttatcggccttctgcctcgatatcactaactgagcatccctcttctccttctcctttccatgtggcatcgactcttgttagcttctctctcgagctttccgaattcttcgatcccagaaccctgagctcgccggagaccgtcgccgatacactattgctcctccccagatgcacaaggagggtaacaagaagacaatctttgccaacttggctgatatctgcaagcgaatgcaccgatcggatgagcacgtcatttcgttcttgtttgctgagttgggaacgactggttcggttgacggaagtcatcgattgatcatcaagggaaggtacactcagaagcacatggagaacgttttgagaagatatatcggtacgccgctgtttttctctctgcttctgggcgtttactggtcgaggagctgatcggtctctctctctctgatttgaacaactatgccaattgtgcgacctaaagtggagtacgtcacttgtcagacctgcaagtcgcctgacacccttctctcgaaagagaaccgaatcttcttcatgaactgccaatcttgtggatctcgtaagtctatagctttgtgctatcccatcccaatcgcaagccaaaacaaatgcatctgctaatctgtcgtttctttgcccttcccctcatcaggtcgttcggttgctgctatcaagtctggtttccaggcccaggtcggacgaagaaaggctcagcagaagggaccttaaacgggaaacagaaggaatttttgctttacgaatggacaagcggtgtatcaatgattcttttttgtctacctcttctcctgaatatctacaaaggcaatgtatgaatgagaacttgatgatgtgtgtgtgtttgtgttcggatatacatatcaatgcttacgtaacatatatttcagctgggacacaagatcgtttcctcaacgatcaagactgaagtcttccactcattcacaccctcacctcctcttgaccaaacagtgctgtatccattcctggattgctttcgcaaacagtctgcctctgtttcatcccgaatagtattttgaaaacttgatatttgctcaatcgaagatgtcggccatcttctatcggttcaagtcccaacgggcagattctcggctaccaatagatggaacgggtatctcggtctttgatctcaagaaggaaatcatcctgatcaacaacatgggagatggaaaagaattcgatctagggctgtatgaggtcggaactgaagaaggtatgtatacagatcgatcttgaaacttgccgaggaagaaggatgcttgtcatttcagtcttggggggacactttggttgattcgacgtatgtttgtgtatgttatggtgtgaacgattgaagaatacaaggacgacaattatgtccttcctcgatcgacgtctgtcattgtccgtcgattacctcctgctcgacccgggagaggaacagccgctatatacgttgcaggaacgaatgcagaggacgcgcgagcggccagagaagctaactctggtcgagcaggaagaggaggatttggaggtgggaggggtgggttcaacatggtcaacaagcaaaagcggtttgatggtcgggaggaaagccatctggtacgcgttcatttcaagcgtactgttctatgtggctatcttttgctcttaatctgaaagaaatgttttgttgggacgtgtatcaaagccaccgtcgatacctgctatcgctgccggtccttcggtaggaggagacgatgaagcagctaaaatcgccatgatgtttcaacacgaagccgaacaatggcaggcgactcaggaggatatgtcaaagtcagtagatgtagatccgaagcttgctgttataccatcattggctctttcgttatgatccgtgctaatgcgtattcatgatgtttcctcattcatgcttttgctttgacctgtaactgttgactatcgaatttcaaagtgcaacacctatctatactcctggtcgtggtggatacgccggtcgtggtggtagaggaggaggaaatcatacttcgcatcgtcaaatgaccgaaccggataaacctctaccaccgggctatatctgttatcgatgtggtcaacgaggtatgtctctatgctgtctagtcctcttgtcattgaccacagcgacgataaaggatccggaactttgtattgaactctttgtgtcatgtatctacctacaggacattggattcaaaattgtccaacgaatgacgacaaagaatttgacaaccgacctcggttcaaacgaacgacgggtatccctcgaagtttcctaaagacggtcgagggccctgtagcgaatgaaggagcgactccgaacggagtgatgatcacccctgaaggaggtttcgtcgtcgctcaacccgatctgtgagagttattctgatcgtcttgatcgtcttgcgcttgtagtatccatctgacggttttttgtgaaatttctcttcgccctttcatgcagggctacgtgggagaaacaacgagttgctaaaccaaagattgtgacagagtctgagatccgagaagacattccgtccgactcgacgttatcctgtccgatctgcagtaagctctttacgcaagctgtaaagacaccttgttgctcgacgacgttttgcgaggaatgtatccaggcccatctgttagagcaagatttcaaatgtcctcggtgttcagaacggataggtagtctggatgagttagaggatgatatggaggcgagggaaaaggtcagagagtatatcgagaaggagattgagagaagaagatttgaagattcaaaagaagacgaagacggagagatagatgtcggtttttcctttgatttttcttttcattttggaatagtctttgcttagctgatactgaattggtttcggtaatttttcgtttggttgaaacaagaacaacacaacacctggaccacaggcatcggcagacggatcaaaacccaacgccgaccaaaaaccgccgacagactctcaacaatcgaaaccacaaccgcaacagcagcaacaacaacaacaacagcagcaacagccttcgtttgaggatcaagttcctgacccagaagttctccaaagtcaactggcacaagtgcggcgaatgcagaaaagcccattccttcgtacgttctatctgttctctactctccaaactgggcaaaacctcatgacgtcgaccgctgttttcgcggcttgactgactttcgtctatctgtctgtctgcttttcgacataaatccagctccacaagcaaggttgaagctagaaggaacgctgcagaacttgaccgaacagctccacatgtcatgggcctggcacgccggtcttctgaatatgaacggcatgcaaccctcgctcgtgcttcccccgctctggaacggaagtaccgctggcggtgctgctgccgggctcgagggcaccaacggagggatcgacgagggactcccgaatgggcccggaccgaggtccgctggtccggccacggatgcgtccgacaggctttttgctaactcccgacggagaggcctcaagcggtcgtttgctgtcagctctggtgcgagctctggtgcgggtgggtaggtgtggtcgttgagggcgcatggtggggagggatataagaggcccgaggccctagacgtgagaccgctttgctccactctatattcaaaagaaataagtttatcaatgcatgggacaaatccgttcagtctcccttttgtttctgaggagaagtgaaaaaatgaaaatcatgaagataacccaaaacgaaagaatgaaagaatgaaagaaaccaactcctcttcccccggaccgtctttctacatggaaatcaagaagggaaaaaagggaaaagaaaaaaaaaactcgatggttgtgaaagagaaagaaggctaaacaagacaaggcgagttaagataaaacaaggtggagggttcactgtgttcaatttattttcggtctccgtcgtagaacaaacgaacggcaccgtatcggatgaagaacgcaagacaggaacctgcgatctggatgaggagaaagagtgagagagatgatgagcggttcaaatccatggagatctctacagttcgaaagtacaaaccgcccagaacggtgaaaggaaaagaggcaaacaaagaaaagtaaacaggaggaaacggacgaacctggagagcaacgatgatcaatgtgagcgtatcttccctcaccggtcctacatggatcaaaataaaactttttttttcccgcccgcgggccatcaggatcgatcatctaagaacgcaaggcattcaggcgcaaaaggaaagaaaaaaagaaggaagaaagaaagaaagagcgtgaacatactttaggatggtgagattcgtcgtactgactattcttcccttccccttcgtctctttgcctccatccgaggctctctgaagccggacgagtccgagaaaagcaaagacctccagacagaagaccgtgatccacctaggctctttcacgctcacttcgcttcctttgtcatcccgagatggttgggagacagtcggtgaggaaatcatggcgatggatggttcaaggagaccggtctcatggttgatccttcatgattcaacccgggaaggaaatcgtttattgtttagaggacagagaaaaaaaaaacgaaaagaaagagactcacttgggtagccgatgtctggggcatacaaccaagccaaacaactgcggacaactcaggataaagttgaatatctgggggatgaacagcaggagcaacgttttcgggtaatgggatataattgcgacgcaggcaaaggtcatgcctgtaaagtaacagaacgtgtcgccgacgaacgctcgagatgggtacctatgggcgaagaagggttgcctctccttcacgtcagcgttggaatttcttccccgtcggtcgctatggaaagaaaagcaagaagaaaaagatgatgatgaaacagaataaaatggaaaatccgacgaaccagttgtgataaagcaggccgacacagaccccaacgaggggtaacatgaagtacagactcaagagatgacgttcgaccataacctcgccgccgacggcgcccagaaggctgacaccgtggtgttcccacacgaggccgagcacgggcaggtcgatcctcgggaggggcacgtacaggcagtcgttcacgaccaccgagagcgcgatgatgagcggctgaatgacctcgaggccgttgataccggcgaggatgttgatgctgtttgtggcaaaggtcgagagcaatgacatgtacacgtagtagaacggaccgagctcgaccactttaccaaagatcgaccggaaacctttgggcatgacgatcgtggtgagccctccttgggcgtagtagaccaggaggagtgggacggaggcgacgatagggatcgggagtttgtgacgccatcggatgtcaaagatgtcatccaagaagcccaacagggtagccgttaggagtgagagcaacgccgagaggtatagcgagagctgttttaattttttattatcaattcagataccaagacaaaaccgaagcagagcacgtcaataccttttgagtaacctctggagaaaaggagaggagggcaggggacgaacttcctcgtgggggaacggtcctgtcttcaaagccccactctgcgatctgagggtgaatggaaaagggatgaacaggatcaagagcacgatatatattgatgcgattggtagacccatcgattccggtctgtttccgtttccgtccccacacacacatatgtacatcagtcaagcactgcctgaatgaaagaaagacagcaagcaaagaaagacaccaagagaaaagcaaggacatccgacgaacacttcatagctgttctttttcaagagatccctacccttcaaccctttcctcatgaacgcgccggccactctcggcacgaccaacacgcttccgacggccgcgaggatggcgaagcctacagaggcttccaatgcgggcaatgtatggtcgcctatactagcagttaaccctgcggctgtggtcgtccctgacccttcaacaagcccagtcgaagaaggagagagtagcagaggacgaaagatcaggcaaagcgagagcgggataaggatagtagggatgaacgtcgggatcggacgtcctggtagaccggttactttctgctccggttcaatcttctgtgtcgccgttggtatggcagtaggcgtgggagtgggtgctgtcaatgattcagccgacatctctactgttcgaacgagatgaagagacgccgagagagggagaatagctcgagggggttgaaagagtagcggtagcagcagcagcaaagaaagaaagagaaggagagagatggaagtgagactccaaaagtgctgaacagccttgacgcacgtgagtacacacgtgttatgtcacgtgcacggttcaacgccacagaccaaccggcccggacgcctggtttcgctctctttgttcacacgtgtgtgagcgcgctggcgttgggaaacatgagttggctttcgaaagaagggcatttcataacaatgcaccaagagaaaaagaacaggtggagggaaaagaataattctccacgatgtaaggatgctctgaaaggaagagcatgcagaaaggagaaaaaaaaagaggaaaaaaaaagagaggtgaagaaaaaggtgggagggtagaaagatatacaacgtggtcggacgagaaaatcatccgtacaaagatttggaaaactcgaaagagtcagaagagagaaggatgatgtaagggtagttagaaggccaaacggaaaggatatgaatgaaaattcaggtaaggttgaacaagcccagaaacgagatgaaaagacacgacttttgtgattcagaatccgggcaaaaagtttgaaacgaaaatttgaaggatattgtctactagagaagttggtggaaaacaaggaaagtaacaaaaagagagaaaggaggaaggagaagggaacgaaacaaaagaggaaaacaagccgaaagtagagagaaactttgatataggaaaaccacaagaaacagatgcaatctgttcaggccaggaagacatcctggtcgtcgcccaatccatcccagaggcaagtgttttgggtggccgattgtgcggatccgacggcaccgccgagcgagatgtttagtccgtaacccatgccgactctgacggcttctttgagctcacccattgaagggaatccggcaagaccagtggggaatgcctgttgttgttgttgttgttgttgttgttgttgctgctgctgctgtcgaccggtctgctggtggtggccgttctgagtaggctggggctgctgtcgctgttggaacgaagcaggagcgtattggcctcccaaggcggcaacgtgtctccagatgtcaaattcagactgagcggtagccggagggggataatataaaccggtcggaccaggtggaagagtgtaaggcttctgggactgagcatcttccgagttggcctggggaaaaacaaacgaggcaaacggagagctcgaggtgtttgctttctgctgggtggcagcgatgtttgccaacaggctagcggtgtacgggttttgagcgtggtgctgcaagctcgagaatccggccgccgagtcgttcgagactgatctcggtcgataggcctcgacttggtgtggaagctggttgtaaaagtaagggagttgctgctgctgctgtcgttgttgctgctcctgctcatgctggcgctgtcggttcaaatggttcaacaactgttcggctgcccaggaagacaccttgtcggtcgccccgatggcttcggtctgtagggcggcttggtgatctacggagaaccgagcggagccaccaggggaaagagagaccgaggagggggtgtgggcgtcgatctgggtaacggctgagggaaagaacgcgctctgaaggctggcagctctggaggaccggatggtaaactcgagctcgtctctgaaagtattagcggcggcggaggaagacaggttgggcaacgagttgacggtggcgggcgagataatggcttcaggggcagggtcactggaggcgatatcgtccaagagaccgatctcaggaaggtcgtgctcgtcatcgtcgtcgtcgccgaagccggcggaaaaggtgccaaaggtttcgtgctcgacctgtagacagagctcggtgtctttggataagccagaggagattctttctggcctgccttcctttcgcctggtctcgttcacctcgatgaggagttcgtcccgttcggcgaggagaagggtgagctgcctggcggcagtcagccggagttctcgctgggcggacagatgggcgatcgagctgttgacgatgaccgacttggatggcctgcggaccgaggcgagggagggaaggacccgggcgaggtcgagaaactttccgttgagggtctctcttcgctgtcgttcgatcgcgttgtgagtcgctcttcgctctgcagtgttgactcgctttctcgactttttctttgggccctggctgccattcgcgttggtcttcttggcggtggtagcagcggcaggagggatagtatactgatcgatgctatcgaactgagaggacggagtgatcggttggacgagcgacgagttggacgacgccggcgaggtttcagtaaagattgtcatgttctttttttttctcttcttgttatgtgctttcttggtcttggattatttctgtcttgtccgggaaaggggcgagtacgtgaggatttgtttcggatacttttctgtttttcttccgtcgaaccaggatagagtcaacggtggggggggggcaaagaagactgaagatttggcaagggagcaaggtaagacgacggcaaagatcacggaggacgtccgtctagatgagcggagagaagactgtcgggggatcagagaagagatggagagatgaagctgaaggagaactgaggggagataagacagagataaggtcgaagagatcggggttttttttttggtcagtatgattgagatggagagagcgagagagaagacgaagcgatctacacacgatagggttatgccgcgagagtgctctcagcttgcgataacttcctaaaaggggggggaagggatgggcggatgaaagatgaaggatcgagacgtgttgtttaggtgatgtctgtttggcggtagaatcgagaggagtgacctgtgtggatggagtgttccatgagaagcgacggagaaggagagagggaaatattgatcagcaggatgggaagatatgagaagagtaatcgaagagagacgtacgagagaaagagaaaggataagtccagtacgagggtcgcgagcgctatcagagattggaaacagccggatacggagccgagaggagaaagagtcagtcattgtgcggagaaggtatgagtgaacaagcaagtgagtgtgtgtcagtaggagttgggtggaacagagaacgagtggccagtggcaaaagggagatgtgcctgtttcgggtgagaaggtgaggcagcgaggcagaaccagagaaggcgggagcaagtgaataaggatgctctgtcgaccaatgggagaatgatgtgtgtgtgtatgtatgcgtgtgcgtgtgagcgtatacaggtataagtgtatgtgccaatgcgagtaaatgggatggatggatggatgattgatagcctcgatagggttgtgtggctgacgaaagagacccatcgagagaagacccaaccccgagagcgagagcaagaacgcaagcacgaccacgaccacaaccacaaccacaaccacaaccacaaccacaaccacaaccacaaccggaaacacttacaacaagcggtatcctctagtgtactgtctttggggggaggggagcgggaaaggagggaggacgaaagggaacggaacgagacgacagccagatagaagacagaagatagaaggaaggggaaagaaaagaagagaaaaggggaaagttggaaggaggaaagataaagaccggggggggatttcgccaggggaggacaggcacaggcacaagcccacaggctctcaggcacacaggcacaccagaaaagagaaaaaaaaatgtcacgcctcagggcaaccaaaggacgccccgtatagtgggtgtttgggcccggataggaagcgcggtcgagtgcgtctgtagggccaactgcctctgggcgtacaggcaatcttgctcactcttgctcttccgcccgctccgatagctacaatttggctctttcgttcggagcccagctgcgcgcgtcagcagccccggcttcgttcgtttggtcccgcccacccaccaacacacacacatatatcaatccatctaccggcacaggctcatccggcctagccggctcaactcgatccgatcggctttccgaccggtctcggccgagagtgtgatgaaaaggcggccagatgttatttgcaaatacccttcgagcgatagcccatttctcggcccttctggcgtgcttatcgagaggatatgtggcgtgaggttctcacgtgtctactcacgtgctttccaaacagtcatctcatatcttacgtaatcttctgtaaccctttcgtagccactctcccatgactgcaccgtaaccaagtcctcaccgcccgtctgttttcctcctcactctgtttctcactcccagcatcccagcatccgtccatcccagcatcgctcgctcgcttgctgccttgctttctcttcctctctctctctcgcacacgcacactcacagcgctttccttctcccgctctctctgttggccatgcagcgaaagacatcaaattcaaggctgtcagcacagatactcaacccttcagctcactcccactctcacacgcattacatcgacacaaccggactaggaatctccaacgtcccagtttctccttcgggtgaggtccattcgaaatcaaaccatgcttctcaatcctcggctctcagtccgtcagcatctccgttctctccttcggatgaagagaaagagaacgatgggttcgatcctaatcctctctcacactctctctcccattcgcactcaatgtcacactcactctttcactcccaatctccgtcccaggacaacgcgttgaaagccaggccggcatcaaggcaccaacgaatgtcccactcacgctccagtccaagcgtctctctcaccgggtcaaccccgccgaccatttcatcccggtctccaaacccgtacagtcaacacacacccaccatcttttcgacccctccctccgtctccgaggccagcccagccgaatccttagactccgttcctcccctgctggccacgccaaagagctcgaatggctcgttcgtagagagcagacatgacaggatccattccagaaatctctccgtgttctttccccgtccgggcagacaaccaaaccagacggactctcagcatcaaacaccgaacctggatgatccggtgtcgctcattccttcctcggcttcgcctgtcccacccagtcccagagtcaccggtcgcagaggtcatcacgtccgtttctttcctcttccctctctctcttactctcttcctttccttgcctttcattgaccctcgccaattgccgtctttccaatgcgccattctctctcttgtcgttcccttcctaacttcgcctcgccttatctcaccttgcttcatctcgcctcgcttttccctcacaccagcataaacactcgctttcccacaactttttctccttcatggacccgatagagacaaatccggcaatagccgccgcatcccagtccagtccggtctccctcgacggaacgtccccgtcgtccttcccctcggccacgtcgaccccccggttcacttccgcaccgtccccgttgaacctatcgccgatcaccccaccagccaggtcaccgatcgcccagctcttggcccaaccgcccctcacccagctcatcgcgctctttgccctcctcgagtttgccctcggggccagtctttgggttgacggtcaggccggcggaagtctcgccgtcactggactcggttacctcgtcgtgtttgactcgttgggcgtcgccgggatcgtcgcgagtgagttgctcaacgggattggttctccgttgagcagtctttgtagtcctttcgggtcagtctttttttacgtcctggttttctctcagagccttctctcgagcttgttcttacttgccggcttctctctctctctttcttatcatccgtcccttccggccttttatagaaaccatcggctggaaccgttaatgttctttgtgcaagccatcttccttctcttctcgtcggtctacatctgcaaggaatccgtcgagcacgtcatgctcctcggacacgatcatcacgacgactacaatgagtcggtccctcttctttccctctaccccatgtctctgctttcgtctacttatacgtcttgttctccttttctcgtcagacttgtcctgccaaacacactgttactcctagccgttggcgccgccttgttctccgccctcttcttacaaaatcataccaaactcgtcgaaggtatatcttttcttttctttcactttcctttctccctcttctcagacagtgttactctcatgttgaccgccacgtgcttctgtcttgtccaatctactcatcgcaatacaatagccgtcggctcgacgatcactggcgctccaatcatcaaacgatcaacctacagaacgaccttgtttgacagagtattcaacctattgacaaatccgttctctggttgtgttctaatctgtactgccggtctcttgttcggcggcttgatcttgcccccgtacgttctccgtccctctttactcttatctctatgttcgtccttctgaactcgggttttgttccatccttatgcctataaacgttcttccgatcttccctttcaaagggattctctggccaacctggataaaacggtggctgtgttggagaccgtgctgacgttcgttgtttcataccccgcctcgatcgcgttcggcaaggtcctccttcaaacggcccctccagaacgttcggttcagatgatcgcgctcgacagatcattaagagaggtcgaaggccatccgttggtcgtccatctggcgcctcctcgcatttggagactggtccaccatcatgcctcttccgttctgccctcttccaaacagaccagccaagaatccacctctggctctggtctcaactccagctccagttccagaagaatcaactcatttagaccggccaactcggcgatcggcttgaacaccggagcgaacgccaacgcggcgatgtctgcttcggcctgtctgttgatcgtcaccttggtcgtccacgttagggacggagccacagattcagatattctcggttcgtctctttcccttctctgtaattcgcctccgcccttgatgttgcctcgctcgatagactgacagtgcaacctatacggccaagcagaggttacaaagttcgcttacgacaaatgcgcaacggcagtcggagcgccccgtttgggacggtccatacagcaatcaggcgagatcggtggagagggcgaactcacggtcgaggtcaggaagggaatgccgaagtggaccgatctatagaatcatcgttccgtctccctgggcgctttattctcttctttttctcttctttccttaatttggcagtttttcttcttctggaaacccgtcgttcttctggtctgggtcaggggcacgttccgagctggactcgaccaggtttcacttccggatagttcacacacaacaaaaaccttcttttcgtttctcatcatcgttcttgttgttatcatcgttgttgctgctgttgtcgttgtcgttgccatcttcgttaacataatcatcatcttcagcattgtctcatcatctcatcgtctcatcatctcatcgtctcatcatctcatcgtctcatcatctcatcgtctcatcatctcatcgtctcatcatctcatcgtcccatcatctcatcaccagcattcaggcttccatgctctctcgatcgatacacctcttgtgtagtctatactatctatcatgccatcgttatatcgtcgtttagaacttatcgagatgagaccttccagcactgtgtgcgccgtgtgtttgatcggcaactacttatcaaactcgggacacgtgcttaatggcctgccgtccggtcagtcaccttcccccccagcctcatccctccgatgatctcatgccctcctcccaacgtatcgcctcctcgttcaacctcttctcaaaatgctttaaccgaccgccactcctaacttttatttgtcttccttcttctccttctactccttcttctcttcctctcttgacctatcaaacgttttagctcttctcgatcggccacatacgatcgtataaatttgaatggaaagagcaccccaccctcgtcagtcggtcaggttactctcagtcttgctcgcatgctctctcttcaaccctacagcagcagttgtcttggcagtgaacgagacgacggtggaaccaaaggtgattagaggcatcaatctgggaggttggctcgtttccgaaccttggttcgtccagctttctttctatacattcttccgtatacacatacatacgcactctctttcggtgtgacccttccttgctttgtcctcctccctgcctcctttccctcgactctcctctttcttcttctttcggatcaaagggaagcaagtagagagagagagagagagagagagagagagagagagaga

SEQ ID NO: 2175 - DNA, 10636 bp, Xanthophyllomyces dendrorhous
agagagagagagagagagaggtaagaatggctaggtagccagttacagaaagcgctgacctgatgcccaaacctattcttaaactttaccggcttaggatcacaccatcaatatacacgaccaaacgaggcgtcgacacaccggtcgatgagtggtctttggtcgagacattagggaaggatactgcttggagtgtgttgagtgatcattggtcgttagtcttttccttccccttttctttttgaatcgcaagacaaagataacaattggacgacaagaagtacaaaaggtctgaagcgtccgttcacgatcgaatttctgatcagtcctctatcttggtgttctaccttgccctctcagatcgttctacaccaaagccgactttgaaaacatcaaggtccgtctgtcattaatcttcttgggttttcagcggtctaacctatctggtgatcccacgttgggtgtttcctctcgcgccgaaagatggccggtctgaatgcgctccggatcccattgggctactgggcggtcgacctactcgattcagagtcctacgtgtccggtcagttcccctatctcatcaacgccgttcagtgggcgggtgagcttgggttggacgtcatggtcgatctccatggcgcgcccggaagtcagaacggacaggataattcgggaaaacaaggtcggtcctcttgttacttggtgatgatagcgataggtgagggtggaggttgaacgtgtttaaatcctgctcgcatacaccatcacccctctcagggccggtcttgttcacggccaaccagacaaactacgaccggacgtacagagtgttgaagaacctgacggaagagtttgtcaaaccagagtatggtggcgtcgtcaaaggtttatctttttcttgtttcgtcttgactctaggcttgcgccgttcttcgattctcatctgtattctctcgtatcactcgctgaatgtaccacctccggtttacatacacaaaaacagtcatcgagattcttaacgagccccgtctacatgattacaaccagactacaaacacgacgttcagtatgtccgacctcaaggctttctacgccgccgcctcggacgtcattagatttggatccgacaacggcttgaccgttgctgttcatgacgctttctgggtaggatcctgcttttccttcctaaaaaagacagagagagaagcaaagaagagtgaacggaggctcgggcagaaacgctgatggatttgatttggcttccgctttgctcgttcgcttgcgatagggcccacaatactggaacaactatgatcccacgaacaaccagtcgtataccggctcaaacccttcctggcttcaaatcgacacggttagtcaattcatcgccggttagccggtggcagtcttgttcagtgaactaaacgctgatgtgattttcttcatttcttttctctttctattttccggcctggtagcatcaatactacgctttcgcgccttatgagaatctacctagagatgaaatcctgggtacgttcgatgagtttcaatccctctccgtgtcgtacacgcgcgaacaacggaaggctgaaatccttgacttatgtgcacatcgttgctctccgttttggaaataaaagatcgagtttgcaacatgtcgaagatcttcaaacagtccacaacgtccaccccaaggactgttgttggcgagtggtccctcgaaacaggttagattcagtcccctttttcctctttcctctctctctctttcacgtacacattcaaaaacggtacacccgacacggacattgacatcttacttcgattggcgggaatcgcttgtaccaaactcggccgataggcacgccaccgaacatctcgacatcgactgcgtcaccctcgagagcaaaacgaacttggctacggacgatatttgaagctcaactcgctgcttactcgcctagcagtatcgacaccggtagtaatggtaatagtagtagtgcagcggtggcttcctccactcaggccgtgatgggctggtatttctggtgttggaaaacggaatgtacgcttgtttccttctttttctcttttttttttttttctcaggtgggctctgacgttttctttattcgatttgattttactccctcctttcgtatttctccccttttctatattcctccccctgaaatacacacacacacacagacaacatagacacgtggtcatatcttaatgggatcaacaacggatacatcccatcaaatctatcggactcttcccagctcgtctttccgatcctcacgtccggtccgaacgcgggctgtataaatgcttcgacaggctggcaggctgctgccgaccccgaccctcagcctccttcttggggcggaggaagcggatcaggatggaacccttacaacggggcggccaggctggaacacgccggaaagtgtttgcagctggtcggactcgcagttggcttggtcggccttctcatctaacgcggtttgatccctctcctcgttcagaatgcgccgtgccgtcgtctccttggaatcttttgctttttttttcgcactcgtatctgcatcatctggaacgtttcttgctctgtttttgctctgcttttcttttcgatagatcaccaagtttcctaaggatctgtctgtctcatatagtatatatatttcgtggtgcctcatctaacttataacaattacattaatcttcttcttcttttcttttagagttcgacagaagaaaaggcacgggtcgtcattttatatcttaatcctttatatgtcatttctagcatcatctcgcccgaattcttgataagccatcaatattacaagcccagacggacaaatatacaaatccgagagcagcgaagaaggagatgacccattctctctctttctctctctttggtggaggaaaatacatgatgcgagtgaacgaggcgggacagaataggatagaacaagacagttcttggtaggtttaggaaagacatgtacggaagcaaaggaaaggaacgatgcgatatcgtcaacgttcacgctgcgaccatctgtctttcctctttctttcgctctgtttagaaaatcaaacgatatgaaataacacgtcaacatcaatcttgatcgaacgtttgaacttttgttttctccctctgctgggttacgacagtaaagggagaaaccgaagggcactgacctggttctggtgatgtgcgttcgagttcttcggcctcgttgaccacaggttcggtcgtcggcacttgcggaagctccacatccggtacagcctgatgcggataagatcgacaccatgcgagcgagagagcgaagcagatccaggtttcatatcacgtcgcatcatttcagcgatcatctgattagcacaagcccaaagaagacgaagtagagaaagaaatagaagaaacggacagggactcgagtttgctcttgttgatcaatcagcgcgttgagttcgttctggaccgcctcttcttcgtcgaccgacatctttgattggagagcttggtcgatttcctgtattcgttcaccgaacccaaccccaagaacgctcaattcgtcacgcatacgcatgtctgacagttgatgagagcaaacgcagagtcaaactcggaggcgggacgtacgcgttgataagatacggcttcttccgtctcgcccatcagtttctcgaccttctccaacgtcatctccgagtggatctctttgagaacctggttcccctgtttgaggccttcaaacactgatttctcgacgagcgagaactcaattgaagagaccttcaacagagaatcccgagagttcagatgatagtccaacccaagtaaagactcataggagttcgcgatagagatggaaaaggttgacgtacaagagactgaagagtctcgagttgagtgtctgtccgaaggagcagctgttgttgatactttctttgtcgtagcgccgtcaaggctcggctctgccgttatgtatccatacatccatcattgtcgtaggattgatgaggacaaagagcgttcaccttgtcagttctttcatggttgctccaagaagatagatatgtctgccgtaccttgttaccagcctccaaagcctccttggcaatctcctcctcccgtttcagtacatactctatctgtatcatccaaggcaacatgcattggcgacgatcacacacacggaaagcccactagaacagattccaaccgacctttttctggtactgcttcagcttgtctctctgcagtttcaaactgttattttccgtaaatcagtcccctctgaagctcttcttactcgcaaaagacagaacggacgtactcaagaaccgctctgtcctgagatgtgatcttgacggtactctgttgtgctcccatggctgcttgcaagtctatgtcgatgccttcaaggtctcgttctcatcttatctctttctctctctctctggttggcttcaacaccatgagactaaccaagttcccaaccctaaccaaagcggttactaccttttcttagaggtgaacccaacacgacacagtctagcctataggaggatgagaaagagagctcctagatcctagtaggctggaagccgagaggacagtctgtttgggtgtgcgatttgcgagagacagacagacagataggtcaacgcaggaagaagactgtgtgagaggtgaagctgtacgagacgctggccagcatgtttcctcgtagtacgacatcatcgacatttcatagtagaacctccttctcgtttctgcttgttgcagcctgatctgatgctcggttgatcaaaggaaactcggtaaagttgatagaaaaatcaacctaagcacccatcagtctatcagatagatcacccaggaggctcagcgaaagaaagaaagcccgtccatccttcctaccagacgttgtggccgacctgagaggtgcaacgacggagtgtgaaaggctgatgtaacgagcaagagtcacgaccagccactataaattcgttcagttggctttcgtctcttgttggcttctctcttttccctcaaattgtacttcgtctacggacggaaaccctcaagcttattgtctccatcccctgcgtaccagatttcggaacaaatctctacaggcttggacctatccgctttgagagactttacaagctctcctgtgaaagggagagccctcaacgctctcgtcgtacccctcgataacctttttaaagaggggcatgagatatagcgatgggaaattcctttcttctgtgttcatctttttaactactgtatctgcctatggatcaatgtttttctatcgctgtttgcatcgaaagagctgtttgcagaaatcgtcgaggtcgttgggctgatttgtttgctactcttcacgtaccgtcgtcggtaacgacgatttccgatacccaaccttaaatcattccattcacaaagcaactaccaccagacccacctcgctctcttctttgtccaacagtcccttctcgctcgcgttcgatgccttcagtccagccaccaactctctcagacccttcattttctctctgtcgttccctagacccgaccagatgagttcagtaaagccgcgaggggtcattactctgatgtccttcaagtcggatggagtgatcgatgacgtttgaaggaatgaaggtggtggtgggtctgttggaagcggatgctcatcgtcgtcatcttcctcagaatcgtcttcttcttctccatcatcatcatcatcatggctgtttgtgttatcctccttaccctgatccgcaagacgtctgcgcgacagagaagaccaaagggcaggtggtggcttgacagagggaattgaactgaatgggaagtaccctctaggataaagttcgaggtagggcgtgaccttgttcagaggatgatattcgttggttccctatcccatttccaagggcaaaatgcgacagtgacgtaaatcaatctctccggtatatccaaggggtcaaagttcacaccgatttgtcagaacgaaagatgacgtacaggatcgagcagttccgagggttgatactctcctttgtacctcatctgaagatatatcaagatagatcccgagaataccatcatgaccctttggctcagctgaaatcctctcaacatgcgtttctagaggagagaaagaagcagaccttttgacatgagtgaatgtaatatcctgtttgtatcgacgacacgtacacgatgatgtcaacgtcgtttcctcttcacttgcagtcgaaatatcttgaaatgaactaaccaaagtactgatacttcatgctctcgatcccagccgccttcatttcttccactaacgaaatctctctcagagcactgatctgttcgaacgatcaagaggaaagacgagaagttagcctgtatcagaatcttgatatataaggatgcaagaaaccacacaatagcagacgtaccttgccccagttcatcgatcccaacttgggagttgggtcatagcaaaagtaactaccctcatcgaagatcacagttcatccacaggagtgatcaacccaatgatttcaatgacccaatgtaagaaaaatacttacacgctggaaactcctgtgggtacgatatctagtactgcgaacgccacgacctcttcgtctatctactttgacgcgcgcgtacgccctcactgtcagctctggctccatcgaacagacagtgacgattgaagtgaacgataacaaacctcataaagcatgtgccaagttccccatctattcggtaatccgttcgacttcaacttgtcctttccagaagcatatcgaatcggttctcctgagaggggagagacacataagaaccgggagaacgctccaaattcaagagaactagagtcgggttccgtccggtgaatcttttgttgatatctcacgaacagcggatgtacagcctggtgaggtgggtcagatgagtgaagagacacctttggtgtgtcgagtattcagaaagaatcggtcgtcagcacgtctaacgtagaattttatacagtcaaactgtcagagcgttatcgaagatcaccttgaatctatgtacaggatccttcgctactggtttgagcttctggaacagcgccgatttatccttgcggttgggaagatcgttcgaaggtgtacgacgggcctgatcagctctgtcttccggtagatgtaccatttctgacagagaaaacgggacattgtttcggcctttgcatggttttcggccggacggaagaagcggatgaggtctgtgaacaacaagactgaatcagctacagtttggtctcacaggatggaaactgccgagagagcacactgactgtccggcaccaacttcctcagcaccggtcaagatgaaccgattaaatttgtgaagaactcgtctctgtcgcttgcccggattaaaccgcccagcttccaatctggtttgagcacagatataggacgagtcaatactaatatctgatcataatttggataaggcgagggtgcaaatcaaaatgacctgatagtatattgaggacaacatgtacgtgccatgtctgggctgttcgttcgataaaatggaacacatcggcatatgaagaaaaaaagtcaagccaacctgaaaaggcaattcaacttactggtacacatattgtccggactgtagaatcaggtggatgggtcagttattaacagcttggagatggatacgaagcggacgaagaacaaatacccttctccagccttggttgatcaatctattgagtcgaggtcaataaagatggacaccattagctgacaatacctaagatgaacataacacacgatagccttacagatcgtatgcttcgacactcatctgatgagccctgcacagaacaacgagaacctaaccggtcaacgagtctattgcttcttctgcagatgattgacgagcaaaaccttaccagagcccataactggcactctctttcctttcacctatacctcgctctttctgagcacgcttctcttctactgtagagcagtatccacatgatgagtttgagtagccgatgggcgaaacgagcgtaggctgaggcatccgaatgaacgatcgaacaaagatggtcgggaagaaggagatggccgaaacgatcttcatccaaacgaccacatcctttccttctctttcctttctctactttcattgtttctttgccattgcatcaaatgtcagagcttgtctcaagcagatcagccagatcgtactccatctcgggaggttcaacttttcccgaagaacgtccctcagatcccacgctcccgtcaaagccgcctgagctgactctcgaagaggaagctgatgatgacgacaacaatgtcgacaatcaaccaccgccaacagtccaaccggctctctccagtccaagatttgtgcccccgaaattattcgttccatccgaatctgatagagaatccaagtcacgggatagttccaggccgacgagtccgccgaggaaagaatcagtggtcccaaactcatctttgagaatccctcaactctgttcccctggactgtttgcacccttaccttctgttcgttctcattgccctctatttgcttgtgatacttcctctgctcacgaatggttcatcggatattgactgtccttctacttcttagatcgatccgctctccagtctattgacgaaatacatcccttcaagtcaacgaccatatagagatatcgaaggtcgttacgaaggagtcgagatcactcagctcgttaaggcaggtagctggagagcactggcaagactagcgagggatgtgacagtctccaccgaccctgaaaacgttgacttaatcttcgaagttcgttcataatgcttgttttaccattcctttcttgttcaggtcgaagcatcgatttacttacttgtttgtctgtccgtctgattgtctgtatgacttactccccggcgtttcagatgcaccatcttcgacaactctcactcctttctctacatcttcactctcaacacgtccatgaacttcatctactctttgccgcgcttgcccaccttcctcctggagtacgcgcccgactctctgttcctttctcgcttgaattgatgtttgcaaagaagaggggattgggcgagcttacaagattattggccaggtgtagatcgggagcacagtcaagcggggcggaaagcggactatggagagagagggttgggtgggttgggggggcgttagcaggcgctttgattgaggctggggtcagtcgaaccctcaattctgatattttgcacatcctgagcatgaacttattggtagtagtctttcatatgtaccgacggttttcctcaggacctcaactcggccataactcttctccttcctctgacttcaccttctcagactcctccaatctatctgttgggtgctttgctcagattgcagctcgctataggaaaccttccttccgcaaagagaacaatggatcagatcgagagccgagaagatggagaggagagggagaagaaggaggcgagagctatttgggaggtgggaaacaggaattgggaaggcgcagaaaagacgttggcggaagcggaaggcggggttgtacgtcgtttcttctctctctactaggagaacagagtaagtgcggtcgtttgaacctaacaagctctttttgttcttcaccgaatcaaacacgcaggccgccaacgcgcggtctatcgtgcatttattccaaaatcggcctgaagaggtatgctcatattcatctagcttcttattcacgaccgagacattggcagatcactcttcacgttgctaaaatctcttttcttccgatacaggcaatcgagacgcttgaaagagctattgagctcaacccgagtgaagctctggtcgagcctctgatcttcaaccttgttcgtccctattctttcttctgtgttcacatcaattctttctgtagacatggtattaacagtcaaaatacgttcgttcgcggtctctggttacaatcgtcctcctggatatataggcgacattatatgaattgaggtttgactcagaaattgcttcgaagaagaaagtcgagctgctgatcaaaacgactaagtttgcaagcgatggtcttaaggttcgttcaaatgtccaatcggtcctatacaaactgttttcgaagtaacgatctgatgattccatttcgtgtatgatgttttcgggttgtgtgcgcgtgcacgaatgcgtttgtgaccggaccccagccggcatgtctgaagctttcataaaaaatttctgatttatatatatagcttcgtccccacatagagtgagaaataatatgtgaatccctttcccctcaaagtaaactccttagattgatcaggggtccttctcaaggatctccttcactcgagcgactttcccaaggtttccctgtccaggagcaatctgcttatcagttcgggtaccgattcggatgtcagtggcaatccggggagttcccatcttataatttcatttgttttatcattttaaaaaaaaaggaaaaaaaaa

SEQ ID NO: 2176 - DNA, 12862 bp, Xanthophyllomyces dendrorhous
aaaaaaaaaggaaaaaaaaagaagaaggatgcgttaatgatactcagaagattcaaagaatgtaaagttgatagtacgaaggaacaaaccttgtgcacagcttgatggcattccccctgtacaacggaattatgatcggcggatccaaggatcatcaatgaccacaaagagtcttatcgaaatgaaggtaaaaaaaatcaaggcgagacgaacgataacggccatgacctgactccaaggaccttcaacgtttgtcccgtaccctccaatctgatcgataaatcagcccaaatagccaaagagaaacccgagaacacgaacgacgtttaagatcaagaagttatacatatcagtagcttactttcaagtctgaagtagaaggcctcacaagcagaagatgaatgataatcagtgaggacagacctggtacgtcaaccccgacttcttcaagatcctctggcattctgcaatctgaggtccaacctatcattgcgtcaataccggcgagtccatagcgtaataaacacaggtcagtcagtcagatatttagagaaaacagtgaccagatacgagagacaagaggaaggaggatcacgaaatcgcaaggaataaaaactcacagaaggagtatctagacccatagggatcaagcagactatatcgtccgagaacgatcacccacccgcaaccatcatcagattcgagaagaatcggatagacaaatcaaagaatcagccaatcgaaagtaaatacgttcataatgagagaaggataattcttttacaatctattctcatcgacgaacgaaagcgatgtaaatcccgagaggaatgagcgaacgagaagggcgacagtcaacatcaagatctttgggatgtttacggaagagtaaatatgcagagtagagagacagacctgctacagcatagagctcagtaggagcgctctggtcttcttgagttgatgacattattaacaagatggagaagtgaattgatgaaggatgacgacgagtaagaggagtgttgagaaacgcaagaaagatgaagaaatacaaaccaacttttcggccttgtgcgctttcaccttcttctccttcccctcaacttcgaaatgctctcaacgaacacgatgttgcgaccattactctcttatcaaacaaaacgcctggcttcgaatccttgccaatctgtacatcatagaacgttttacccatcgtttgtcggatacaagaagaagggaaggataagtgagagcttctcaaatcaaacagcttgccgcttcatcaacagagctcctcatgttctaacggtgtctcgagtcgatcttccttaccctttcttccatgttataccttttctcattcaagcttcgtagatttaagcgactatgatgatctagagtatcgtctcaacccatcgacaccgcctttctcatcgtcaacgtcgcttactgagattggtccatccttcgagttggaacatctggtcgagcccaaaggtggaaagcgggaacaatcagacggactatctatagcccaaagagaacgtcaagaaagcttgccaacatctacgaagaaactcaataggctacttggaagtcaaaaggtgggcaagttcgagcttaaggaaacagaattgagggaaaagtttgtaagaggtaagggttctagatttgtacatcatccgagctcttcatcctcttgagccaggtgaaaagtgctaatcatcttctgcattgggctgaattatcccattctaggttcaggaaatggaggtatgtgtttctctcaagtatcttctttgtcactgccgatgataccattgagtgtcctttccttaaccgcccactgctatattgataggccaggcaatcaacaagctctcaacctgtgtcgaccttatgcatatcccaactgggttaagagtccaagctcaaccgaccagatcgttgcagaccaaccgagagattgctcgaaagctgatggctgaaaaggtgcgctcttatcctttgcttcaagttggggtttgcctattaatcaagtcacttctacctatttacagcttgcgacaatggacaaagagtccagcctaccttcgagagctgaaattcttactgcaaaacggaagctgaagaaaacgcgtgcagttcgacgatcaaagaagaagtacgcttttgaggatcgagacgaagagagtacacaaggtttggtcgagggaacccaagagacaagggcagaaagtgaggaagaagtcgacaatcatgggacgactggacgaaatgagggcgagagcgtaaaagggtgaattttgttgacgagaaaaacagggatctatgatttttttgaagacgcaagccaacttggactgtaggaaaaatgtttatatagccttgtacaggaaaaaagagacttgccgaaaaagaaaatgaagcataggactagcctcttccccctccagattgaaggaagaactaaggaagccttccttaactcgatgcatcagcaggggtggaagaagcagccgctcgacgacgccgattcgggaatggacccgccgtttttgcccgttctacagactccttggagagctttgccttccttatcgaatcgttgtccgccaactgctcgtcagagatccgaaggtctgtagggtttgacatgggcatcaggtgtcaaaatacttttacaacacagagaaattagtcttaaggagcataacgaaaggacatactgaacgttccgtcccctgcatcctcaccctggacgacatgtttcctcaacagatctccaacctcgcgcgtcattgtgattcgctcctggtactttgccagatcagtctcgagtctgtgttgagtgtattcctgtcggagtttcgcatgggccgtggaaagcgcgtggttgtcacctaagttatagattgtatgcaaaggcataaacgtggacatgagtgacagtttagacagacacctcagacaaaacacagaagccaaacttgtttaaacagacaacaacgaaccggcaaagacctgacgggcagatcggaggacatgtctgtaggctgatcgagcggtctgctgaagctgaggcgtgatgacagacatgatgaggatgggtatatgctatctgagtgggtggaagacggaaacgaggataaaagtccggacggagtcaagatggaaaaaaatgattagaaatatttctatattctttcgaaaaacgaatagaaagttttgtattgcaatcggttcatcagctacatggtcggttgatcctttcggctcagtgctagccgagtcatccacacgttcttcaaggagatggagaccatggttgttgccacacatccatctatccatctgttcatacacgaccacccgtttatctgttgtcttgaggtagttataacttgagaagagcacattcaatggcagaaccaatggatgtagattctggtccaccgtctgccattccttcctcaccgcccgacattccttcaccaccgtccatatctcctttgagaatgtctataatgggccacaacgtttacattgattcgggtatgcatctactttggtcttgctcgctctccacagctatggtcaaaatccttaattctcactagcgaaatatttcggacatcaatctgataatcagcgggcaggtatcatcacgaaccaggcgaggaacaacgccgacaatttcaacaaatgtggagggatttagataagcaggcggcagaaccggatgtagttcgaaaacgagaaatcctcaagatcacacaaagctatgatttccaacaagtccaggcgaaggtcaaagcaaagttgatcaaagtttgtatctctcgtatagttcctctcgttctactctcggtcgagactctcaggctcttatctccatcgcccatcattgattttaatgtttgttcgttgcatttttagttggggtttcttcaggaagcggttgaactcgctgtcaatgcagtcaaccggaatgaacataccttttctttcacagaagacgatgttctcgaagaagctttagacatactacaaccgaaccaatgggacatgtagtcagtttctgacttatggtccctctccccaggtcggaactttatctctcacctgttcggctgcttcggctgctcaaccaatttcctaaattcaagacatctacttgcacttgaacgaacagccggattgctctaagcgcagaatatacacgccactttgttttgcgctattcattgtccatatcatattgtacatggtccagcatatgccgacttggcctgatttgaacaaagaggtttatactctcaactcatagctatagtatttatctggctttactcattcgtactctctcctgttgtgtatatagaatcgaggtcgagtgaaagtgttttatatcagatagaagttgtatactccggatgtcccagatgtaatatggcttttatatatcaaactggaaaaggaataggcggatcttaagttctatccagagacaccatcctaaaccctagtgttgaaattaagccagtggatactgatccaagttcaacggatcaatccaacccaatcaatgtactcccctctcttgatccagaagggaagactgagaatgagaagcaacatctgtatgattcgtatatagccagaccggccagggaacgaaaggaggaaggttacgcctctgtaaccaccaagttcagttctctcaacccagcacgcattttttttcttttcctttacaacaccaagagactctatcgatcgttcatcatcagtcgatctcccttccgttcttctcttttcctctttgacacaggcgtacgtgcacatcatgaacgacgaagagctttctaccctccctcagttggccgtcccgtccaacttggacgactcctccgcctctcaggcccctgtcggttcttcctctgtgccagaggatgtcgcaaagttcatcgtcaagttccatcaggccctcaaggagaaggatcttcctacgttgaccgctgcttatgagcgagggtggaacgcattaactcagcagcactactcccagagcgagtggccgagtgaggaggccgtcgcttccttggtggacaacggttcgtgcttttcttaatttttttttcctttcttgggttttgtcttctcgctgctttcattaagaaagaagagaaaagaagaggaattctttgccgagcaatcttgaaagggaaacaaacactgattgaccatctgattttcgtgttctcttgtgtctttacagaccagattttcttgaccctttaccgagagctctcctaccgacatatctatgctcgacttcgacctaacatcgacgaccgattccactcttacgagacttcttgcgagcttttcaacttcctcctcaactctgatgggcctgttgatcttgagcttcctggacagtgggtgtgggacttgttggacgagttcatctggcagttccagagctttggacagtacagaggtgactttaagggaaagggtgaagaggaaatcgcgatcttggctgaaggaaaccaggtctggtcgtgctactcggtgttgaacgttctctactcgctcattcagaagagtaacattcgggagcagctcattgctgaggccaatggagcttcgcctgaagaggtcgcgtaagtcttgagttttgtcttttccactcttcgcgctctcttgttatctcagcagacagcgccggatgcaagcgtcaaaagagaatggataagaagatgaaaggaaactgagaatcttctcggtcgttttgcgttcgtgcttgtttgtttattcttgacggtgactagtcaaatcgctggagagtatggttcaaagcctctctaccgaaacctcggttactttagtatcatctgccttcttcgagtgcatgtcttgcttggagatttcacccgttcgttcatcccttttccgtgtgggtagtcatcaagagccaaccattaactctctgcatttttgtcgtcttgacccatccgcattgttgtccagtcgctctcaaggtgatggaccctatccccttgacccgaaaggccgacttcaccaaggtcactgcctgccacgtgtaagtgttccaagtgttccaagtgttccaagtgttgtgtgtgtatccagcctggtattaactttcttgttcttctttctgccatgttcctacatcctttataagcgccgtgtactactacgttggattcgcctacctttctttgggcaggtatgctgacgctgccgctacgtttgtgagcattctccgatacttctccaggatgcagcagttccacaccaggagctatcagtatggtcaggtcagtagagcaatcattcttttatcttgcgcttcttcttgcatctcttttgctccatcacttgtattcattgcgtgtgtctttggcctatatttatatatgtacaaatcaacagatcagcaagacgtgcgaccgaatgtacgccttgttggccatctgcaccactctcgcccccgggcctgtggaggatgctaccggtattttgcagaccatgaaggagcagcttggcgacaagctcaccgagctctctcgagggtaagtttcatatcctttttttttcgttgcatgtgaactatatctgacgaccagccggaggtttgtttctcttttaataactgatcagctccatcccgacgtactctgagctctacttgaactcctgccccaaatttatctcggccaacccgccgccttacgacgatgccgcgctctacgcactctacacttcatcccctcctgtggaagctccgaaccgacatctgtcgatcttcttggccgatgtcgagtcgctggtttctgttccgacgactcgatcgcttctcaagttgtacacctcgatcgatgccggcaagctcggtgggctgacggatgaggacgatgagagtgtgttggtttcgctcatggtcgccaagtgggctggcagggctatcagatggtcagaaggtgatgccggtcttttggatggaaagcgaggtgtcagccataacttggacttttacgtcgataacgttagtttccgttttctcttccgtttctgttcatcttttctcttcttttttcgatcaagcggctcaagatgttgtgttctgatgacgactgcgttcctgtttccttcaaacgcactcttgactcacaacagggtatgatccaagtggccgagacgacagagtctcgtcgtttcgcgactcacttcatccgcaaggccgaggctgcccaacgagttcacgaatctattcgatctgctcctttgccaatcacgaagcctggaagtgctcagtcgtcgacagctgctgccgctggtggggctggaacgtctaccggacaggctggttcgaaaggtggtgtgaacggacagggaggtgcgaagggaccgaggaagacggtcgcctggggagcggctaggtcgtaaggctatgtgtgtgtgtgtgtgtgtgtgtgtgtgtgtgacaaagtagagtagtcgtcttttatgtttccctctcttgatgaaaatcctctttctatatgaaccgtacaataaggaattccttacaaatgatataaactagagaatacggacgagaagtagagaaaaagaaaaagggttaaacttctagttctatctacttcgggtactcctaccttgtactcttatgatattgaacgaaagcgtgagatgaaaacaagtctaggagaaagaaaagaaaagaaaagaaaagaaaaaaaaacaacaacacaaggacgataaggaagaaaagtgaaaatcaaaacatctctatcgaacttggctgcggtgacagaaagaacaagcttcgaaagatctcgacgtctcggtgtcagtgaaggagggacggaaccaagtggaggcaagcctctatccattcgttcgcctctgatgggatgatgatctcccgtggacgttgaacgttcgttaaacccatgatcagaccggtgatcgaccaagcctaaccaacctttcttttctctccgtccgcaacgctacgccccgaacgagccgcacataaccgatttcttgtttttcttcttcttttgtttctttctccttccgccctggctttcgccttcgggactgcaagccaggttcggggatcggactctgaagggagttgtttggcaatgctagattcggaagtgatccggactgtgaacagaaagttagaccgatcatgcagataagacttgtgtgttagtctaacggaaaccgttgatgagaaggataccatggtattggacgagtctagatcaagcgcgacagtgtctccgtgctcgatcttcctggtctctctttcttatagtttggagttcatcctatggggtctttgttttctattctagtgtgacggatatgcatatatgcgttcatatagaactttgtgttccaagttccgaccgactcgaagcgaacggaagaatcctgtttctcttctagctttgagagggaacagagttgaatcctcctatcaacggactacgcgaagatgagaagcaacagagagtaacgcgcgtgttcgcttgtcgcttgtagcgagatcgaatgtcgcgtgggcacgtcttccttgctcgaccgacgcggatccttttgacatctgcctctctctagatgagagactttcactcccaacaacaaacccatggaaacccacacgcacacgtccagggagaaaggaacgataatcagacgcaagaaaggatttcgactaaaagcaagctgaaaaagacaacggagagcgaaacatttagtcggtgatttcaccgtatccagaccctttgtattcgttcttgctgcggttcagggcggacaggcgtctggagagaagaaggttaaaagtgacgcccagtgggctgtcgttgtgagcatgaagatccacgcgcgtcacgcgttcggacgcgtcattggatttatccatctctcaacctgtctttctattttttgcttgattctctcgtttcaatctcagtcccatgtgtctgtctgcttgatgggttgtatgcgatgatgtgcatggttgatcggcgtccaagttgctggacgatgcagccgacatgatgtatcaacaagaaggaagcgagatggaaagatacaaagaagagaaagaggaagagaaagagagagagggagagagagaaagagaaatgatctttgcttggcgtgatttgccggagacgaacagttccaatagccggtggcggatagcagagagatagagagagaagaaaaaaatacacagcagacaagagacaagacagagtcaacggtatggtggaggctgcttaacttgttgaaagaagaaagcgtatttgtccgttgtgcagcgcggagaagagaaaagagagcgaggattgctttaaaggaaaagaaagaaagaaagaaagaaagaaatcagtcgcgtctcctcacacgctctgtgctcttgtctcttgttctctcttcttctttgccgcctcatcatctctttcctcgccaatcgaccgagacgtctggtgttcttccaaagtgattagaacaggttggtccgaacggaagaattacgagaacagagcattcaaggaagagaaaacccaagaagaacagagctagaaagaaagaacgaaagaaagcgttgtgtaacgtccgtctacgcagcaaatctagctggtctgttctctttgaaggtttccgtgttgatccatccgttctccttcttaccttcatcccagctttctttttttttccttcgtgtcttcgtccatccaaccatccatcactcgttctctcttggtttctttgggtgttgatacgatacagaatccgtgtagctccatcgttcattcgttctcagtctgggaaagggtaggagaataggaaaaaaagaagaaccaagatagccaggctttaccaccttcaccttgttttaacactcccagctttcctccaaagcttaacccagagattcggtcgaatctcccttttgtccagttcgttgtctgtttcttttcttctcttcttttctcttctctttgtctcctcgttctcttctatccatgcatgcatttgattaaatcaaccctgttctctccttggaatccatccggacaaatagacaaagagagggaaaatctccctccccttccgaaggtcatcccgtcgtaaccgtcgtccgtttttggttcgttcggtttagatgtgatttaccttgactttccaattttctccttctgttacctcaacaaactaaacctttcgtcttctgtttcattttgcccacctttctctcatcgttagctctcctgtagagacagacagactctcacactctcacaatcacacacccacacaatcgcacactccctcagatgacagacgtttacggatcatcatctcctcttcacttcatcggaggtggcctccatgcccatgcccatgcccatcctcacacttcacaacccacagctctcgactttagtcctgttccgtcgtctccgttcactccaggagacgaagtccctccggacgacgtcgacgtctcttttgcctcgagcttgaatttcaaccagagatcacaacactacggttcccctgggattcccctggccatgtcttctcccagaacaggctactttccgtccatcggtccgtcgagctcgactccttccggcccgtcgactaacttgtcatccggagagatctccatgaacccttcgcctctggctgttcgagcggccaggtccctgtctgcctcgacctcatcctcaccctcatcttcatcgttgtcatcgtccctgccgacagctcagccaggttctgctcatcatccttcttcaacactgttcatcccggctcacacgctctttaccgaaccgttcagagtgccctctcatccgcctcctccgcctccgccatcgtcgtctccatcgtcgtctccatcgtcgttcctctcaacctcgccccgttctaccggttcctcgccaggaaggaagagatcgtccatctcaggcaatcagtacagccgattcggtcgggacctcgtcaaccagccggacggaccgtcttcgccttcgtcctcaaagccggaatcttccagatcaaaaagaggatgtttcgcagtcgattcgacccacgactttctggcacctcctacccctcttcgttcgaaggtatgcttcctttccttgttctctcttggtgtctccttcctactccatcgagacaacctgctcacaagaccttgcctttgatctcgccctttcccagtctgaatcggcgtttgtaccaaacttgacgtccccactcaacatgtaccggccggacgacagtttcttgatggatgttgattcgccctcgctatcgttcggaacaaccgatcgatctcaaagccgtcgatcctcctcctcgctcatcgacccctcctcggctgacatggcgaacttctttgtagaatctccggcgaaaccgttcgacctgttgggctctccttcacccatctccgtctctcctgcgtcgtcctcatcgtcgtcctctccagcgcttttgtttggggtcggagcgccctcttcattctcttcctcttccgcatcctcctcctcctcgttcccgatcgagtccacggcggcaatgtctgtccagccatcgacggcagacgcattcgaattcacccacctcaacatcggttcctccaagggaaacgtcagtcatttcgcaccaacggcgacctctagacgaaaaggaccctacaaccgacggcccactctttctgctctacaaccgtcgcccgatttcgaaggcatgcccgcacctccaaagtccgcgtatccaatcatgatgggcgaacgtgaggatgacgaagacgaggacgatgatgatgatgataacagcatggcgaacatgctctaccgacccaactcaacagggttctcttctagagggccgttcagacgggcgttgtcgactgcgatcgagagtgggcgaccaccctcggcccagttgcctttgagtcgaccgagcttgtatcatcatcccgcctcatcgtcctcccctagctctgtcggagcaagcggaggtgaatcatgtcagggctcttccgatatgctctcttccaaacgaaacttccaacgacacgccacctatccttctgccgatggatctccctgtgctggtcttgccctcgacggccagaagctggtaggcggaaagacgatcccaaagatcagcgtcaagtcgccactggaggaaaagtcagggttctgtttgaatgggtttgaaaactcgttcgtcggtgggttcagcaaccaggaaaaggtcggtaagatcttgccctgcaagagtgtcaaggaagatggattgatgcggatcgagcctgctactgtaagaacatatttgtccccgcctcttcttccagctgtgaaccctgatctaccagactgacattgttgcaatcgtcccaaagcttcacaaactgctagcaggagggtattcatctcaggtgactgacgttcatgtcatcgactgtcgattcgaatatgaattcgtcggtggccatatcgaaggagctgtcaacatcactgatgacgccgccgtcgaggcctactttctggataaagctggtaaggccggcttaccgtcgcctagtgtgagcggtcatccggataaaaacggagagatcaaaaagatgatcgtcgtcgttcattgcgagttttcccaaaagagaggtcccgaaatgttcgtccccccccccctctctctttttcgtctttcttcttcccgtgtgtctgtctctcctaccaagaaaccctcttactcacaattctca

SEQ ID NO: 2177 - DNA, 22178 bp, Xanthophyllomyces dendrorhous
ctcttactcacaattctcatccgcttatctcaatagtgcaaagattctgagaaaaaaggatcgagcggccaacactaggttgtatcctgcgttacactaccccgaggtgtacatcctcgaaggcggttacaagtgtttcttcgagacccatcctgtttgtcctgtttctcttggtcgatctctgtctgtagtgttctttccaatgactaaatccgcttgtcgatttacatctctttctagacggactgtaatcctcaagcctatgtcaagatggacgacccaaagttcctcgctaaacggtcgactgacgtccaagccatgcgtaaattccatcgagccctctcctggcaaggctcgattccctcccactcccatgcccatcaggcaagtttacccaccctccaaataaaacctaatccctcaggaatcactcctttggcgtttgccgctgcttctgcagctcaagacgccagacggtcgatttctcaagtcggattttcctccaactcctctttggcaacaaagccaggtggtctgatcaaggaggatgactcggatagctcttttgataactctttcgaaggactgggcaccctgggtttcaccattggtgataaacctaggggaaaacgctcaggcggcttgtttgctacggcagctagcaatgccagtctaggagtaaagccaggcggacaggctcagggaaaacagagttcgttgaagttgaagcctagaatcccgatggatagggcttcatcctctcctttcctaacgttgggtgccggaaggtcgaagaacaagttctagtcactcctgtcttccctttctctctttccttctttgctcgctttctttcatcgttcttcattttgggatggcactactccttttctccttcctctctttttcttcttctttgtttataccatcaacgcacttatacatacctcagaacacaatcagtttgatcagattcctgatctatttgttcaaatcctgccgatttccttccttcaacatcctttcgggtgaattccagaccctacaactcatcatcatattcacttttcatcccaaatgcataacctcctcctccaaattttcaatccattgcaacgcgcattttttccgaattctttttctcttccttacattcttttgaagctaccttgttatatccttgctcctgttgtggcctttgctcttcacctctttcttctctttcttttcccccttttgaaagagaggcttgggtcgatagacgtcatgcgtacatatttatccgctattccatttctgacattttccttgccatatttcttcttcttcttctcatccttcctttccatgtaacgatcaaagatatccattcgcactgagagttgccgtccgttcgttcgttcgttcgttcgttcgctcgtttgttcgctgccctaccctacatactccccttatcgcttttgttcctttcgccctattctttactttcttttctttgacaaacgacctttcatgtcccacattcctttaaattcaccgttcatcgtctttttactattcttatccttctttctttctcacatcgtctgtccattggacacttcattctttcgtccttcccttacgaattcaacctaccgtatatatctttcttccttcccccccccttcttttcttttctttcatcctttccatacaagatcatgctctatcctcgtcttttcttttcgtgaagatcaactcgacctcccatccttttgtccttgagtcggcgcacatcttgaggttcagtaaacgtctacaccgaggcacggagagaattgacacatatatctatgagaacacgctagacgacgtccatgtcgtcctcacctgcgctctcatcacttcccccgaacaaatcttcttcctcgtcttcctcatcttcatcttcaccctctgcgtctctaccgatatcgccatcgcgaacatcgcgatcacgatcgccgtcgccatcggtactactcgaggcatccagaccggcagccatgagcgcctcgagatccgtcatctggacatccccatccattcgtcctggatccccttggttctcgagacccgtcctatcgtccggaagggccgaggttcctagcgacgatgggatgtatgtcgtcttttgttgggccatctgaccgttcgaggcgaaggatgacaaagaggaggaaggggcgtttgagccgggagccagcgaagggggaacggggagggacgacatcgaggatgatgaaggcgaagagccttgggtgagcggtccaaggtttgaaggtgttggcggtaaaggtgagtatgagaatttgccaggtgaggatccaccggtgtcgttgtcgttggtattcgtcgaagggacgagattgtgattgccgcctgttgttgttgttgttgtataacttgaaacggtagaagccgagtttccattgttggtgtcaccgccagcagtggcagcagaggatacggcggatggaacgggattcgattctcgaagagcggcctccctgaacgctttctcccgttctttctcttcttcttcctctcgctttcgcttttccttctcctgtacgttctgagcgcgagcggcgattttaacgtccaagtcggcttgcaatttacgaagcgcatcttcgaaacgtttctggagaggaacagcaagcaatgacgacagttcagatggggaatgggcgcttatactgtgctcgatttgaacttgatgaaaaaaaaacacctcgatagagacttaccttgatgataacatttccactcctctcaatctctcccttctttttaatgacggccgcttcgagatccctgatctcttcattcaagagtttctgacgttgagcgagttgaacagcttcttcgtcctctgaatcagcgtctgagccttcttcttcatcttcttcgtcttcttccggctcatcatcctatttaaagagagagaaaagtagaggaaaaacgaaagaagagaaagagagacagaaatcatgtgctccaaagtgagtgaacaatatgaatagataagtcctgagagtgtcgtgtacgtacatcatcgtcatcgtcatcttcatcgtcgtccttctcttcgtcttcctcatcatcgtctaactctttcagccctctgttttgtacatggcggaagacgataaaaagacttttttgatcaaccaacgagttcacggaccgaactggtatgaagaggataaagaaagcctctctccgcttttcgaacacgtacctagtcaattcagctgccagatcgaacccgtcctctcctccatctccgtcctgattcataggcgtcattccgtcacccatctccgaaccagcatattcgcttccaccaacgagtagattggtcgaaggtgtggcagcaggggtcaaaagctcgctatcggatagatctgggtcaatgtcttcgagaatttctattgatgatcaagagtagaagaagatcatccggtgggttgagttgggagactcaagaatgaaagacacccagaatttagaacacaatgaccgctacaaaccataagatgtcttttcagctctagagtcttcgtccagtagtttctcgacctcttcttctacgatttcgattgtctgtcaaggaaaattaaacgaagaagaaacaataaaccacaactccgaatgaaaggataacgaaaccaaaagaatgaggatcaagacgtactcttcgactaatcctttttcgataccttcgctttcggacatgcctcaaagggggtgtaattccatgaggccagatataatcatccaaattcatctttccactgccagaggacagaccatcctgtatcacttcggattcgtctttgataggatgggtcacaacaagcatctgtttgccaaattcagcccaaaaagaaaagacattgatcagtctgagcgtttttctctcaagaacaaataggcagcgcgcgtgtatggttgtagttttgtacgacatttgaacatgtgaacatgtcatacctgagaaatgtcggccgctttgaacatctgtttcccatcgagcgtcttttgagactctatgatagatggcaggtcgactagcttggcagcatacaattggtttgataggtggaaggccgctcttctcgagtctgatcccacggacgcgacaagaccgaaatattatcagtttcagcgaacaaacgagatgatcagaaggagagaagacctcattgagcaaacacgtatgaacacgtttgaactgcatgagagcaatctgagaatgaacgggagcgtaaagtgaagttctctacctttaaacttaaaccagatcccttccaacgctttctccttgttcttcccttttttgcccaacaatgctctaagatcttgagcaggagctccctctggaagcctcaggatgaactgctcctcaaattcaatctcttcgtcatcactatcgagttctctgtcgtactcgcccaggaaactgttgtaaccaccaatgccggcttttttcgaaaagttgagctttagctttgaaggtaacacagacggggcaaccttgacagtcggctttcgagctcgagctggtcgggcggctgacggaccagcagttggatctgcagacggtgtcggagcagagtttgaggcttctgatgcccttcgagccggaggttttgtccggttaggaggaggaggcccagggatggcggacgaggacgaggatacggtcggagtcggggtgtgagttggtaatgaggtgaaagctgttggatgtgtagaagaggacgtagatacagatggtgtgctggagtgaacaggtagctgtgatgtggatgctaccggttgaaagtctgactctgaatcatccgacatctggccggatatataggatgaatggatggatggctgatgggatgaggatgaggatgaaagttgggaggtgacgctgacaattcccccgagtttcatctcgtttctctccaccatcatcttcagcatcgatagagccagtccggaatctacaacctttccatacacatcatcatacatacatcgaaatgagcgctatggatatcgatacagaggcatccacgtctgctgccgctgtcgaagttaagccaaaaatcggagcaaagaaaggaccaattaagaagggtaaacctaccgccggtgctggtggcaaaggcgacggaaagaagttcgaagtcaagaaggttcgtattctctcgtgtcttttgatgagtagatgatgtatacatcaagctttctcttcctcgtcttcgatgaaaagaatcagaaagacaggtggcaaacgctttgtgctccttgttactaaagaggttccttgttcttctgatctcgtatctgacctgttccacccctatcaactcttaatggatctatcagtggaatgcggtctcgatctgggcatggggtgcgtctactcacgagcctatctgccaggactgtctttacgggaccttcgcatgttagatcccgtttggggactcttccgaatagagctgacaaccggcctatgactcctatacttcctcagacatcctcgtcgacacatgcgccatctgcaagaatcaaattatggagctttgtgaggacttgaggaatttcctcttaatcttcactttgtgtttctcttctctttccatctttcaggatctgactgtgctcttgacgggtttgttgtgccttcggtgaaaccactctgtttaaatgccacgtctcaggcatcgaatgtcaagcaaaccaagcatcagcgacaaacgaagaatgcactgttgcctggggagtgtgtaatgtatgtactaaacccctatcctggttattgatagtatcatgccaagtatctgtcgcactagctgacgtgaagcacttgttcgtttcgacagcacgccttccactttcactgtatttcgcgttggcttaaaactcgtcaaggtttgcttggtcttcgaatcttatctttatggcgagaccctgttctactagaccacccgtgtctgacgatcatttgttctttggaatatgaatccacgtccatctataccagtctgcccgttggacaatagagaatgggagcttcagaagtatggtttcgtcaactaagctctagttttcctcgtatcttgtcgcagctggatgcttatctcttacctttactctcaattctgtgctccaatagatacggtcgataagctcagcggttccttgaaaaccaacttttgcgagttttcaggactttgggaaggtggttggggcgcatatatctcgagatcgagccagataaacatgatatctaaattacattctctcatccttctatcctcttcttgagctttttttgcttcctactcgtcatctctctcctattccctctctctggtcgcaatgtcatctatacaaggttgagattgaacactcagatgggcatctagtttgcctatcaaaggtgggcgtgcgaacactccagtctgttcacgtgatatgaacgccacatgaaatatcagaccgtcttgttgatcacctcttcgttcgttccctccgtccgagaactcgagctcatccagtcatgaccgctatagccaccaccgctatatcctccccaggaaaggttctcctagcaggtggataccttgtgctagacccagtccacacaggtctcgtggtttcgacctcatccaggttctacactgttattcgatctcttccgccttcttcctcctcgacatccacgaatactatagttgttcaatctccccagttcgaatcagctcaatggagatatcaattcgaccatgtttcagggaggatcaccgagatggaaaatgatttgcacgctggaactggacgaaataaatttgtgttgatcgcgcttgagaagacgatcagagtcgccggagagttggtaggttgggaaaaggtcaatgaatctcttaaagatggatgggtcatcgttatcgtaggagacaatgatttctattcacagcgaaaacaggcaagtgttttgttttcctagttgttcatgttctgctttatctctgcgtgtctaactgtttccaatgggcttttggctttcagcttgaatcccgtgggcttcctctctcctttgactctctcgcccatcttccgccattctcgaaaacaaatgaatcactcgccaacgtgcataaaactggcctcggatcctctgccgctctcatcacttctctctgtgccgctcttcttctccacctcggggcggtctctcccctcatcttcaaaccttcatcggctgaccctatgtcagaagaaagaagagagatgagattggtacacaacgtcgctcagtatgctcattgtttggcccagggcaaagtcggaagtggattcgacgtaagcagtgcggtgtggggaagtcagatctacaggaaatttgaaaaggatgcgttggaagagcttatggaggatgaacaggtgaggatagtaccagaatacgtggtctctcttatcgtctatctatcctatcaatcgcctcgctagtcgcgcactgactaaagcatctttggtctgatgctatgcaaaaagtccgatcgaacattggtcccaaccctgtcgcctgagaacccgagatggaccaaccaggtcactccgttctcctttccacctcgtttcaggttgcttctggccgacgtcgacgctggaagcgacacgccttcccttgttggaaaggttcttaaatggaaaaaggacaacccttgtatgttccttctttcccccatatatttgcttttgtgtctgcgcggctgagctcattcaagagtactcggttatcaaaacatctgactcattcaaactatccttgtcgttatctgactaattgtagcacaagattcttggtcgaccattgatgggttcaatgatgacctcgcttcccagattagagctcttggtcgattagccgcttctgatcctgtatcgtacgagacagctgtccaggacttcattcgaaaagtgagtctcggtcttgtcctacaatgtttctttctctattctccccaatcaagcttgaacctgtctagcttcaacgatcgactatgtatacaacaaccatagaggttactaaccatgctctgtcccgccctatctgtctaaaagcctgcagaaccttcatcgagcaattctcagccgtttatcaagatcttccaatctattcaagccgcaagccaagttagtgcagctttttctttcatttcgagcgtgatagaaggacctgtctctcatcccccttctcctattctgcttgacatcgatcgaaactttgcattggaaagtctatccgacgatcaatgaaattgatgggagaatcagccggcgtacctattgagcctgatgagcaaacggaattgcttgacaaatgccagactctacctggtgtcttgggttgtggagtacccggaggttagccctttgttttgttctaacaaaacttactcttgtcttcctatactttttgtatttgtcctcgttcgttgacacttgcaaattcggccctcttctttggcatatcttgttcctatttttttgtttttatttttgttttccatgcgcttgtgtttcttcgtacagcgggaggatacgatgccctgtgggtcctcattctcgataccccctccacgtcgacagcacaagttgtagagaagacatggacggaacacacaggtctatctgtttgtcctcttctcgcacatgaggatccgatgggtggtcttcaaattcatgatgtagatcatgtcaccggtttgagggaatgtctgtagacaacaaaaagatcaagggaatggcacgaagcagatggatagagccgatggagacgatatatattgaaacttttaatttcctcatagacaatgattgcacctcttgtctataacccttcatggttctcttcctctcgggttgatgctagtttccatgaagggaggaggataggtacgatgtgatgtgtagaatcagcctgtagaactaagaggaaaaaatagagggaagggaagggataaagcaataaattacggtatagcatatagttgcgtccataagtctgacaagacttcaaaaaatagaaaaaggaaaggtatacaacatagcaaacatgcttgaactctataactgaggcgctgaaagaaccgctcgaaagaaagaatagaaaagaaagagaaaagaaaaacgggaagtagacagttgccaagaaacatggtggaaaggttgaatcattcagtccctaactcatcctcccaatcgccttcatcttccagaacccacttgtcacccaaccctcccaccatgcctctcttcgtcggatctctcgtcaagagtgaatctactaacgcctttgcttcacttcctgcttttccactcaacaatcttcccggatcgagtgagatactagattgagaacttgtaggagggacaggtggccaagaaaactcccctttagctatgcggagcatacgagatcggcgggttgaagaaggttccatcgttggatcatcatgtggaggagttccgaacggtaaggatcttgtctgtaagtcaagtaaacatatgtattttagaaagacattacggtggatccaacgtttggtcaggaagactcgagcatctgacggccgaacgaagtacatgggcacgcacgagtagagcaaataggacgacgccgcaagcccagctgtctgtcaaccgcccatcatagctttttccaagaattatctctggcgcagcgtagctatcactcccacaacgcgttgtaagcataaagttatctaacgagaactctttggccagaccaaagtcagttaacttgatgagtggttgatctaacgggggaaggattgacttcgaaagttgtctcggggggtttactggagaaggaagaggcgaagtaagaaggacatctggggtgcaaaacagattaacttaggtgtttgaggttgtctgatatccaaagagtgcaagaaaaagacttactctcaagtttgatatctcgatggactatcccgtgactatgtaagaatgatactcctccctctagttccttccatacccgcttgacgaatcctcttccgatcatgccccatttgctgggctcttccacggtggaaaaaagttcgcctccagagataaatgggagaacgagacagtaatgagagaaagtcgcaaaagaggcgatatgggtcatgatggcaggatggtttattttctaagttgaataaggaaaagaaggcatgagactctctgatgatgcaagatttcatatgtgtctgcagtacagcaagatggacaagcgcgcaccttgaggatctcaacctctctggtaaaagatgtaaacattcggtcgtctcctagacacgcttcttttgtcctatgaagatacaaggtgcgaatgttgtgatcagttagttgaactaaacctcaaagatggagaatgcaagaggcttacatcaactttacagccactaattctgtgcccagccccctggtatcttcgcctatacatctagctccccagacacgactgaacgcgcctttgcctaactcgctgccttccaatctccatgatcttttggaaagctcggttctgtcttcggctgtgttccatttggcttttctatctatttcattttcgagagtaggattctctattagaatgtccccctccttcaggtccggaatgatctgtttggccgatggatcggtgcctggtttctgatgatgattgaacgatggagacgtaggcgttaaccgagaacctagtggaggaattttactcggaatgtacagtgaaggaagtgcagagtttgggtgtccgtctcttgtgaccgagcctcttctggagtccataaagccggatgtggatgacagcgatgttgtcgaggacgaagaaggaagaggaaagtctggagtgatgatcccctgactctctttctcaaaggagaagtatggtctggaatcaaacccacccagctgaccgcccctgtgtctgtaggacgcatcagacacacttcgaggatgattgggagatcttcctgccggcccggcaccaagcccagtcaaccgtccgctgacggaaggaacgtccaatccagctcgcccaatacttcccgcacgtgcgagcgaacgtgcaccgccagatgtcccgttcagtggcttaggaggcgtgagagtctctgatggttggaatgatcttgaaaagaaggagtctgtccgggaggacgtggtggagatgatggagtttgatcgcgaaggaggtgagctcgcctgtggggcaggtataggcagcgagatcgtgtggtttgcttctggtgattctgttttgatttctggcggtggtgggcgtggaggtgagggtggtggtgaggaaggttccgaagggacaaccgaaggcgctgtcgaccggagaggtgtagtggaaagagaggacgacgatgatgacgaaggagaaggggacatcgatgacgatagagggtgatgtctcgaatggagatctgaaaaggaacaagagctgttcatatgggttaccaacaggcgtgtcaggcaagatgggatatatgtattagaactatcggagctgagacgttggttcttgcggaagaaaagctggcgagatctacagttgaagtggtattgaataaacctgctggcacttcagaggcatgtggatgtgagatggaggataagacgtggggatgttctatgatgctgctgttggtgatgatgttgatggtggtggtgatggtcaacaggtctaagggtcgagtcactgttgactttgttctcctagcgttcaccctcacattacccatgtttcatttagctgcctccgcatcagcaacacttcttccaacaagctctttcgatagattacccacccagagcttctcgaggcatattccctattcgttcactttacctcctactgcttcttcatcctcctcggaggtctcggacacctctcaaccggtttctaactctctacccagaggtccgattcctcatataagaccgagaccaacggccagaagaacaatagtggcaacagcagccgcaaaccgaactagaattccttcatcctctcgtcgagcagctcaaatatcatcagcgaggtcacaagcgccgaggtctgttctggtggatagagcaagtagtcgtgatgtagagagagctcttgatggaaggttacccctcggcatgaatctcgtactcgaggaccaagacttgagtgacgaagagcttgaaattcttctcaaggttgtgtttcctttcttatcctctatctgctctcaagtctgcttgactgatgcatctaactctgttctacatatatcgatcactagaatcgagaaatcagggattatggtcgaacgttcttgatcccaataggttgtcgacggacacaagaagagatagacgccgtcgttcgttccttccatctgtttctcttttatttattcattctgttttaatccaaaacgtctgtgttgcttccgatcgtatactagcaatcacgttccccatcacccgcccaagcctcgaatgctgaagatcacatccacatgcatggcagagtccaagatgccctggatacctcggcaagtttgaacccggatgaacaacctgatctcgatagagatatctccgacgaagatctcgatgagaatgaagacataagcgaggattagaagtagatccggataacttcagcagattatatgatatgtgatgtattatcttgtgaatagcgcgggatggaaaacaaaagctgtaaatgccactatgaatttatagtttacaaccagagtgcaggattacaagcaagaatgctttctttcgcgggcaagcaaagacagcggtgaaggagctaagagagggaagaccaaacctaagaagaaggagaagaaagaagaaaaggtagaaaatagagatgcaaggggaatctatgctgctctaacacggccacctcgccatgggctttcagcccattaagaaagattccaatccatgaggatctttaaagtcgtgatggaccaagctaaccagccagtactcatccgcgattccctccaaaaacttcctcggttgagacccagcaggatacaggcaggaccaatcctgccagatggaaaaggcttcttctttccaagagaggaacgaaacttcttcgatgatggttgattgtacgatctcttgaccggggaagattgcccaggtgacgacgttcacgtcctctggtgacatatttgttcggaactcaccctgtggcgaacgatgagaataaaccgatatcatcagttcgtgcgcgagagagatcatctgggttcaaaaagagaaaagaacaaacagatttattcccggcatagaacgtgacgacacccttgaagtcctttgccttctcctcaatctctctgacctcagactccttgacaaaaaattctacaaaactcttctggaatatatacccccctcttggaccaaacccgtatatcggatcttcgctcggtgtgccatctaaggtaggctgagagcctacagtccaccaacccttctccggcgagtttaatcggagaagaagaggaaggatcgcccgagattcggattctagaggagaggtgcaccatgggatggaagggatttcgctccgcagatacgacgtaaagagctcagatatggctctcgtgttagacggacttccccaatgactcagcgcttcgttgggctatttggaaaaagaaaagaaaaaagttcccttcactcagtgcgtgcttgataagagcaagaaaagagaacaagaacacgaaccaaaatctttaagccagctccgtatccatccagttcaccatatgccgggcttcgaggatcggtgaatcgtccgttagggaactcgtcccatgattctccctctgggatttgaccagctccatctatcacgcctaacaactcattctggggttgtgcggtagatgttgtctgttctgtgccggtaactgcttgctgaaaggtgatactcgggatattggccgtgagaggtgcgttttcttgagaaggaacaggccactggatatataataaacaaacaatattccattaataagtgtttctaataaattatgaccttcttctattattattttctgtgttctatcttctttctcttttgtgttttgggctctttctaagttcacagatcgagtagaaaatggatcaaaccttgattccggatccgttcactacttttgcgtctgcgccaggtttgatccaacccaaaccctccaaaactctacgcgcactcttttccagattgagtgtgcagagatgaataccttcaacatggccctcaactgccaatcgcttgcacatcgagattgccagattgacaccgtacgatttgacttgaatatcgtcgtgctatgaagttgacaagagaatatccagagtgatttcacaagattaagtaagaccagagcctatccgagcgccttatcaaagaacaatcaaacgaacctttataggttctaagtcattcaagatagactggggaacgattgctttacataacgtggtcattcgtcggaacgaactgtaattttgaatcgccatcactccagggatgatcggaacggtgatacctgtttgtgacaagaggtgttgatgttcagatcgaagactctatacggccttcgaacaaggttatagagtaactgtaggacgaaccagcctctcgacaacgagtcttccactgaaggaacacatccacgtcgtagaacaactgagtcaagatgaagtcggcaccagcgtcaacctttgtcttgaggaacgcgatgtcatcctcggttgatggcgagtctggatgggtctcgggatagcctggcatggttgcgcccaaagggtaatggtttcttagtactacgtcaagaggagaggctgcctctataggaacaatgctggaaatgaaagagttgaaacgtaccggccacaccgatgcagaacgcgtctccgtagttctctcggatgaaggtgattaagtcaagagcatattcgaaaggctggttggtttgggaaacaggaagcgactgagtgggcgcgtactccgcgtctctgggagggtctgaattgtggtggtttagaaggaagatgtttaggtgaaacgaatttgatatatatgcgaactcgaaggaaaagaagtttcaagtttggccaaaggatttgagaaaccgacctcctcgtagagccaaaatgttcttgacaccacgggctttagcaaacttggttagtcgaggcaaatcagatcgatagtcagtgattcgtatcgacgacatcaattcaaatcaagcccagaggtcaattggaagactcacatccaaagcctcaatcaccttggccttttccatattggtacatgtcaaatgcaacaaacattctacattgtttcctttttcattcttcagatccgaactgatgaatctagcgagttcaagacttcgatcgctggtcgacccaccagctccccaggtaacggagacgagcgctggaccgtcaggcgagagggaagacattcggtagattcggtcgtgcaggttctgcgctccaggttgagtaagtggaggaaaaaactcgaatgaatacgaaggttttccatccgaggtaacataagggcagggtggaggtgccatgttgatatgaagacaacagtagggataggaaggctcaaaatgtgattaagagtgagatttaagctgaaagaaaaaaattacgttttttgtggtttttttttccacaaacttcgatgataagcacgacattgctgagaaagatcgattacaacagaatttacacacccacaaaattcgaacccggagctctagataaaaaaaaacagagagaaaggggaaagagaggcgtcgtccaaggaagaccaagtcgtcgagcagtgtgaatcctttgggtataggtgtatgtctgggtccggctgatgagttgaggttagaaatgacaaaagttgatgatttaacttaaggtagatcaatcaatcaactattaaatcaactatctgtgttcctaccaaaagacccaaattaagggacagcttaccgctaccatctgttcaatcttctttgactatcatcatccatcgagtctagccgatttagcgtcattcatccttgcttcttgtctatctctagatccactcagtatgtcgcacggtcataatcaaagcattatctttgtcaagaatctcaacttcaatactaccggtgaggatctatacgagctctttggctcctacggaccgatacgacaagtccggataggaaacgtgagtttctctcttttgttcttcccattatataccagtttgaccatgtctgggtatgagatggactggtgtcttacagttgtctttgtttatgctatcactgtttgttcaatcgtatcgtctctgtcttttctctgtcttgaaaatcaaattctacagggccaaaagacaaaaggaaccgcctatgtcgttcgttcttctcttacgcctctatccacgtcgtgaagatgaatctttataaactgaccctctacgtttcaatttacacgcgaactaacttacgactgtgcttgctgaattcaggtgtttgaggattatcaggatgcaaagtcggctatggaaaaagtgaatggtttccatcttcaagaccgatacatcgtccgtacgtatcctctctcatttcatttcatattgctttctgctttgtcaaacccgcttttctgatgggtttttgttcttcaactttctcgaccgcctattctacgggtgaccactcgttctttggcaaatatagtgctctatcatcaaccttcgcgtcaagctgcctctgctactaaagctgacatcagagctcgtgaagaagcagtggcggccgagaagaagcgacttggattggacgactaagcgaatacgtagaaagaaaaaaagaggagagaacaatgaagcagatgatggatcactttccctgacgtgatgagacgtcaaattcagacgatgtacgatcaagttgcatatggtggagatctgatttgcagacggggggaggtgaatcaaaagatatatatgttgtatttcatgccattcaactcatttcgatttttgtttgcttaccctcggcagaaagtggagaacgttaacttgtccaagacaaacgaaccaaaaaagagaggagattttcatttgaacgattgacaaagtcaaactctacataatctgtacacgcctaagcaaatgcgaaataaatagcaagaaacaagagaagaacagaataggaatccggtttaaaattgaccagctctcatcttcaggatcccctatgaacatcctgccatgatccgccgctagacgacgaccctccctcctcgtcttccaaaagtcttcgattgtttgatccagaccctacaggaccaccaggcgacagcatcgttctatcttcctcttcttcgttgtactcagtcggcaagcctgggcgatgctgagaatcatgataaagaggggctgaagctccggcctgacgatcttcttgatcatcgtcatccaggaaagagctaacgagaaaaaaaaagcagcaagaaaaagggttcagcaactctcggtatgtttctcatgataagcgacagatacattgtctctccacttactcgtgatatcctaaaccaccagccggtcttccctcttcgtcttccgactcggtcacatccccaaacgcatcatacagctcctttgtctttcctctaccttccccccctcgtctgctttttcgcccactcaacattcccattgcgacgtcctctccgtcacctggccctgctcctcgacgaagaccacctccacttccacccagaatcccatacgcacctcgctcatcatcaccatccatcaaggcgcgccgcctgtttctccatcggagcaacatcaaacctccaccaccaaggccgacaagagcgacgagcccaccagcaccgtacacccatgtcgaaccggatgccaagttttccattccgtcaaagatcccttcgtccaaaccagttgtggcagaggacacggctgaggtcgcagaggtagatgaaccggttcgggtggtcgttccaccatcagtagcgatatcctcgatcccagttttcgtggtcaacaccggattggccaacccagggctattagattctccaggggaagacgcatgatcggatggaagatgagcggttggcttagggagctctttcgtattgttctcggtggctgtggtcgagagcggggggagcggcaaaccggccgaaacagattgggaaacagtcgggtcattttgtgggaaaggagaatcagaatcaccgaggggtagtgtgtaaggtacggctctggccgcattgatagactctccccagagttgcagtgaccatgcttggaatgtcccatttttttcaggatggattcgatcaagaaccgtcattgtccacgtcccgatcggatcttcgtccctgattaatgtagatatggaggagatccaatcatgtcaaagtgcatggttagatcagcaaaccagatgataagaccccgagtaaaattgaccaaccagtgcttcatgctcataaatttccatccattgaacccatcagggtcttcatccgctcttctcgttcgggcaagaacactcttgattcccttgggactgaccaactcaacttctacatcgcctcgtctatcatgttgaatccacacccgagcggtcacatgttcgagtctttcgaagtttgctcgagtgagcatgtcggcagtcacgacgaatgtagagctcaccccggtcggcgggatgaatgcgcctggagaatctcgggtgataatgttggcatcggcatcgatagatgagagaagcgagctttgagtgtgattgtccagatgtacaagcggagactcgaaccaagcttgaggtttcactagcttccaagattctgcatattcaaccagcttgccaacattgatcttcccgtaaccatctgaaggatgtagtaatgacgccaatcagagatatgaacaagccggacatgacttacgaatgcacgtatggaagaaggcggcgaaatgagacatacatttgtagttaaatcttcggccagcagcagtcagctcccaatcgggatcttgaagattgaacgtatcgaccgcgttgacagtgatgtgttggatgtctctccaagtaagatccggtcgaacttgaagggccagtgcatacatgcctaccgcaaggggagcggcagccgatgttccaccatgaccatcggagcacatttcctctccaacgtcagtcgtatgctgtggcacatcaaatatcagcctcaaactcatgaatagtaatgtgaaataaaaaagactcacgatatggtccccactccctgaactgggagcgacagccatgaccgctgcacacagctcagaataatacggatgaagaccctttcggtcgacagcaccgatagtgattgagtaaatactgttagtgtaaccatcaaagttgcactggtcgtccattccacctccattgcctgcagcaaaaacaaacactgatccttttccgtctcgaccattagtagcaccattgacgagggctttgaggataagcccaacaggagcatccatgtttttgccatcgtccggcggaccccaagagcatgagtaaacgtcggttttctggtagttgtagttaagcgcagccgcctcgtcggcgtcagagataggaccagagagaattcgaacaccggcaactttggaggtgtgggccacaccaataccacagacgtcgttcttgatcgctccaatctcaccggcgcagcgggtaccatgggtatcgtcggacagacgaggcataggtaacgggttgtgatcgttgaagtcatacgatccttcggcgtactacatgaaaagaggcgaagatcaaccgtggattataagatactgtgttcttctcgaagctcggatgacaaatgaacaaagaaaacagtcatacgaagttttctttcaggtcgtgactggtatagtcgagcccatcgtcgataagcgcgacatggacgcccttgccggttatccctctgttccagacgtgggtcacgtttagctcgttctctggcatgagtgtgttgacaatatgccactgttttaacaatagtgggtcatgcacatcaagcgtatcttgctgtttgaatatgacgaaccttgaagttagcatataacgtctggtattatcatagtcgcatggggtctggttgacacgtacgagaaagctcaactccgtaaggtcggtctgggccgtcgcagcaaaggtattgaatttcgaaccaaagacatccgctcgctcggaccaggcccgcttggctctctgtctaggtatcatcttctcaaggctccttatctgaccaaatccttccaggttatcatctcttttagcaagccaggtcgactcgaccgaactgtacccaaggtctcgacgtctggtcagctcagcgttctctgttctaacgagataatgtcctttaagttgtccgacctgttcgacgagctcggtacctagaagagcggccgcttcctctggagataaagaggaagaggaagagagttcgagagcgtagtaggtgtgagtagagtatgatctgggtgccgggtggtgtgggagccggcggccataaagattcgagtcggaaaagctgtctgctagggtgagtgcggagactagagtggtcagcgcgagaacccggaggagcatggctgtgtactttcaaaccttgccgatgggagagccgaagattcaaggaggtgcgaggaaggaggaaaggaaagggagaaggcgaaaccaatccagcaccaaagagagtatgcgtgagcgtttgtgtgtgtgttgtgcgatggggcattcaaactagaaggtgtccgggatgatttgttgacttagataattgagataagtatctgataatatagccgatattcaaatacacagtacccgcatcaactcctgtagccacctgctttcgatggtggaacaaattccttataggaaacgcatgtggtgcgctctgggtttattactggttgtgcgccgcatgctgaaggttatgcgatatccacggatgagctccttgatggacatcaaatttctcacgatctacatatgaggcagtcgttttgatacacgatttcgatacacacgaacagccgagtctatacccacatgggctttatcagtatgatccttggcgcagatacgatagtcagcagcggtagcaatctgatatctgtctgtactttatagcatattcttaggacagatgctttagaaacagtgggtactttggtttgaagagttgctccatacctcaacccaaaagggttagtcaccccgtcgcaccgtcttttggaagtacatcttcctttcgctccgcttcgcccgatcatcgctcattcgtccgtcagccgttgcagccagcctgcaagctactcgtcactcactcaatcactcacttgttctctcattccctcgctcactcactcatctgaactcgtactatggccgacgcagatgccctcttggataaagctctcccggtaccgtccgtcaagccgacgtttcctcaagctctggtcgttcgttctcctcttcgtcctcgtatccgtcgttcccagcttccaatgttgtagccgtggcctttgtttattcgtctctgtctctgcctctcgctattgttgatgggaatcgaccaggctggtgccatgtcaggtctttccgtagatctgatgttctttccaatagatactcttaaaacaagacttcagtcccaaaaaggttttctccagagcggaggcttcaacggtgtctacaagggaattggtagtgtgtttgtcggaggagctcctggaggtatgcctccttctcctcttgttgtttactccttctctgttctacctatctgtctatagtttttgcctccccctccttcaatatatcacttcgtgctcattcgacgtcggtttttttaccgccccctacagccgccgcattttttacaacctatgaatatctcaagacgtcactctccaaaga

SEQ ID NO: 2178 - DNA, 4344 bp, Xanthophyllomyces dendrorhous
ctctccaaagatacctctctcccttctgcctttgttcatatgacagctgcttctggtggagagctcgcagcctgtctgattagagtcccaacggaggtcatcaaaacgagagcacagactagcgcgtacggtacgagttcagctggaagtttgaatgcggcaaagagcgtttggagagaggaaggacttcgaggattcagcagaggttttggtatgactgttgctagagaggtgagtcgaaagtgtttctttgtataatttctcaacggaagagaggaggagactcttgcttttttggatccacatctgattagacagcatgcactgacctctgattttcatagattccgttcacatcgatccaatttccattgtacgaatatttgaaggctaccctcgccacccctgcctacttagatagacccactttgcctcatgaggccgcgctctgcggatcagtcgccggtggaatcgcagctgctttgacaactccgttggacgtcgtgaagactagagtcatgctcgaggtcaaggttcgtgttgtctgtatctgtagaggttgtctcttgcgaaagattcacatgtgttcactgctcaaatctgactgttcgctttttttttcctttgcgcaagtacagggatctgccgtgcctagaggtggatcatcatttctctcgatcccgggtcggatggcaacgattgctcgagaagaaggtccaagagcgttgttctctggagttgtccctcgaaccctatggattagtgtaggcggagcggtgtttttgggagtgtacgaggctgctggaggggcactgaaagggatcatctaaaaaagcgttttctttgtattctatctcatctggagtagtctcaatttactactctcaagaaggcatcgtacggtataattgcaatgacagacaccaaagaatgacgagtacaggaaggaaaaacttgaaagcttttatcctgtaaatccaagaacgacacgccaatcaggataggtctcttcagctttggtcagaccttgcgcttcgatcaacgggaacaacaccgagttgatcacctcgtagccctgtaaggtaattttcagccaaacaaagagacgaatgagtcggtcccgaagtggcgatgatagaatacagtcttttcaagcatataaaacgcacctcagccgtcaaatgaagtccgtctgttaatagatcgtctaggtcgccgcccttcttccggtatgcgtccattgcctcccatgcatccaccaagattgtcccttctccactctcagcggccacctctctaacaacctgagcgtatctacccgtgttttcctcactcctatctacagtatcattctctctgaacgctgcccatcgaggtgggttcggaatgggaggggtaatcaagaactttggcacagaagttggagcgagagccaagatagcgagcaagtttgctcgatattcttctatcgagacgtgctgaggatttccagaggattcaaggacagcatcattcgctcctagccagagtgtgaggaaggcgatcggctgagtggccgacgaacaagtcgagttagagggagcaattatggttttagcgataggaagaattgcggatgtattgtatcccgcaaagcctcgattaatcacatcgtgtttcctgatgaacaaatctgtacaaatatccgagaagtttcatcgacaaagattaagaaggaaagttaataaaaattcgaaatagtatgaaggaagaagctggaacggaccagataatctggcggaaaggccaccgggggtatacgaatattgggtgagggaatcaccaagaagaacgatcgccgcctgattttgaatgagagacatctaagatataactgtcaatgagcgcagagtaattgatatgttcgtatatacgtataagaaagagagatggaggggagggaaagagatgtgaagatggattcttgtgtccgagacatcacggagccggactgtcagtctttagtccagcggtaaccatggtttccatatctgcccagcccagatttcattttcagctttctcacccttcttgggtctggctctctcctttgtacacacttcaactaccacaccttgtctgaccatcgtcgatgacacttcagttattctacctcacgtggggaacaacccatggttcattccgtcttccggagcttggtgcgtttctattcatatctctctacctcgcttgaggtagaactatatctcgtcttctattctgtttccctattcattggccgttctcttcctcaatagaatccgtcgcaaagctctacgacatcaactttcatcttcctccgttctctccgaacgttatcgagaagtacaacgctcaaggatgtggactggatgaggagtgggacatcgaaggtcgagctatcttggttcttggactagagaaagtagaggatgcgttcaagttgggtgaacgaggtgtaggcattcggtatgtgcttcacgttacccagagttgcttcctgaggacgaggagaacgaaggtaacaaatgcatgatctaaactccctcgtgtgcatatcttatctcacttccttctcaatcgtagttcgcttcacaaactatacgcgcttgcaccgacacttgcaaccctgcacaccgtgctctcccagttacctcgcacaaaggaggcccggccgtgggatattgaccttgaaggagatgggtcaaccgagcccaaacgatggaaattcagattcgatagtttcgcaaagatgtgggactcccaaacacaacagtacgtgttatcgcataagcgctcgccataaagagaacctcatacacagggacgtacacaacgtctatggaaggtgactgacgaatcgatggtggaaatatactggtttgaaccgatagagaaaaaatgatagcgttcgatcatttggaactcaagggcaagcctgatatgaagactcctgagttggagtttggaatctttgaagaatgtacgtgaagtatccttcatcgtttgtctctcaatcgctagtctggcctgggtaaactgataacgaccgttttctttttcctctgctactcatgattagatcttgatcgaccgtctcctgccaagccggacccgagtgcaactcttgctttgcctgagatggtctactacggtcttctcgtaagtttcctttgttcccgctgtacttgcatcccgcgcgccaaattaatggatcaactgacgaatctttattctgcagacaacgcactcgactgctcgaccgcttctgactcattattcgcttaaaaccagacctcatattggaaacaccagtatggatgccgagatcagtttgttgatggcgaatcaggccttggctcgaaatggaagcttcgtgtgggacccattcgcagggacgggaagcatgctgttgacctgttgcgttctctctatccatcgctatattagtctgactttcgatgggactgaatgctgatgcattggctcgaattacttatctaggtgcccactggggagctttctgcgtaggaagtgatattgatggtcgacaaatgcgagggaaagagaagggcaagaagcgagcgggtaagttcaagaactctgttgtatcactgtcttgctctttctctgtgaagtccacccatctgacgtagatatggtctttgttttggttgtcactatcattcattttctcgatactcgtaacataggtacccccggaattaaactctccgccgcaaagtatggaactcaggatcagatagttgatctgttaacttttgatgtgaccaaaaacccgtggagggtcggaagaatgtttgacgcgttcgttttcctctcttctctttccgccgttggcccttgttctgctcgcgagatatccgtgattgacgccttaatcattctttgaatcttcaaaagtatcgtgacggatcctccgtatggagttcgagcgggagccaagcggcttggccgaaaagatccttcgaaacttcgaaatgagccatacttcttccccgaaggtcacccggacgctgggaaggcttcttacgaacttccagagtgtgagtcggccctcaagtgatgcgagaagtgaaggaggtcgaggactaattcatgcattggtgttgccttacaatctcgattagaccttccaccgttccggccgtatcagatctcacatctggcaatggatcttgtccgattagctaggtatgcgctcaagccagggggtcgattagtcttcttcttgccagtggtaaatgatgagtacgagagtgtggacgtgccgacgatcgagggtatgaagttaatcagcaatag

SEQ ID NO: 2179 - DNA, 18283 bp, Xanthophyllomyces dendrorhous
cagcaatagtgtggaggactttgggaagtgggctcggcgtgggtgtctttctactttttttctttcaccgttctttcctttcctctctgttctaataacaactttggcctgacgttctgtctaactctctatctgagcaggattgatcacactcgagcttaatatcaacgctccggctgtggatgcaccgcgattcgattctgagagcttcttcgggaccccttccacttccaaagaggaagccccaggagacgactctgcgcctagtgaacaacgactgcctggtcaccacaacttccgggagaagttcttcaccaaggtcatcaagtctgcaagcactggattaggaaacgaagccaaagctcagtctgagtttgagtctgagagtgtggctgaggctgtggatactcacagcacgtgataaaatgtgttaaaatctatctggtggggcgcagcactgggtgaaaccatcttgccgtaaccacgcgtttacctctctggttcaacatcttctcgtttgacacaagcaagagagcaactaagcaagggtttacaacctcatcctcttctaattccttcgtcaaccagcgagcgagcgagcgtttcattgtctgttgtctggctgtttgtccttgtacatatcttggttagcttcatctgggtcttagctacctcgactcctggttcattttctctcccaccgatttcctctcatgtcatcccggcaacaatatcttcaattcgttccttcgccgagcaacacttcttccattcagccaggacaatctttgagttcaagctatccatcatctacacattctcctttatcaacatctatgtccaccagtcatcagtcaagtgagaggtctggatgggcggccgaccctgccacacatcaggtcaaccctagtcaacaccccgccatcagtcaaaccgggggagatccgacgctagatggtctagaatcggtctcgagggttgatggttcatcccatcctcagcctactgatggccttgtgtcttcaccaatgggctcggtcgaaccgactgtgtcagaacaattggttgacgcgtcgtttgaagccgcaggtgggtctacagaatcatctttctctccagtgtctcggttacgacgcgacgacgtgagcaattgaagggcaacggcagcaggaacagttgtctgattgatggaacgatggccatcattctaagagcgactgctttcaaatgctcaactcgtttcggtaaaggtatattgaccaattggctgacctgtcctgttctttcgatctctatctagatcccccaccagtcgcgaccgctggagcagctccatataacacctcctatcagcctcctgggtccccattttcctctcatccacctaatccccagtcccaatatacacctcatcattcacaccagcagcaacaacatcaacaacatcaacatcagcagcagcagcagcaacaacaacaccatcttccggcctcaacttcgtcttctcagcagccttcgaacgcgccctctcctgccgctcaacatcacatggtctacaatcaaccggtaggatatcatatgctcccacaatatcaaccaggatatcaaacacaccatgcgcctcctcccaacacatatggatactacgccaacccgcttcctcatccccaggctatgcatgttcaacagccagtcgcgtcaagaagcggatactcatcccctcatcttcatcatccattctatcctggatctccaccaaaccaagcctacacgacgtaccctgctcactttgcgcccgctccatccaaccaaatgcatccgccatcataccaatacattgcgtttgctcctcagcaaggttatcgctcgtctcatgggatcttgccgggaagcagctctcatccatccccttcgatacatgatcacccccatgagatggaccctgtagaacgacattctccgctctcatatgatcccacaggagtagacgttcattcacacactcatggagtcgttccgcaggacgatctttctacatccgtcaaacgcgtcaagccctcgaaaaagatgatgccgttggaggacgccttgatagacgatcattccatcaaggatgatgcggactatggaccgtatgatacgttaccagatccaaccagcttgcaaacgtcccaagagtttgatcaggaggatggtgatgatggagatatgttgacagtcggcaagatggggtcgaagaggaagcggtcgtccgatcctgggggtagcaaagaaaagaaacatgtttgtccagaatgtcaccgaggtttcgctcgagcatacaatctgaagacacacgtccaaacacactcgcccgacccgccgaaaccacatgtatgtaactacgactcttgtggcaacaaggctttctcccgatcccacgatcttctacgtcataaaggctctgttcatggtgaaggccgtcaatctaaaatgcattccgatcccggtcgagcaacgaatggcaaacgtaagaaatccgagacgctgcggattcaacgagaagcagtagataattatgaacggatcgcggcggtagccgccgctgctgccgctgcttctactgcctcgggctcagggacaagtgtattggacgaaggtggactgagtgaagcaggctctctagggggtgatggcttaattgacccacaaggggtcagtggaccggaagggcacggtatgttttgtttcattttcagcaagtttttccatctcgggcgcagacctcaatcataatgactcaactttttttttctctatacctggggcttattgaatctcagatccgatagtacatcactctgggacaatggacggtaaccaaatcacttctgagcttggcggatattctgctagttagtaccatagagtccatcttttcgaaaaaattttcccaaacagcagacggcccagaatcgcactcatatatagtattatgtctcgacctaaaattcgtagctattcaagatcaagcagattatcaacaacagatacaccttcgacttcagatgcaacttcaacatgagcaccaccgaatgcaactcgaagccgttcaagccgctcaagctcaatctgacgtccagacgtacgcccaagatgcatctcaggtcgaggaagaacaagataaccccaccgctgttaccgcccacctggtcgatcctcaactcgaggctgatcttcctcaggtctctataccacaggacataggcttattatctgagaacggggaagcttccaacattccatcggacctatcgagagacctgataagctctccatcagtcgaaccgcggtcgacagagttggtcgaagttatagagaatccgatcgagaacgtcgagcaagagtcggaagcggttactgaaaaaactcctgaagaggaagatgccccggctgtgatgtcccctgaaacattggcttcggatagaaaaccgacaacggaagaggacaagcaggccacctcgtcaccgttgacaagcccagagacgaaagttgagaaggttgcagttataagtgtgtcatcagggctgaaagcagaccttgtggaggatggctctaaccacgaggagacggatggcacgaacggggtctctgataaagatatcaaaacggaatatttagaagagaaggaggatgaagaggagcgacgtgtagaggaaggagctgtcaaaaaggatgatccgataacgtcggtgtctatcgacgatataaaagaggaatgatactccctttctttcttcttgactttgggtcccttggtccgaccagggttcttgatcatgtacaaacgaactgtccctagtgggttctctctctctctctctctctctaccttttttcttctcgatacataagtccatctttcttctgatatccttgtgtttgtcctttccatgaaatttcatagttgtccttctctcttcgagttgttaccattcttgtaggcatatctggcggatatataacctcatatctttcttcgttccgttcaccctcttgatatattttttaaaccatttatttccatccgccaactgctagccttctctatatgaccattctcgtgtgttctgtacctattctacttcaagtcatacccacaaaagattcgagtacacaacacgagcttgctctgaagaagattataatcgtctaaagtccacccatcgtcacagtcacagctccccacatcttagatcagaacgacggagtctaaaacactgtacccaaccgcgactccaccttcatcactctcccttccttttgtcctcaacaacgtgcctacgtttccatcgttatggaccgttccagtctcctttccaaagagagttgcgccatagacgcctagctcggagatcgtctctttaagagcgagtgaatagtcagcagttggtttgtccgtttgggggggaacggaccgaaggagcaggttggacagtgttggaggaggagtaatgagcgacatgaggatataggccgattttgaagggggagatgaagccggcaattttctgaatggaagaagaaaagggagaagagacgagtcaacgaaaacaaatcgaccagaaattagaaagtagaaagagatgacctctacaacatacttatcttgctcagccaacttttcgaggaatggtccgatatctgcgttatacacattgtttcctccgccttctctttgaggcttgagcacatacccaataccacctccactctccttgatgagtctctctccttcctcactcagggttgtgtcgtctccaagcggccagagccccatgaaactatctcttaaagcattcagctcaatactatcatacgtctttgcgccttgttttcttgccgacggtgtcacttccttatctgaatcgaccaagtcgccagacgatggtaagaagtactcgagtactcccggcatggtaagcacttgttgaacctttttgctcccagccaattgaagagcgtacgaagggcatttgatggcggttgttcgttctattcgagttctcgtcgtccagtcggtgggagaggcgtagtcgtcgggggtgtaggccgcgcggtagtagactacagagatcagttcaggcgtattttgaggtgagctggggttgcagtagatgagctgataggaagaatttgtgctagaagctcgttgaagtgtggcgagagaggctctgtgagaccggatgccatgcctgagaagggaaggtcattcacaaattgtgatcagtcgacaagaaagaagaagcgcacttggatagacaaatggataggcaggcaaacgactgcttacgtttccaaaagctcatactctagccaacgctgatcaaacgcattccgttctccatcctgaaccacaaacaagatggatgatctagattgggttgcactatgttcaatatatggcgcgctcgtgtgaagtagacgaaaggggagagaagccttactctggaatgttaaaggccttatgtgcttcggccagaccgttagctagtccatgaatgggtgaattggccggcaggttctttatctggagacatggagacgcgttaagataacctgtttgaagggtaagatatctggaggagacttacgttagcccttgccttgcactatacagtatgcagacgcgtaggaacgatcaagatgatgagatacaaagacacaaacctatgaagccctccgactttctcgctcagagagccgaagctggaagagattgtgttaaactcgacttgtttcatggatagtggctcgttcttcttcgataggctttggtgaagcaggtagtctgatctggagagtagcagttggaggggctaattccaaggccgagggatgatgcatgtgagaaaaacgctggctttggcttacagagaatacgattgagagcgaaacgaggactgacctgcttcacgccctcctcttggctatctttccagccctgccagacgtctctcatgaaactgtctccaccattgtctccccagaagcatcctctgacgacgtggtcgagccaccggtcgtccatcgtgattctagcatagagttcgttataggctgactggaggtttatcacacgggtgtaaaggtctctagggaaaggtgaaggaaacagtgagaccggagcagagatggcggaagcgctgaggggattgtgaacggaagggtctgggtagggcggtcggtagatgagtccgtgggagagagcatagtcgagcgcaagagaggccagatggtctagttctggttgagacagacttggtggccatgcagggatggccgaggcaagtgctggatgagccatgggcaagaacgaggttgggaaagaaagagatcgaaagagagagcgaatgtttgatggccaaatgttttgtcgaggaaagaaacatggacgagtgaagttgcgtgatatggttagggttgtgattagtcatgagctagattaccaagcagctcattatcagggcacaagttcttaataaccccagatgaccccaacttcaaccccgtaaaatcccaagccgcttgtggatgacccccgttctaaacggagattccggaccggtgagagcttataccctatcggtgttttaggccgataaattgaaatagttgaatgataacagggttgttgtcgatatctaagtcaaataagccatcaggaagtcgagtcaatctcgaactactaaactcatcatcggactattcctccaggctgttggacgtggcgtgaggagcagtcggtagagcgggcaaacatataatatataaagacagttgaatactgggaaaccttccgtccgagcacttctctattctccctcaaactaaccattattcttcacccgtgggttgagaaaaaatctaaagaaggacaaaaagaagtaaaaggagaacgagaagaagaagcaaactggacgccaataaaagctaaactccactatgcaactaaccgaaaagtcacccaccagctcctcaccagcacttgacgcttctatggataggtcgtcttcctccacctcgctcgaacggtcggcagagaaacctcgagggaatctcgtttcagatcgtaaagttctttctcaagccgagcaggatgaggccagccgcatagacaaggtatgggaagagctcttctctggtgtcatttgcttacgtctggcgctcccgttgaactcctttcttatgtctctgaacctaggcgctcgtttggaaaatcgacagaactctcgtgccgttcttaaccctcctctttttggtatgtgttatggatacctgattcaagcttagaaacaccacattaatatgactctcttctctttctctcttctcacacaatcatctagatgtcctttttggaccggattaatatcggagtcgctaaattggcaggcttaaggtagaccaagattctcgatgtcttacaatgttgagctgcgcatttgaaatgactcacctctgaccttgttctctacagtacggatctcaaattaacatctcttcaggtaagttaagcccctcgaggaaagaattcttcttcaaacactgtgctaattgcctcgttcgaatctgtccatactttcacagtatactatcgccagtacgatattctttgtcagttatgttgcattcgagatcccgtccagtaagcccgacccagacgatttgtccagattgcgcacatgcactgttccctctactaagcttcggttaaactgccactactcctctcgcttccctttagaccttgtcctcaagaaattccgaccatcccgctggattccattcatcatggttctctgggcaatcactcagactatgatgggccttgtcaagaattatcatcagcttctcgcgcttcgattcctccttggtttgtttgagtctggattgttccctggaatctcaatgtacctcggtatgtggtataagcgaagagagcaatctctccggatcgctttgttcttctcggccgctacattggccggcgcgttcggaggaatcctcggttgggctattgcgaagatggcaggtgttggaggcaagaacgggtggtcctggattgtacgtcgtctcgatggatactctcaccacttcatatatgacgcttctctcatcgctgacatgtttcatattggctcattagttcatcatcgaaggactcatgactttcgtaattgcttgcattgctccgttctttgttcatgatttcccagagcaagctaaattcctcactgttcgtccacgccacgtcaagtgttagcagtgcctccgttgttcctcttcggatctcgctaaccatatctgatcactttatacaggaagaggagaggaagttggtcctggacagacttcacttggatacaggagttgccaacgccggaacattcagctggaagcgggtcaaagatgcgctgaccgactacaagtatgtccactgtctatcctctcttttctccatgactaggattctcatttgtttacattttctttccttcgaaatttacgatcagaacttggctctttatgttgatctatatcggttgcgccgagccgatctactctcagagtcttttctcgcctaccgtcgtagcttcccttggtagatggacgacctcccaatcccttcttttaacggtaccaccttacgtgctcgccttcttcaccactgtcgctactgccatcttgagtgacagatacgggaaccgcggttactttatgatgttctgggtatgtcgtttagtcttcatcgccttttacacttacctacgcatgccctctaacctctttgttttcttctttcttgggtggaccctcgatctttgcgttcttgatagtcctctctggccctcatcggatacatcattcttgtcactgtgccgatccaccatcccggagttctctactttgccatcttcttaaccgtcgccagtatcgctcctcaaatcgccattaccatcacttggacgagcaacaacttcggaaaccactacaagaaagctatggctatgggaatggtgttcagcctgggtaattctggaggtatcgtttcctctcaggtctatcgtccgaaagatactccctcgttcaaactaggacacggcgtaaccctcgggttctgcgctatgggtttcatctgttctaccatcgttcatctcttgatgaagcgcgagaacaaaagacgagacgagctgtacggacttccccccacacctttgcgttcaggagaggtccacgatgcggatactctccagagacttgggttgaacgataagtcggaagaagaaatcatcgcgatgggagataagagacctgactttagatatatcgtgagtttctttttttcttggcggacggcgatcagtttcgttcttcgctcttcattcaacacagtgactgacaattactcctcctcggcctttattttcttctttcagctctaatccttctgctttctctctttctaatattaccatgtcaaaacatccaaatagctttaggaaaacttgtcagctcgaccgtcctttgaccccaacctttgtacattaactatttcttctcttccttcactctttactctctatatctcatcatgttatcattgatagagctcactagtaaaattaatctgttctttattgatactcgaatcctattcatcgtccaaacctccttctttcgtatctttgacaccctttgtattgtcccatgtgaacatcaaggtcttgtggcagttaacattaaacagagtacatatgctgtgattcggtcgaagcgaagttagcacaaatgctataatatatcaacaaaacacaagactaactatgagagaaagagaggaaggagagaaagaagaaatcctaataacgtatacaaagtgtatagaaggtaaacatagagatagaggaacaatagatgatcatttgaaaggtctgaagaatttagcagatccagactgcagatcctccaacttgtagctacgttccaccaatagaaacaacagagaggtcaatattgtgtactattcactgcaggccagtttcatcgataatcacttacctagcagcatccaacgtaggatacgcgttcgccttcccgacggcctgcgcgacctttacctttgacttcttggcttcaaactccaacaccacaccattctcgaactcgacatcagtggtgtagtgagtaaggcctttctttcccctgaagtgggcgtgttcaatcaagacgatgtctcccggccgaatatcgtctcgccgcgcttgaacggactttccggtttgatggaagataaggtgaccaaatgacatcccgtcctcggttggaggctggcaatgagcagcatgtagagtttctcgaacaaatccgagagaggtgccgtcctataacgatacatgtaacgcaaatgcgtgaatttcttgtcgtgtatggccattttgagtcatggttgagatgatggacttactgcaatgacggatttcttgctttgatgcaatgaagcgtttgcgatcttcaagacctcagccccgttcgttctggaaagttgtatcaactccacattggaaagatgaacatggtgttgggatagcgaagtgttatctctaactgctggagatggggtagaagcaacagaagaaggagggagaggaagctcgtgacgctcatcaatcgtctgcgatgttgtctgagggctatgactggagtctgctgagggcggttctagcgcttccagaattggacggcccccatccgaagattttcgtgtgttaaacacacccgatattctcttgagggaagaccgtctattcggtgtgataggcgacgatggcgaagcgattgaagaaggagatacaggcaactcggctgtagtttcgggatgaagtttacctgagagggattcagtgactaaaggatgaaggcctcggctcggacgaccggaaggagggggaggaggagcttcttcagaatccggagacgtaagagtaagaggaggagtagaagattcagtctcaaaagatgggacatcgaattgatagtctccaccagcaagcggaaggggaggggcaagcgatgcctcgttcacaactggtgccaggtggtcttgtgattcctcaaatccatcgatcggccctgtctcttcaggttcataggcttcggtttcctcgcgttgttgagaccgatccgtagatctctcctgtgcggttggtgcagattcttttgatgacctttcatgctcaaccggcacttcaataggcggtggcggaggagcggaagctggctgagccattccaaagccacccatcctcattcctcccatggcagccattttagctctcgccctcgctctcctaacctcatcatcttcctcctcctcttcctcgttgacagtgctcgtagcgttttcggctgttgaaccttcttctcttgttgtatcatcatcttcgttgccttcagcggtagcgacgggcttccgaatcgcaaccggtggccctccaaagagccgaaattgatttggtccgcccaatttggccatccgagcagcaatagactgtcttcgagcggcttcggaatcggcatcagcctcagttgattgtgaggtgacttcctgtgtgttgtctacatcgatggcttccacctcagcccttacaggagcaggagcgggtggaggtgataaagctgaaacaggttcttttgagagaatcggcgatcgcacaggaggaagggaaccagggttggctgtgattttttcatctgacgaaggaacagggacacttggtaagggcacagcaggccgctgacggaaggaagatggcgcagtacttcccgaagacgcagcggaagaaggaacgttgccatgggcggtatggggtaatggtatccgagcaggtggtagaggaggagctacaaaatattgtacattgtgtcagttcttcaaaattcttatgatataaaaccaatcactactgaccctcctgttcgatttcggactcatcctcctcgccttcctcaacttcagcgtccgcctcttcctcggcagaggtactagcatctatatcggtttcctcgctcagaacaggggcagatgtaggcagaggaggaagcatagaccttcttctcggaggtggaagagtagcagaaactggttcatcttggataatgagatcaatgtaagtcaagtcagaaaagcgcagattatagctcaagccaaggactggaactcagcagagaaaaaaccctattaaccttcagtttcagaatggcccaagccttcctcctccgtctgggcaccttcctcttcttcactcaagtcgatattcttcggtggcaaagggggcaatatcgtagatctaggaggaggaaggggaggtgatggatcttcgaggttctcctcttcatcctcagacaactcttcggctggcgcctcagagttcgcttcttcttcatttcagttgaattcgagacgatgacagagtaataaatcatatcatcgatcaagaaacaaaggaagaagttggacacgaacgcaggaaaggagcaggacgaattagagggagaagagcatatgaggccatgtcagaaaaacagtgctttaaatcaagaggaaaactgaggcgaattgataggaagaagtaagaagtagagtgcggtagccatggggaaggttatgatagattggagagttgcgtgcttagggcaatgccacacagttaatgaacacacgagagagaatcaagaagagctcgtacccttctctatatcctgttcgggtgatctagagacttctccggacagagcagacccttgaatatgctcttcgtttccgacaaagccaatagaggaaggtgtcttaatggtttgtctgaattcggcctcgtctaatttgacgaaggattctctctccggcaatggaattgatagtttccttttaggtgaagccacatctacatgcgttgtgttcgtatgagagtggactgaatgaccgtccgactcaactacgacggggttctcctgagtatggtcaatcgaagaagcggagttaacagcggacgggtggacctcaaggttggtcgaccggggttgagtagctgtggacccaggcaaatccttcttggtttcggcctcactagaaaccaaaggctgatcatccatctgttccccctcctcaggtgcttctaaagcgattccagctcgctccgcgccctcaacgccatgttcgcccttagccaaggcttccttctccgcgatctctgccttctcttcatctgttttaggataaggaatctcttgagggtttggggcacttggtatcggatctgatgctttgggagtggcattgggcttgcgtcgaggaggtgctgcccgccgaggcatcgcaggaagaggcgcggtggcaggagtagcggagctattgtcttctgcttgggttgacaaggtagtaagggtagatgaagacggctcgctcgcaatcgaagcttcctcagtagttgtgctatcattaatgttttgttttctgataataggagtgggtggcggcggaggaggtgcaaacatgccacgacctcccagcttagccatacgagcagcaatagcggctctgttttccgttgttgttgtttttgttgtcattgttttcaaataaagtaaaaagaggttgcactcagcgacggatgttaagcataaacgattgagagcagttctagaactaaccgtctttctttctccactacctcctcgtcgtcgactgcggctggctcagcttgttcagcttcagttagctcaggaacgacttccttgtcgcctgaggatttgtctatcgtagctgaagtaccggcctcggtattctcttcaagtccttcgttgctcttcaataagtcttcgccactcttgagcacagagccgtccaactcgtccctactaacctcctcaacaacccacttagacttcttcttttcttctggctggaccagctcagagactggggcagaaggagcttcaggtcgcttccaaactctgggctttccagaggggacaggaggagggatcggagccgctccacctatttttccttgcaatgcagccattcgttccttaagagatccacccttggtgatggattctttagcatcagaagccgacattccacctggttgagaagctggtaaggtggttggtggatgagcttcatctgcgcccaaactagaggtagcagattcgaccttgagagaagtcatcgattgctcggctgtagaagaggaggagacagccggcttgtttttccaagaccagttgccagccggcttcgttcgaatcggcgggggaccagaagtcgctggggttgctttctgttgaaacatggccattcgatctttgagggagcctccagacttgatcgactctttcgcatccgaagcgctcattccaccaactttgacggctgaaggaggcggcgaagcaaggatgggcgcaggagatgcagccatattgacaggaggatgagagggctccagtgaaggcgatacagtgaccggagcggctggggtaggcgttgagatatccgaaggaggaggaggaggagataaagatcgagcaggttggacaaccggatcattggtgtggatagggaccgtgttgtcgtcgacgatcttcttcgatgagatgtggagaggatcctggctattctcactctttatgggaggagagttctgaggaggaggggaaggtgtccgattgatgatgtcatctggtttgggaggaatagtcatgggagttgcctttggtgcctctgcgaccggagaaggtagcgattcggttggcttagtggatgaaccgtcttcctgttcagagtctgttggggctgcggtagaggatgattcgctgggatcgactttgatgacaaattcctaaagagaacaaagaggaagagaaacggtgagaaacagacaaccgagagtcaacagacagccaacatggtgaaaatgcggtcacgagggaggccgcgcctccacatgtgtaactcaaagctggttgaccgaacgaacctttggaaagatacctttctttccagtctctaaaatctcgccaaggctccagtcatcggtttcaggtgctggtccaagtacgcggattgcctggtctgcatcaaaggagaggtccgtcgagtgaggagagttgtacctcatgctgagaagaaccaaccacggaggcagaggaatcagactccgttcatctcatccaatcactcaatccgaaagcaaatgggacgagatggagaacctacatggacttgcccacccacggaaaatcggacatgatgctgtgtcagtagaaacggaagggattggatgagttacctattagaaagtctgggactgatcagaaagaagagagatgagaaggaacaagatgaaagaaactagagagatgggagttatgattgtaagagagcgttcagattatcatggcggtgtattagctcattgttagggttatattgtatgtcagtctcattccagtctgatgacctggtggcaggcttgtaaccaggcgatgacgtaactcaccgatgagctgtccgtccgatcggtccgactaggaaagatcggaagaccagggaatctgggcttgcccactgcttctgtatttttgttagccttcttctgtatccagaatctaaccatcttgaaagaggccagacatcatgggcttgtttagatctactacaagcacactctcaacttattccaagttctcatcaatcccaaaacttcctttctccgatattcagagttttccagagacacttttgaagagcccgccgagatcgctcgctgatcttcaatacatctacacccactctcatccgctctactcagctttcctgctggtcgtatggaattctgcgtggacagtaagtcgagtgtttgctatcttgtgtgatcctgtcgcaagcaatggaaaccaatggaatgtgccgacaagatttatatcaccctattcacgttcccctatagtggcttgcaagtgagatcaccggtaatctgagtcaggtcgatagggtgtggacatttttgcctgttatgtaagtctagaagaatctttcttcttcggtttcaacacctgtcgttttatcttgtttcatctaatggtcacactcgatccgaacgtaaacacactgacataaagttcgcaatttctacaggtacaccatccatttcacgtttcagcctctgatcgcccattatctatcactggcttcagacaaccggcctcctatcacgctgaaaaactacgaagagatcgtctcgtatattctcgctcataccgatcacaggcagcttctcatgctcgccacccagctcttctggtcggctcggctaagctttaacgcatatagacgagggttcttccacccaaacagcgaggattatcgatgggaggttttgagagacaaggttcccaagttccttctgaagatctttaacatcttgtttatcggtatgttttttccgtgaatcgatgccatttagagtttggtgcttatatgaatttcaaacctctatgctctgcactttcgaagctatcgctcaaaacgttctactactaggcatagctcttccgtcttactacctactagttcaatcaaaccctactttatattcttccgcgctctctaaaaaagatgctcaagctctcaagacgaattcgggtccgacgagagccgattgggtgctggccggtgcatgtgtcgcttgtgtgatcggggagtatctctcagatggaatccaacaggcgtatgtgataaccccactactttcctcttatacggatcttctttacgtcaagacagaacatcgatattagatggtttcccactaaccttgattctgtttatacgtttctttttaattcaaatcctggaatttctcaagctaccaatcttggaagcacactccagatgagaagcgagcgaagacaaaaacctggacggtacttccgttcggcctgggtcccaaatcgttatccatcacatggggagagactgatctgagacgagggtttgtgagcgaaggtctctggagttactctcgacagtttgttctaattttctgtattctgtgtttgtgagtgcgggtgtatggccttgatactgactatccgcatctgatgatgattcatttagcccggcgtttgctctggaacagtcgttctggttgctgcaaggcttgtttccattagttcatctgtcgtcttccgtgccttcgggtttccgccagctccggaaccaaatcgcctcgagtgatcgtcccggatgggaattgatcgccggctctgcgactagtgtgccgtggtggccttttgccggtgcgcttgggttgatgtctctatttatcgcgtcgacgtaagtaaattgactagcttgatgtgtgagccgagggttgtactaattccctaactttggctgttcttctctttatctttcttggttcccgtagacttttcaccgagtacatcacttcgccaaagtaccctgcatacaagagagcctatcaacgacgggtgggtatgttttggccattggatacttatcttaaaaggtacgcttatgagatatcttgtgaaccgatgaatgactcgactgattatggtttctctggcggacctttgtaaacgaaagaatctggctgagctgcacggatgggaactttgcgcgaagaaagctagagaccgagctcggctggtcgaagacaaagcgggactgacgaggggatatgtcatgattcaatgttcggaaggcagagttcactcccgatttgttgattggaccagtcaaaatccgtgaacaaaggagatcatgggcgagtgatagaatgatgttgagtgtggttaagaagacaaaagatttcggatgcaaatgacaaatgtcagaaagaaccggattcggaaacttaacttactcctctcggccgatctggagggatccgatccaggccgcgcacgttttttttccctttgagtttccgtgccgagcccctttgatggttttcccgagcgggctcgttacggccgatccgctcgatcggccaaatggtcaccgattaattaacaacacaagccgaaattccattggaaagggaggggaacagcctgaaaagtgtttcattaattccagccacattcacatgtgtacccttggccctgtcagccttttccttttcctttccctttcccttgtcgtatagtg

SEQ ID NO: 2180 - DNA, 3442 bp, Xanthophyllomyces dendrorhous
gccctatgtacgacctaatccgtaccctctgctaagtcggatcttgtaatttccttcctattttactcaaacacgcgctcatttctggttgatccgtagccgatggtgttgttttggccttcttcttccttccgacttacgctttgatgtcttggacactttcttctggtcatcgttcgaagtggcttaatgcttctttatatatcaaatagaacgattgtataccgcaatgtaaacatcttatcaagagcacaggaagaagaacaagaggatgaattgtaaaaagaagagaaaaagagaagaagagaaaagcttcaaaagaataaagacatttctactgaacgaaaatacaaaatgagataaaacaatccaaacaagccgctctaaaggagagagagaaatcattgccgcgtttatttatcttctgatcttctgcctttttgcaagctttgccgtcttccttttcagtcgatcgtcaatttgcctttccttttgagcgtctccacaagcaaaatttcttcttctgcgcgttttgtccctgccttctccccgcctttcccatcgggtctcttcgcttgcttgcccctcctgagtcatccggcccgtcggctacaatcgatgggcgcggatggagagccagaatagagggccagcacggtttatcgaacccatcggccttcgagcgcacacacacacacacacatccctataccgacacacctcacattctcttctctttcttctccttcttctcctcatccgtcttactcttcagtcgttgtcaacctatatccttctagcgtcactttgttccttcgttgctttcttccggacccggtctttaccagctttccatctctttcccgctattctgctcttgtcgtttgctccgagggttcggtcgcagttccatcgggttggtaatcacgataaccattcaatacttgccaattcattaccccttgccccacctttctgtcgttttcttgccagtgtggttagtcttttcgacaaccacaccatcgggcttcctaacccgacaggtccaactcatccacccatatttcctcgctcatcgtccttaccccggtcgcatccacatatccttctgattagaccatcccagtaaaacactcaacacacaatctttcaccatcaatggccgaccaaccggtctctctacctacagccacctcggtcctgctcgagacatctgacgacgcgtgagactcttttcaaccttgcccttgggggtcttcccccttgagcactctcttcagtcaggcccatatccttatagcaagcaaatgagattgacgagccttttgacccccttcttagactgattcttctcgagtctgtccgtcaagggctccttccccgaactgtccgacggctcagtaaagcagatcgtgaaagatatatccgggatggggctgttttcatatgggaagagagtaggttttgaatcagctcgagggtctcgcctcttcttgaggttttcgcctgatctctttttcttctccttcttcttctccttctccttctcatcttcaactttcctcgtttcgtccaatccggtccttaacgcgcgatagaggaaacacagatgcagcgctggacggatggaaaaaaatggtcatgttccaaagttgccggtgacttcttggtgtatgaagagctctatacgttcacagaaggatcgagctctcaagccccgtaagtatctcctggtcaccggtcagaagcaaagcctaggagaaatgtggtactgatatattctgtcacgtcccttctcctctccctcttttgtgctaatcatcctgttgagttcttttgttgtcagcagtcgtaaaatcggtaagcgaagaaacaatgccttggtcagaaccaggaagaatactgaaccaacgtgttctcggttaatttctaaccactccctgtacttactcagacaatggcctgatcaaacaaacagtatgtccattgtttatatatcgaatcctactagagtctatttctaaccgttgcgaacaatcctgtcacatcaatttagtgtcaatcttcaattgccagatcagtctcccaaaaaatttcgtaagttccgaatgccaatccatctatttttctctgctcaaatctacgtttaccttctcctcaatcctccactcatcttgtcgcaaccgcaccggtctttctttgatagacgtgatctcttatcattgtccaaaatcgatcgccaagctcacggtaccctcatttgatccggcctatgtcgggctgaatctatcctgttggaaacatccaagcgcttcttcacattcgtccgctatgcccgttgtgccctctgagccatccacgacatctatcccaacaagcatgaatatcccttcctcctctaaacaatctcctttcctcacttcgggttcgccttccccgaatggcacccatggcagttttccacaaccccgccctgaatcagacggtgtatcaaagtggacgaatctaccgccacggaccgggccaacattcccttcggatgagcttcttactcgaccatatcctcctcgacaaccacgttcgaccacattcacccaccaaccaccaaagtctggttcaaaacatcgacgcgatagaagtcgaagttggaccgcatcagaacgatcgagtcccagttcgtccagtagatcgtatccattggaagccatgtcttccgatccagcgcgttttgtacattctcgaccatcttctctacctttaccggtggattggccgcccgttcagccgaccagcggtttcttacctattcctcttcaatcccagatgtcttcctcttccacttccgtcatgtctccctattacaccccgcaatcgtacgctcaataccccacacattcccccaatctccttccgcctcggcaaccaggtttccttcaatcggcccatcggccggcatcgatgccttcgtcgatgccttcaatttcatcctacgagaccgacagcttcaactctaggtgcagcacggattcctctctttttgccggttcagacggaagaacattacctctaccgtccgcgtctaaatcgttaccctcgacctccacaggagattcagacggacaccctaaccaacttcaaggaaacaggctggccgagaaagggtggaagccaggtctagatcaagagtcgaagaggatgctgagcatgttagggttcagtatctaaaatccatgtgttttttcctattttaattcccttcccgcgtttgcctcttcccgtccgtgggttgtccatgcatcagggcgcctttctttgtcattcgttactctgacgggaaacaagtgaccatcatcaccgtgagggatttccctccggcccttctccctttatcttttctcctactctcactccatatctatacccatacacatacacacacaca

SEQ ID NO: 2181 - DNA, 20509 bp, Xanthophyllomyces dendrorhous
cacacacacacatacacacacacacatacacacacaccccttgcctgtatcatttccgctctatcgcttgctcttgtccctatcccgctcccttatttggacttgttcgtgtatgattctctctctgcagcataataaaaccgcgcccgttctgattcatatttgctactctgtcgaaatcttccccacatatagagacaacctaatccatcttcggatgttcaccattcatcagcctccctcccctttgcctttcttatctgcccctccttatcgcttttcgcctgcttactcccttagatcatttcagtcttgggaacctgtatataattgtgaatatctgatgcttatcggtcattgactgttttaaacgcattgataagtacacatctcgtcatcgagtcaatgtgcgagtaaaaatgtagatgaatgagtcggggtagatctactctgtttccttgagcccgctagcttttccctcgaagagatcctcggtgaatgtatcttcaaacagatcatccttcaactcttcctcgtctatcctcttcgagctcacacgtggctggcgtgtcggacctttttgaaaaacggactggagctgaatgaaagggagaatagcggacgtcgtgttctctttgtccgagctgagagtaacgtcagaggataaaggggaggatgataatgatgatgattgaagagtagactggttcgaaggagcagagggggaagagggtgcagagggggaagagggggaagagagcgaaggatatgcattcgtcggaggtagagtcgactggtctagccaacctcccttgagtccgatagatatcacctgagagaggatgctggacaaatgttcaattctgcgcagtgtaaagaacgcagagggaaagagtaagaagaagacgaaagacgaagggcaagacaaacattaaaacgatacatgtctaagatcataccacacccagggaaacgatgaattcaaacgtacttttcttcagcctctctccgggcgagtccctcttcctcttcctctttgcttattcttgccttgacctcctccaatcctgccaacaaggattccagttgatcatcgacatcatcccttcgtttccccgcatttcgagatgaccgatatgcctctcctacgattagtgagataccgacgagaaaaaggaaaccttctgctaatgaattcgcgccgttggccacagctacggtgtacaagagcgaacatcaggtaagtcatacgttttgagcgatttcacatcagtttctgacatacccttagcatcgttgaggggtcgaatagaagcccgagattcactggaaggttcaaaaagaggaattatggtcaaaccccagataccagagacttatttgaagaagaagaaacagcacaaaccccatgacattggtgcgcaatttaacctcggtcgagtgcatgaactgttgagaaagcaagacaagtcggagtgaacttcctgtcatccgattgaagatgaaggggaaaacacaagagacacatacctgggctagagagatacaaacctgcctaaacctctcatgctcggctgcctgctgcttgagtttattagctattggtttagacacagtctttataaacagactggctaaaagtgacacgaggaggtgtcctcagtattgatgttgccgttataaaaaagaaaagagtcaaggaaatcattacctattttaacagatgccattcagtctatgatgaagatgttgataaagaagatgcagatgatgatggttaacaaggagctcaacagatcaacggagtgagcagagatatcacggagggaaggagaatgttgatagtagcgtatgtcatcggccagattcggcaaaagctatatatgcattgttagaggttcatattaggtaatcattccagttctatcgcctcagaaattatcggttcgccagccatgacttgctctcttccttcggattcaacttgattcttcatttcgtctatcgtcctcttcccttggctctataggaagacccggacgagctcattatatcatatacatacatactcgtaccgaaagaaatcgctgtcagcattcatacaacatcttcagaccatggctcctgctatcaagccaaaggccaagttaatcggttccctgctcttttgcccgatatgctcgactctgctcgaccttcctggggatttggataccattacatgcgagcagtgtggacatcaagagcccgcagaatgtgagtcggttgaatcttttaatgttggaaagttttcatattcaggacccaaaagatatacgagggaaacgggatatgtccggttggtatcgatctttcttttggctattggttgactgaactgcatcgtcgtcactttcattgtatgcacagcatacgagaacttgaatgtcaagacccactcgaatccagccgctttcccttccgctttgaaagcaaagagggcgttagtggtgaaagctgaggatgcagagcaagagacatctttaccagtggtatgcaatttctcttcatttatcattatcatcatcttcatttccaagtttatcagatcatacaatcactggtgtctcctggcctaatctagaatgaaatgatcttctgacaccggaaaactcttattatttgtacacgtgaataccaggtcgaagaaaagtgtctaaagtgcggacatatcggtttgtcttatcaagacctacagctccgtagtgcggatgaaggttccacaacgttagtgcaagttctacatttctggtcttgacttgtttgattgtttctcttgctaaaagacagcgcacaaattgttcgacgtcagattctacacgtgcatgaagtgcggtgataaaacgagacttaataactagaaagagagcccaaaatagaaaaataaatacgtgtttggtgttttattatactctcgactatccaggctcattttacatcttgcccatcataaagactcttatacaagagatataaccatgacattcaatcatatccgattccgtttgtttgtctaagcacatttgttacttgatgttgttacactaatatattttcttctgatgagaccacatatatttgttgccattctatggcgcattagtcttgagaggcgcgtttgtctgtattgaccaagcagatcaactccgggtcatgtccaactgttggacatgactaaagttcagatcgtctgctcgattcgtctatagatcagcctactggtctaaagtataacgaatatgaacaaacatataatttcagactcatcgaaaaagatcaagtcggatgtgagagtaaaaaagcctgcacagctttaacagttttcctcaatacccggctctacggctagtctcgttccaccggtccggttaacctccggttaacctccggtttgaatatacattcacgaggcatcgccggatggattgaacattgctaaccagacgttcagagcttataaaaggacaagcaggattcaacatgtttcttcctttaggcacttttcttcatcgatcatctctttcgtctgatctccacacagtctggtatgccatacagtcaaaattatcctcatctatccttcagcaccaatcgtaaacatcttgaaccttactcaccagattcttcaacatattcgtttttggcccaaaattaggtatacctttactctataatacatttacgcaatcaagatggtcagaactctcagctccggttgctatgccccaatccctactttctttgatgctaacgaggagctcggtaagcgcaaccatgttgaatcaggtattcggtctcgaacatgatctctcattgcagaaaaaactggatttgtgcaatcgtgttgaattagatgtcgatacattttcaagacacatagtatatctcgccaagctaggaatgtatcctgtcgtcgctgggtacgattttctccttctatcgttgaagaaacgtgatcgtgaaaaccaaggcgttaatcattaagctatgatgttaacaacaggtccatgggagaggctcaccacctgaccccctccgagagaaagaccctcattattgcggccaggaaggcattggatgatgctgaactagttgacgtacccatcatcgcgggtaccggagttggatctacaagaggcacgatcgagctctcgagagaatgtgcagaagctggtgctgtcagtagaaagtctctgacgacgcttcttgaggtttacgtttaacttgtttactgatagccaatacctttgagctcttccaggattgcgctatagttatcgcctccggtatgaatatgagcgcgcttcctatatcaagtttgtctcgtgactgatcattttatgagctatgaaccatcttacaggatactatgctggagctctcaataaagaagccttgataaaattcttcgttgatgtcgctgatgcatcacccatcccagttatgatctataactatcctggtgcctctggaggaatcgatttagattcagatactatcttagagatcgccaacagatcttcgaacatctgtggcgtcaagctgacttgtggagccgttggaaagctcacacggtatgttggaacgacaatggttgacgaataacaactatgttataacttgaagatactcatacatatggtttggctcacatctaggatcaccggtggtgttagtaacatggcctttaagaccaagaacggagagtaagcattttcatggtatacttcgtaaccacatagttccaagtctgatcgatcgtcttcaattctactgttgttgcaggtttttgactcttggagggttcgcagatttcattctgccaaccgttcttggagcacaagcacaaggtgccatcatgggacttggaaatctttatccccgcgccattgtcaaactattcaaactctccgaatctctactatcgctttcgaagtcggatgagaagtggctgtcgattctcgaacaagctctggagttgcagacggtggtatcgactgcagatgctatctatgggcccgccgggattggtctgtgcttctcttcttgtgatatccaatttgtcgagcagcaattgaatgtttgtttccatccttgcagctgctaccaaggccactcttcaactccgacggggatatggagggaatactagattacctctcttgccttgccctaaagataaacttgatgcaatcgaagctaacgagggaatcaagaaagctaattttgttgagaaaagtctttctgagagcaaataaatgttctattgttctctgtcattacctgtggctagctatatgtactaccccgagaactagtcttcttgatttcatctatgatcgtactccctgttgtgcctcgatgtatattatgagagaatttctggctgttaatatacgttgcttgatatctggaacgattctcgttgatctggtgtcgttctcctccacgtatctaatatggtcgacatcaaagatcttgtgagcgaactgtatttttaacatgagtgttgttcatgttaatttctttgatagttagcccaataaatcctctccttctctcgtcatcatcaagagtcagatagaactgaaagtgtcgaaaccctattcaaaactcgcgataagaaactcttctgaacatagatcaagaaggaatatctcagatggtcaagcctaaccaaacctatcaatgaattcaagagtttgctacatcttatcttatctctatcacggcgatcgggaaaatgaacaatgacgcaaatctaggcttaaaatctcgatcccttgagctcgtccgggtacccctcttcttactttgtacatccatgaagctttccttaccttgctcaatcctccagtctatcagatattatcccattgctcaatctgatctcatttttaggaacaagatgtccactcccgctccatctcgacggtccactaggtcatccgccgcttccgctgcctccgcaactacttcgcccaacccttccctgaataagagtgtaaagaaagaggaggatcaggttgagtcagaaattcctttgcaaccatcaccactaaagagaaagactccagagaaaccgcaggcaaaaaccacgccagttatcaagaagtcacgatcgggcccaactttatcgagtacgaagaaaccttcacccgcaacttccgacaagaatactatcgaaaagggaaacacaccgcctaagccaaagtttgccgcttatcttcaaaccccatatcctgattacgcaagacctactcccgaggactgtaaactagtggttgagaaactgggaagcatccatggcattccaattaggcccggaagtgtgaataaagacatcagcggagcaggtgtgaactgtggagcggttccttcggtaatggatgccttgtaggtctcaagtatactttcttctgattctggacaaactcttatcaaaccgatgatctacttatacgttatcgtcgtctctcatacattctaggattcggacaattctttctcaaaatacaagtaattccaactcctcccgtgcatacgcgtctcttcttgccacctttggaccttcagcttcgcaaaaaaaagctgtcgatctggtcaaggtccaccaagcctctcagcaggaagtcatggagagcatcaagttagtcctatgttcattcagatcatttacatttccaccccgctatcttctcacacaagcatatttctaaacctaggagtggaggcttggccaatgtcaaaagcaaagtcatcaagcaggttttgcagcaggtatgggatcgaaatctcaaacattctccgctatcgtcctcttcggagcatatatcctcttcgatccttacagagacaaatgccacagttaacgtcaagccagaatatacatccagtagtccggactctccgaaggaagaaacgaagcctaccaaggaagaacttgctagcccgccgctcactcctctcccggaggatactgaggataacaaagctaatttacctcgagatgatataaaactcgagggcgaagagaactctcaagaagacgcggcaaagctcctctctttggattatgtccaccagatggatgacgaacacgcgatgaaggaactggagagcttcaaaggtgttggtcctaaaagtacatacagtctaattctttgcggctcttaccaatgaatacattttctgattgatttaccttgattctgtgttctactacagccgcgtcatgcgtacttctattctgcctcaatcgtgatagctttgcagttgatgtgcgtgtaaattcagttcttatcaaatttgccatcccgtacttacatatgacttgccatcttagacacacgtctttcgactgtccaaacagcttggctgggttcccgctaaagccaacagggaaactacatacgaacatttggatgttcgaatccctggtgagctgaagtatgcactccatgtccttttaattgcgtaagtcatcctccacgaaatcaaagctgcaatcagcaaaggctcgaagctgcatgtctaggtcctaaccaaatttacaatttgtgattaggcacggtaaatcctgctcgagatgcgctgcgggtcataccactcgaccttctcttggcccttgccctcttgtaaatctgtcgagtgtgtcaaataaatctcagaagagcggcgctaagaagggcgccaaagccacaagagaggatggcgaggaagggtatggagagagtgaagatgaagaactagatcttgggtcgacactgaaaggagttcctgacgacgttaagcaagaggcgaaggatctggctcagaaagatttgaaggaggctttgaccgtaaaccacggtggatagcaaaagaatcgcttgactctgccctgtcatgctctgatttgcacttgtatgttcgtgtgttgctaccatactttccgaatggcaaatgttgatcatctttaagacgcagcaccacacttcaaaaggagtttaagaattgaatacagaagcgcggtcatacatactattggctttatgacagtatgacgcacgactgagtgcatggtaatgagaaaaatagttaaaacacatatatattctagtattctaaaagatacgcaacaattccgttcgtgaattaagcatatgatgttactatgaatcaaccagccgattgatcagcacctctctaatgccttgcttaaaatcaaacccatccgatcctgtatcttcgataacctctctcgtccgctctaccgactcctctttctcgcgtaagtacatcctccaactcagtaactgctaatctccaagccaactcttcactcgatcgaccgttcctcgacggcaaggaagatgccaacggaaacgtcgattccactgaacgaagctctacagagtgagtggggcgaagtggcatgaacatgtggaaagacggatcggacgctgcggcaccactcaagttcttaggaaacgcaagaaagtgaaggaccgtggatttgatccatggactatgatgcgattcgtagatgatgtcggctttgatggaaagaggaagcgcgttggtcaagcaaagtggcttagagagcggaaggaatacgagccacaatgatctgtcttgctaacttacctccaaatataacatcaaacctttggtggaatggggcgtcaagaccgcttccgataagcgaggacaagtcgcctacgtcctctttgtttctagttccgtccctccccacagtgatggaagtctcaacgtcttgatgaaagaacaaccaatccaacggcctaactagaacctgcgctccagcatttcctatccatgtatcttggttcaattcgctaccatccttgtctgacatttggtcaaagttgagatccatattctttttgagattttctaagacgaggggatgaaagtcagtagcaacaatcaggctatctctgtgaatggattctccaggcaaggagccaagggtgagagaaagaacacccgtccctgcgccaagttctaaaattcgctgtggagaagaggatgaagaaggaagaatgtcgaaagtggaaggtgatttggccagacggcgggcaaaaagaatggaggaaccccaagtctgaacgctataaccacaggaagggactagtgttagctttttaaatggtattcaactatcgttcatacactttgtggacgtcagaattcatatccacttaccctacagaatcagctgtgaaagcagcaaaacgtttgtataaggtcagtttgtatcagtctttgcgcccaaaagtattgttgttaaagcaaaatattataaatcaaacttacgagcctgagagctgtaaggggcatcgttgatagtcaatgctagattcctgggaagatcgacagttcgcaatatagctccggcggctgatattattcgtcgtggcaaattagaaaaatcctcgtagaaaaacctattgaaagacaagggaaagagagcgaaccagttgtgcctgaccatattgctagcaaagctatagttgacacgagaaagatgaacgaaggataaaccgagtcaagatcaatcgtcgtcgtctttaaaagaagacacaagcagagacagccagacttacaagcagcggcatcgaccaccctctcttttgcctctctttcagcctgagcatcatcctcagattcttcgatccagacctctccacccttgacaattcttgtaagccaacctctagcgtaattctgctcgaactcgtcgttcaacagggcgtcatccaagtcttcctcgtatgcgctcgaaggaacttcggagtctgaagagtatccagagtcaggtggtacagctggctcttccttgccagagccgagaacagctgtagaaatttgaacaaatgtacgattcaacacaaatatctataaaaacatgatgaggaaaaggaccgatatgtattccgactcagagtaactcacgaggaaggaagatgctcctcagatgctcagtatgaccgaggaggaccactggtgaatatgccgataggtcacgccctatatggggtaaaaatagtgaaggagggacagggggaggtagcatcggtatagtccgttctcaaatctatcccaaagagtaagatagagaagaacgaagaggaacaagcaggtaaggagaaagccgaaaaaggatggacaaaacaatttgagaaacacagtggagggggtcggaaggagcagggctgagagtctaacgcgtcaaaatcccggcgtgttttccggtataaaaacttaatttgtgaacagcggtgagttcttataccgttttgtcggctaagctttcgctccggtcatatacgattctgtcctcctgttctcgtagacccatctcgctacacactatcttattctgcttcgttccgagaaaacgatgacatcttccgctgtagagagaagccagaccgatattaccgaatgtatgtgtcattgttcacaactctctgcatactgtattcatatgcgtctagttctttgaatactataaagtatcattctgtttaacatccggcatcatcttctcacttctgcagccgaggctgccgtgtatgatcgtcagatccggctatggggactggaggctcagcaaaggtatgcaagtcttactagagctgtcgtcccccatgattcgaccttctaactggtgtctctttcctctcttttgatcaatacttttcttagaatgagaaactctacagttttgatcatcggcctccaatctttggcagcagaaaccatcaaaaatattgtcctagcaggtatcggaagactgattgtgagccttacatgataccaatattcagagaatctgaaaacacatcgcaattggctcaccgacgatgcttaatctggcgatttcttcggaatgagtacagattatggactctcaagaagtcactgaacgggatttgggagcaggcttcttatttcgagaaagagacggggttgttggtcagaaggtaatggctctctcatcatccgcaccaatattcaacacgagcagcctcacaaagtctcatagttgatcgacgtctgtatcctttctcttttttcctatgtagagagtcacagctgctcttcctcaaattcagtcgctcaacccattggtgaccgtgactgccttgacagcaaccacgcctttcatctatcacgactcagcgccagaagatcaatatcagaagatacaggcatatataaaggaggagaacgttgacattgtatgcatcgtagaagcatcaactcaggatgttgtacgtcatggatatactcttcattttcttactcgaagtacacaatcgttcagatatgtctgtttcactgacataagatatccttattcctatagacaaacatcaacgatgcatgcagacaaacgaagactttgttctacagtgccgcaacgtacgggcttaccggatatatcttttcagatttgggggctcagtatgaatttgcagctcagttcgtatcatttaacccgtctctgttgtcccacattctgccgatcagctggtatgggtattgaaaatatccttttatgaatcctgttgcaaatccttaggtccactgaagtcgtcaaagccaatgagtcttccaagatggttccgaaacaagcgagctgtgtcgcttttcgagaattatggatcccggatcatagtccgtttaaagggaaaaacaagaggccgactctggctttgaaccctggattcttttgtgcactattcggttcgtcttttagctcttctttgatcatctctacagcattttgatcgaccacaagtttacatgttcgctttctgcgatatatgctctcgacggatcgtccttagctctgtgggattacgaacaacaacatggcgctttacctcttccgtccagcgatctagaaggtgtcaagatcgaacttcaagcctttgcagaaaaatttcgacagaaatccttcatcaatgtggctgcgttccccacaatcaatcaaactcttatcaagtccgttcttttattttcccttcgtgttatactctcagactgatttctcttgacgtcatgtttggccattgcctccacttagccatcttgctacgcacgccactcacgagttcaatcctacatctgccgtactgggaggtattttggcgcaagacatccttcgagccatctctcgatcagggactcctatcttgaatttccttatttttgatgggatttcggttggagaaggcgcagccaacagcggaggagggattgtcgttccttggggggttagtgtacaagaaaagagaactgcttagctaaattatcgattcacatcattctgggactcttcagaggtcgtgaaaacaagtattaatcaattccgctgaacaaatgtgtctgtctgagtcggaggggggtacgtggctcgtctgcgacagctttgcgagggtgcattcaagatcttctatctttacaaatcactgttatatacatgtgtatatatattttgaaaaaccatacccttaggcatagtgagtgtttcctcaaccgatggtggtcgatacatggcccttttgggctggggtgccctcagaccacaaaccacaaaccacaaagatcccataggtcttgggtctagtctgcccccgtcaacggggcaacctcagccctagcgacggcagccatatcaaactccaacatgttagctttctcgctctcttcctgatgtagggtcaagaggaatatgttgcgcgacgcattagcatctcggttccacccagtctgagagcaagcatagagagcagagaagacatagaaagcgatgaatactcgcgacactatcctgaaacatttaacagacatccaacatatctgacttactcgacagacgcttcgacactcttttgacacccgcgttttgctcctccccaaaaaccggccatggcactcggagcacaccctcgacgtctggagctcccggacttgacaaaccttgagcagcgggaagacccccagcgtggcgaacagcatctccgcagggccaggagtatgctcgtgggaagtcgacgagaaggcgccgttcccgaagtccacaatggtacggggatgttcttacgacagacgaagtgccagcttgtggtccgcttgctcgcggctgatatgcgcacccaagctatgatgtttccggcgtcgggcagcgaacgacgtcacgagccatgagtagggccgaggatacaaggcgagagtagcgctgagaccgatgagactggcagttttggatggatagagatccaaagaaaccgaggtgagcaaggcagtctgtacagtcagcgtgagtttgagaagtacccaccacggagagctgttgacatttccggatggtttttcatccacagccgctgtctccgagggtctcgatccatccccgcaaggcgcctctacgacttgagagagagcgaccactgcgtgccatgatcagccagactgccattgttcagagacatggccagccctcttgcagtcgtgaacagcggcactcgacaacccgggtcagacccacgaccttgttatttggccgcacatcccacggaacatacccaactcggtgtcgaccatcaccttcgccctgccatctccaatcatagtcgataatatcagtgagagccgacgtcggtctcggcgctccagcagacactccgatggcatctttgccaaacgaccaggcaagcgtcgccgttaggcttataaaatgggcacaggtggtttgatttcaatgaatggccagcctgatggcaggctggaaatctgggagctttagttgcaaaggcggcgaaagatcttgccagaatttgagccgtactcttgcatttcaattcaaacacaggggaacgaaaatctacgaggcaactgatgtgtgttgaacgccggaaatcatcctcatcagcgcgacttgtttgtgtcttataagctgtcgaggtcgttgcttccttctttacaagcaaaccccttggatcagacaaagagacgaagagatagagattacacgcttgatcgagcgcgtgcagctgacctcaacggtgcccatctgtacctcggtgtcagggatgtggcttgagctacacgagttcgtaaccttcggctggtatactctccgccttcattactcctccttctggtctgcttccggcgcgccatactccagtgcattctacacaatcttcttagagtttgagaaccattcataagacaggcgttgttggtcccttgtagatagagacctcaagtttgggttctttgttgctttctgcttctgtccttcctgtccttccttattctcccgtccctccttgttatcctatccttgttacctggcgtccctatcaacctcgtccttccgttcaagagcgtggacatcttacatgaacatctaggcccccttgtgtggttgtatcggtcgtaacccttccgatgccagcccagctcccggcctgatacgctgtgccatcgatgaaggcaaactgaacctatgacctatgaagtcgttgtactgtctgtatagtttgtctgactctgacagccaccattatttgagttaggtgaaaggagcaggactcggaggcaggctcatagcaggaacatcgaagaatgagaacacttcacacagtttaaataaggatcgtggttaccttgcttattcaacaatatcaagctcaataaataagtgctcactgtctccgatccaatcgccagaaaaatcgaagcccgaatgagagagcccatcagaagcggctccactacgaatggaggacatcataggcgatcttccggagcccgttaagttctcaagcggaggtagcttatttgaactggtttctgtccaaagatggggcaacacattcatgccttccccagatgccaatgatccccgaaggttcgaagagcggaacgtggttccagggctagctacacctacaagtctagctgagactcccgacctcatgctctggttgattccatcttcgatattctccctccattcactagtactgttgccctcatcttctccaccatcatccagaccaagacctgcccctttcaagttcccttccctctcctcatctcgaagggcagcagcagcattccaggccgtccttcgcatatcagccagaatattcattgtcatctcactattacctgctcgacctgtcgaggagctatctccataggttcccccaccaagaccacagctagacagtggcgaaccgatgaccgcgctgaatatagacgacggctgaagttggttggcttcgaatacagcagcggacagaatctttgcgtatcgttctgtgtttggacaatataaaagacaacaaacacagattaacaatattcaaactcataggatatatggaagagcagtcagtatacatactagcagtactccagtacacactcaagccttggagggtctcaacaaagatagccgtctcaggaagaagcccaacacgtttgatgtaagaatgtgctatcaagccagttatggtaatatacaggaatttgagccgtaagatctatatacatgagcgccaatgatcaggatctgtcttaccaactagtgctctagctgcgacccaaagggtccagccaaatagaggatgtatgttctttacatcgatttctcctacaaatgtcgatcctccgacagcggcatgcctaccaacaagcactgctacttgagctgaagactttgctgccagaatgcatttggatgcggccgcttcggagggcaaaaaggtgggtgatgataccgggggatacgccgaagcagattgcagccttataacggtgctgaaaagaggacagtgatgaactactgagctctcaatctcaaatttttttatcggactttcactcgataccaatggtatattagtagaaactcacgcgtgatacacagtcagtatcaaagctttcaatgcagcgtcatgatcttcaccctgccatcgtccggatcccacaatcttcacatcgtccggtagacatttccaccaatttttgagatcgtcctcaaattgacggaatcggtcgtaccacaaagacgtctccacgggttcgaacaggtccagaggagttcgaatgaaggagtgtattttccctaattgataagtaatcgataccaagtaggcatatgtacatataggtgatgccaaagatggtggcggcagcggttgagaaattaggggtgggagctcttggttctgaatagcacgaagtcacaagaaacgaaatataaagatctctctttcaaagggtggtctagatgtgatcgcataagttaaagaggcttacaggtccagagatccaggcgtcatccttgccaggaagtctacgtttaatgtcttcttctgggaaagcgaaatcccaacctgtcgaaaccgacgcatatcggtctaaacagaagactaaccagaagaggcgccggcgctcttctatctctctccaactatctgtggatctggtagcaggtatcaagagagaaagatcatgaaaagaatgagcaaataggaaatcttaccgaacgattggcaccagccaatatttgtgtagatcacatactggagaagagatggtttatctgtaggatgatatatccttctggttttgcctccctcgacaccgaatcccttctctagctctttgacaagcccgtcttcatctcctaagcctgcttgttttaatccgccagtaacaaggctgagaattcctccccatctttttggccctcctccaagctcacaccagtctagtccgactatggccaatgcttgtaacgtgatcagatttaggcgatccatcgctgccataacaactttttgttgagctttttcgtgataatgattcctggaacaaacaccagaggcggcaaaatgtcgatgattggaaaatcgcagagttatacagataatggcatacgtcagaatagatggtcggctttgtgaagagtgaagcgttgaaggaggttgtggtgtttgaagattagaatgtgcatatgatgacgtgtatgttttctggatggttggtgtcaaatcggaatcgagaatgatgggtgcccatggatggatgtgcttgaaaaaaaggacaacactgaatgaaggcaagaagtgtacattgagttgagctcaaaggcaattatagacgaacgaaaagccccttacagttcttcaacaacatcaccgggcggaagatctggggcctctccatatttgaagctgttcatgggtctatacaaagtcaaaattcgggacttgttagttgatatacgatgaactcaaagtatatagcctatctaggaaacttggctcacatggaactggacgagactatactaggggtttttacatgatcgctctcaggaatcgattctccctcaagtgatgagaaaaggcttctgtatcatgacaaatatctacagttagtcgatgcatgtgttgacagaaggaaagctatgccagaagacttcacttataaggcgcactctgatgagaatcagagtcaagggtatactgccttcagattcaaacagtgagacatggcagaacataacagaaaaaggaagagatgatcctgtcagggtttgaaagatatcgtcgtagtatcttttgttataaagcaatgaaaatactgaccttcgctcagataccggctctatccctcgacttctcctccttttcaccactttctcgtggctgagatctatctcatggccatgatactgaacttgttcgtcgttcgtacatacgggtgtcactgcgtttgctaagtcccacaagggatttcgcgcatactgatctgatggtcctgggctatcaaggtgtgagatcgactgaggcattggagggttgtgagacagatgttcagcgttgtacgttatccgggaatttgagtacgagacaggaaccggcattgtcgtgattgtttgagaagaaaggatagaatgtctgacatcgggcgggccattgagttgattgaaacttgaggtgatacgttgctggtcgtagcgttcttgtaacaatttgattgtctgagaatgttcagtcaacaagctttcgatatccactgattgattcttctgaaagttagcattggaactgagagccacagagactagaagatgtaggacgaacgtaatcgcttttcaacttgtctagaacacaggaacaacaatcgttcaattactattttttattcggatcgaggtgaaagaccacagcataaacccacccggttccaacttttaacccaggtttcattttggggcgatattcctatacggagataaatgcaacacaagattgatgtatgttcagggtttattcaaagcaagtcaacacaaacacaagttatatacatacacacagtctttctaagatttgctctcaaattataaacgaatcgttaaactttagataaggtcagtttggaaatgacatgagagcgtaccgttctttaaacatccgtcacacgtctagagaacaagggattgatgcagctgtgagtcaggtgaaagccgtatgcttgggatcaaaaaggattgagatctttacaggtttttgtccatcacctgaacgaaataacgacggagaagcacaacctcgataaactattcatggactagcttgaggaatggtcaattatggtaacaacatacacttgatctttcgttctctgcatgatccacatctactcggataaaagatttggtaattgtaactaatgtcgagaatgatcgtataatctaactaaatatgtagcttggcacgtacgacgccgtcatttgccttctagttgcgtccaccggccgaatggaagcgacaggactaggagacctagatacctttggcatgagagaaagacttttgctatgttcggttcactgcgattgacttgaagagcttatcgttctgtaatgatggattggacgttggaacgattcaaacgaattgtaccgctcgcaccaatgttggtccgaagctgagcgttagggttagcagctaatatgaatcattttctgtagtccttcatacactacgctgtctgaattttaatcttcgttttaagacttgggacagcttctctgtcagatgactctatggtcgtgtcgttcctttctgactagacacacaaacatgcacatagagcaattagttggatatggtccagatcctggcaagcgagtggacagattgaagttattatattatatcatgatccttctttctttttcaatacaaaagctagcaaacgtcattgtctagtacaaaggaagcttcaagctgtcggtaaagtcgtagaaccaggtgtccaagctcctctggtcatactcgcactccatgctcgttccgttgttcgaccacatcggtcgcaacggccattggcagatctgagcgttctgaccgatgtagtcgcccgccaggtaggtcgcgttcagagtgaccggctcgatcccgctctcgacccagtcgatcatcactcccagggcagtctggcaccacggaccgttcggctcggccgtgtttggggcgcagtgagcagcgcccgggacaaggtacagctggtaccactcggcgagggcagcggtcgactcgttgaacgacataccgggatacatgacctgtcggacagagtcccagtatcggatggaggatgcggtcgggatcgagttgtcctgttcgccatggtagtggatgatcttgccgccggcctgttggaactctgtcaagtcagggttcgtggtgtgaaccgagtcctggtacctgtaccaaccctcgatcatccatgctttcagggtgtcgtacgtgtagccctcgatcgagtccagactgctagagtcaacgagcttgaggaaccgctggtagaactcggcaccgacgccggaaacagagatcccccactcgccgctggtcgagttataggcggtcgcagcatcaaacgagatgtccgcgccgggctgataggaaaagtagaaggcgttcccatcggtgtcatgaaggccgtcgatgatggtctgcacgacggcgacaccctgggcggtgatcgatccgttctgggcaggcgtggccgatgaggtgaccatctgcctctttctcagagggacagacgatgcgctgctctcctcgcacgagtaagcggtgccgatgagggatgtcatgttgaagtccagcttgcagaggtccgatcggctgacgacaccgtcggtgaacccgtccagagggtcacaagcagcgatggtctcgctgatgatcttgtcaagctcgcacgaaggagggtagtagtcaagcgtctgctgaacaaagttcgctccaaagtggttcaactgctggaaggagaaccggaaggcgggagcgccaacgacggcaccatcaaactggccgccgtaccgctggacttgactccacccctctcg

SEQ ID NO: 2182 - DNA, 1030 bp, Xanthophyllomyces dendrorhous
agctcttctgtctgacacgatccgacactgctctgagcgctctccactcacaaacgaatagagcgcagggaagttggccgttccgttccggagagggaagacagcgtcaaactcgctgtcgaacccgccaaagccaccgtcggtcgcaccgccgacagcgccgtagaacacggcctccgggagactggtgctgacagagttgatggcatatccgcctccaccggtggtcaaaaatcggttcgagaagttggacggcagccagtactgaacctggacgttgtcacccagaccggcatggctgtaggcaaaggtaacgttgcagtaggagatcgtggcatccggaaagttgttctcgccggtgtaggtctcgttgtagacgagagctgcagtaacagaggacgcattgaaggtgacaccctcgatgaagccatcggctggaagggcagcctggacgttcgacgtcgtgcagatctcggagagagaggcagcaaggccgacagagcccaagagaaggggactcaatgcacgtcgcatcttttgggaacaggaaagggaagcgtagattgaaagagaatggacaaccggaaatagacagagagagagagagaggagttgtgaggaacaagaagctttcagccgtatcctaaggagactcacttgctatagatgtcgcccttcgctcgttcagacaacgaatgctacaggtctaaaaggagattcaccgaacatgacgggcgctgcagtgaagcatacgtctgagagcctgatgacgacagtcaatcgttttgccattcgtcccgccagatggaagacggtagatggtaaacgattggtcgggaagacacgctagacagacaacggtatccgcggccgctgtcagtgaccccgggatgtaatataccggagacagagttgaagtatagccttcggagccggcgtcaccggtgtaatcggccggtcgtcgttcaccagcgtttgctgcgggccgggtttggagggcggcctccttccgctggcgacttaaccgatg

SEQ ID NO: 2183 - DNA, 519 bp, Xanthophyllomyces dendrorhous
ggttccggtacgggcataggcaaggtaggaacaaactagactgatagaaagggcaggacgggtatccatctgggtcggtagctctgatgggctgggggccagtcggctgaacaaagaaagacatgtttaccaggtcaaggctgatgagtctgagttcgacgaaacagacggtgagcgtgtctcggatcgatagtctcctacggccttcgtacgttcatctgtatcgcatcaaaaggcgtgagaaagaacacacatcagacatcgatcagatcgcagagacatgtttggatactgaaagcagaagaagagaacgctaacggacatgagtgtttcctgtcatgagtcttgttttgtgatgactgttttaccacgaaacacgcgtttcgactggttctcgttcgaccaataaagccggatccttgaccagagtaccgatcgtctcttattctcttgcgacttctgcctgcacaacaaccaagtcaagttccgtgtgcgtatatatatatatatatatatata

SEQ ID NO: 2184 - DNA, 9538 bp, Xanthophyllomyces dendrorhous
tatatatatatatatatatatatgtgggtttatcagaatatgtacaaagtcgatcaatagaaataaaggggcaagcaagagaagaacagagtcgacgtgcgaacactgtcagagatcgggacagtcatttggtatatttatctacccagccgaagccatatatctaattactgctttgtgtatgagatcttttcatcattatctttttttcagacttcttagatggctcacccgaattgcattcttgcccctcccttgtcttcctcactcttcctcagttcttgtcacgctcgaagctgacgctctcttcgtcctagattccaggttgggacagtccccatgtaggtctctgtgccaagtggcttgtgactctgtctacctcagaagacttctcttgacagacaccgatgtcgtgccttttcgttctacctcgcttttggagtttgccaatatcggctgttccgggcagcttcaaatttgattgaaaaatagggagctgttcgtggtattctcttcgacggagtcacttgaacaattcaatccaattcttcaattttctaattataatattgattttgattctgattcactcagactaatcctctcaaacaaatgttcgaatcgccacaaggtataatgaaggtggttgagagtaccagaagaagagaagagaagaaaaagaaaaactggcaactgtataggagagatcccataattgtgatataagggaacagaaggaaaggatagaaagacaaatcaacttgtatctctcgttgcctagacaaccaaaccctccagttgatcccatgactgctacaacaaacagaaccactcaatctttgctgttgtctacagttattcccagacagatttcaacaaatacaagcatggtgctccttcatcacaggcactctccaccttgaaaatgacggcctccaaaaattacgacgccattattctcggctctggtcctgcaggactcagcactgcccttggcctcgctcgggttcatcggacttgtgctgtgatctcaaactcacaataccgcaatgcccgaagccacgccgctcatgcaatcttgacccgcgatcacaccgatccggaagagatccgaaggattggtcgcgagcagatcgagcgttacggaaacaccgactttatcgagggcaagatcacgaaggtgaagaaggaggttggagataattatgagtttgttgtcgaggaggatgctgacaagggaggacgacggtggaaaggacgcactttggtttttgccacgggatgtcgcgatatcttcccagatctcgcaggatacgtagaaaattggggggaaaacatgttcgtgtttttctttgcctaccaaccctcttgttcaatcttctgatggagaaattgagaaaataacctataccttttctttacagctatcaatgcctcttttgtgatggtcacgagcgatctcatcttccatcaggggtcttagcgtatccgattcttgatcctatgacgatcaagctactcaccacgacgcacttcatctctcttccgccagacagagcacatgctatgcctccatctgggaagggaagtgaaacgtcacccccaaagtcaaaagtgacgttcttcaccaacggtcctctcagcccttctgatgaatccagccacgcaggtgccctcgagatttgtgccgcctacggcataaccgtcgaccaacgcagagttttgaaactagttgcagacgacaaggagggtgttcatatacatcttgctaacgacatttgtgctggcaaaacccctgattcaacgtcgtctatccatttaggatggattgcccacaaacctcctactgagccctcggttccgaatttgatcagccagtcggggcttgagataccaaactcacccttcgggagctacctcaccgcgaccccgcctttcaacagtacgagcatgcctggcgtcttcgcttgtggagatacaggcgtggtgatgacccatgtcactgtcgcgatgagtactggtattgcttgtgcggccggtgttctcgattggtgtaatcagaaggataaccagatcgctctagagatttggagaggcagggataaaagaaatatagttatgaagctcagagaggaagaggctgggactgctgttgatggcactgggtgttctgtcgaagatgggaggacatgagaaggtcaaccaggatgacctatacgtttgttttaagcaatacgtatcaagctaggtgttacagtatcttttcacatctcaatatgattgctatgtcaaaatactattgctgctgggggtaagctcgtgttacggattacatccttaaaatcagattggtctgatcggtggggtggatcttttttatcttccgtttatgtagcatctgttcaaatggaaaagagaaataagctcttgtcataaccatatgtgtttatggatgtcttgttcatttgtctggacaaaatccgagtggaggaacgaagagaaaggaagacatagagagaacttcgaagaaagcacaagcgacaaagtgtttgcgtttctttgtcgctcgggcataaagataagacgaatagagtgcatatacattttgagaggggttagatgagaattttgtgcagtcagagatgtatctaccgatgttcggcataatccacccggtttgttcccagacacttgccaagtcagacaaagcataaatcgccggcggcaaccaagatgaatgaggaaggagaagagagggaagtaaaggatgacggtaaggaggaaaatgaatccttcggattgttttcgctttgttcatcatttattgtcaacgttgttcttcatggctaagcgttcgcctggaagttttccagcctcttgaatttgctttgaaactacgaagttatatcacagtagagaaaagccaatcgatcttttcgtacagtatcggatttggctcttggtcatccttcaactcctgtcgaggatgttcctcatcactgctcagctgtatactaatgcccttcatcatcaactctcgctaactgcccgtagatagaccaggtagtcctgccaggttatctatagttgatattgcaagctctttatttattctctcttagattcttactagatgtcgatgcttgtattaccatcgtatgaggatctacacataagccgtaccgctcaaaaaattgcgcattctgctcaagccactcaaaagtatctttgagtgcagtaaagattgaacgacacagttatcattgtgactacagcatctactgaagctcacagcagtcacgctgagacaagttctgctatcgcgcagatgtatgtctgtaagttgatatattcataagaattaaaaaggcttccatggtccgcttttgactcatttctacttgccttctttccactctttcttcttgaggagatttgagtactcatcactgccaaatctacaatctggaagcatttctgactgttaccaggaatgagcagcacacttgaacaagcacttacgatgcagtttcacaccattgataactcagatgatacgttgaaagacatactacttctcatcggaaacgagaggaaaccatcgcatctcctcgacatgttctggcagagttgatatcacagcttctgatgggtatgaggtactgacagcgagcgtatgcgccctcttgagatagaccagaaatatttcctctctaacattgaaagtcggttgtcgggttgatagcatagaggttacgcatggtagaggctccactgggcggttgttgcgatgcgtccataacccagtaaacacgttcaggatataccgatttagaaaagccctaccatgcgcgtcgacaaagtcgacagcatcgatgatgaagcgaatagacggcaacgtcatggggtaattgaaaatgacatgtatccatcctgacttgaggccgatatacccctggcagataactcagtccagcctatgtaatcgctcgtcgccgatatcaagcagatctgcgccgtatagtccggcaaaggagcagccgcctcaagcttgtatgccgaaaagatcgttcagaagggcgaccataaagttgtaatgtagcgctccctccgcatgcttgacaacaaagccgattatagagggacaggggcattgaaattgccaagtatctcgatagaaggatttcggctccattgagctattgccaattgattgtaaagggttattgcctctcgatataacccgctcctatctcttgcttgattctaaactccaaccccgcgggtaaaggttcaatgatatccggtgttgctccctcctccctatgcaccgggctcgtctcgtatcgctacgaatgtttgatgataaacgatatagttctaccgcccggctgagttggtcttctatcgttcaagagatgtcgcttgatgattaaattgccgggcgtacctggaccgccaacaaacttgtgaggcgagataaagacagccccttgtttcgcgggccttgctcgccatcaggattcatattgatactgacgtgtggagcggcggcggcataatcccataaagcgagagcagagtgttgatgaaggagggaactgatagtgtccacatcagtcaaaattcctgtgacattggaaccagccgaaaaaactgccaattttgatagggcaatctttatatcgaagaagttcagctgcaagttcgacttgatcgatatatcccgagctgctcgcttggatgacaatgacatctgcgctcgctttgcgccatgggagaatattggaatgatgcccatatgggcagacaaagaccacagccctggcgtccgataagtcatctccttcttgaggtccagtatatccaccatcctgttaactgcaaaggtagatcctgatcccccaaaaatcaccacatcttcgactcctgcgcctaccgcttgctgaatgatatctcttgcgttttcgcgaagacgagatgtctgacggccagtctgggaaacctcggtatgcgtgttggcatgaaaaggcacaacctcgtgacgaacgacgtcttcaatgaatgacgtacttcgacctgacgcagcgtagtctgcgtaagtgatgcgcctaagaccgaacctaccatcgaagatgtttccctcaccaatgactgtctggcgaatgcagtcgatgagacctgtagagatactgctggaatttttggtattgtcagaccacttcatgccaggcaaagaggagaacgtagaggagggctggtgggatatgtcagtgtgattagcggatgcgcggtatgttgccttgcgagacggtcttgacttggaggcggtagcctatcaaaccataggatctctcaaagcctgatatcggcggttcataggcatagtaacagtgatgggatcagtatgtacttcaggatcttgatcgattcgctgtttgaatgtgtcaatcccgacatgagtttggtgttcggtaatcacaggactggtgtagaaatctagcatgttgttttatatatgtgtttttatttttatttttcaaaagcattgtttgaaatagcatatagataaaatagggttttttctcttcttgttcctgattttctcagtcacttcacttgcaccttatattggtatatatttccgtctcaaagcattagaatcaggttgagaacagtataatcatgtttgaagcagattggtactgtatctaggtgacccttctatatatctcaacataagaagttccctgaatttgctgttcgctcactcacaaaaggaacaaagatatgtgtctgtgcgctgacatccgcccaactaatcagagttacgatcggcctttgacggatgagcgcttcgattaatggacaaaccatctgacgatacacaacccgtataactcatcgtggtccatggacctcttgtttttcattgccaaaatatgttcatgtgtttcaagctttttgggcaatagacgctgtctagaaacacccctgacggatcgcaaaagttcgacgaaggactaatttggtgcaagtatcgtttccaagtcaagggagcgacctagtctcgtcaattttctgcttcgaacatggtgcatgcctggcagctatgtggatatatgctcgaataaaaattgctaaaaatgaaagggaacgcaaaaagagaaggtttttaatgggcaactacgatgattgtagaggttttagctcaagagtacatgtatatatattgactagaaaactaccgaaacgcacttgctactcccatacgctccatctttttcctcgtccacgtcggaatcacgagatatgccggaaaacgaggcgataaggaaaagaaagtagaaagtgaaggcatacgcttcagacataatgggtgacaaaagcatacacatccatgagcacacagctccgctattcttccggcgcagccatcgtatcagctggacatgagtagtcgtccgaccaaggcaggcataagtgcgttagaagaggaagggaaaacaagggtgtcagatgtacgtagcacggggtcagcggatgagggtgttggcttcatgttatcatccaggaaggtcagtagatactgatggcggacgacgctcgcccaaagaagaagaagaaatagaatgaagtgatgaatactgaaaggagaaaacttggccatattcaacaaagtcatgacattttcgaactaatctacctcatgttgcttagttctgaactgactaatctgagagaaaagtggtagaagagaaagaaagtaaaaaagaagagaggaagggtagcctttacatttcaatgtgagaacagcagcatccggttctgaagcgggatcacccagagctagctcataaaaaacaaagcccttcttggtggatggaatgctcgataggagaagcgttcgtgaatcactcattttcgagagatccaacctgctctgaggagagtagcggctacggctttagcaaacagggaatgcaccacccgcgtaggatggatctgaactcaagagatacacagaaagccatgcttagttcgaatgatcatcgaccgtcagtaaaccatatgcaaggcagcgaaaagacgcaccgcatcccagtagaagtatgagtccgggtcagaacatatgctggagccgatgacacacctccggccgatcgtctcgttcgccaggccgtaggcctgaggctgactgaggatggccttcgcagccacccatgtgtcgaccacgacgaactcagcagtgggcaacgtcgcgttctgaacggctgatgcctgagcatcgatctcagagtagagggcgttgttgtagtcgatcaggctgttcgtcatcacagatgcgacctctgaccccatgagatcgacgaaagggcggccgatgtcatagatgttgttgatgacaaagtgtttggcacctgaaacagtcatgtctagttagtcttcagatcccattcagatggtgacgtcgctccacagccgatgcaagcagccggccagccgagaacgagaagcacagtagaatgaatgatagaagagcacgatgagaacatgccagaacataccggcagcttgcagcttctcgataccaatgaaggtatcccggacgagatcagccccggtgaacgaaaggttgctctcgatcttggcgaacaggtcgttcgatccgatccagatggcaaacagcgtgtcgtcaagggggttgcgaccggacgacgagtttgtcaagctgatgaacgcatcgatctgctcgagggccgacggaacacgacgggtgacattggtaagataagcaggcgtccgagtattgttgacggtagcccctccgctagctggagaggacgaggccgatgtagagaacgacaatcacacctcatcagatcagggaaccacgctcgcccagagtacacatatcagaaaccgcgtggacagaccatagtcaaacaacgggacatccatccctggaaatgaccatagatgagaaaaagatcagaagatttcacactaaatatagtacacataacgaagccgacatacgttcggccaaatcttcgatccagaccggtccgttcgaccagcggtatttccagaatagctattcagacaagtatgcacggatgtcagggtgctggtgtcgaccaccatgtctctcatcgagaaaagcagggagtttcttacgtcggggtttggtctggtgccattcgagagaactccggtgccgtttccattgtcgctgagtgaatccccgaacatgaccaagcgggaaaagttggacgagtagacacctggctcacgaccaggagcaaacatcgtcatgttgaacacagcggcaggatcggacgtgctggtctgatgggccgtcgaaggtgctgcgtccacagaataagccagagaaagggaggcccagagggcagaaatgagggcagaggaaatcatatcgctcaagtcgggtctgtttgaagatggggaaggaagatcagcaagaagtgaaaaagaaacgaagaaagaagtcagcacaaaactgttgcagctttatagcccatagttcactcacacccaactcatgattgccaaaagtctcgagtgtccgttggggatgatcatcgttggggcccaccagagtcggaatgaagctggcaggcgatagatcaaagaaagatgagcccttatatgtcacctcaaccaccccacacttatgacgctgtcctgatggacgctgcctttgtgaacccttcaggtgtcagcatctacgaccagccagtctgcaagtagtccgagaacgtccgagtgtactgttttgatgtgggtcagagcttccagtcagtccgtccgactgcaggctgaaatgcggtagccaggccattcttcctgtcaagtcgcaggtagatgtctcaccggaacatcgatgcgaccggcgtacccctacgagagcaacgtccattagcaagccgtgaattctgtggatgccagtctcgcacgaatctggcaaagtcactggccctgtcattggtcaattacagcatgaagtgcgcgatgatagtcagtcttcaaacggcgatgaagacgacaacggggggatgtcatagaagctgtcagatatcggttgcttgtagttgtggtcgagcgagactcgagagttaactactgactttcctatcaacaagaaaacccagatgactacgccgacgtgcgcccgagccatcaccgcaagtcacgtcgttttcctgcaattggttcggcgaccaatgtcgttcggaacgactcatgatccaattatcagtatcataaagaacgaccgttcacagtagctcatcggtacgtgaaaggaacccttcttggaggttcgacatcatacaacatgcaatacctgactgaccgaccggtggatcaccttggactagatgacgtcagggtgatccaagttttcgcgtgtcattttgtccaaatagatccatctcacccgttcacccgctccgatctgccaagctacgttgctcattctttagatacaacctgtctgttcatcatgtcgtct

SEQ ID NO: 2185 - DNA, 392 bp, Xanthophyllomyces dendrorhous; identical to SEQ ID NO: 737

SEQ ID NO: 2186 - DNA, 826 bp, Xanthophyllomyces dendrorhous
ctataggtccccagagatactttgaccagcaggaggcgaaagagaatctgaccaaagagtacggtctattcttgtctttatcagatctactcctctttatgaggtatgataaccggctgagtatggagaggctgaggctgatgtagtcttctacattcgtgatatagcgagaagttcgtcctccgagctaaggcggctcaccaggatggaatagataacatcccaatattagcattggctctggtaggatgacctcctaatgatatgtcttttgcatttgacgaatggagggaaaggcatcgatctgatgtctgttctgtcattcgcagctcaccggaaactatgccaagcttcctacctctactttgaatcgtttggctgctacttatcttatctccaggtattttctagtgaactactgtctcttttctcgtcttccttcttctcgaatcgattgagctcacctcgtcttctcattgttcccttcatttgctgctgtctttcagggtgttctactacatcgcatgcatcaatatcgatagagatgatgtatatcctcttcgatctgtctcttacctttctggaacagcgtgctgtctcactctgttcatcaactctgcccatgcgctctatcttgatagttaggatgttcatcttgtccatgtgcggctgagcatataacaaagtctgctagctgcgtacatgtcagcaaccgcatcgggtggcttgcattgtatagaagtagatgatctccgactgcacatgtttctgatctagcctcctctgatatctgtgtgcgatcttctcgtcatgcttctttgtccgg

SEQ ID NO: 2187 - DNA, 564 bp, Xanthophyllomyces dendrorhous
gttacttcatgggcggaagagcccagaattcgacacattgcgattgggattgcttgtgattcatctggcatgagtcccggtgttatgggcgcaggcaagggggctgagtgaggacagtactcagtacgcttgagctctcaggcaggaatggatcatgcaatactgcagagtagggatgatgatcaggaactagaggatttaacgaggttccaagcttgggaggcaaaaggggagatagccaacgactacctagtatatatgtcattcgagatatgaagccaaggacacacaaggaaacacaagcaagagcgaagagataccaaggacgagtcaagatgtaccaagagagaatcaagcgataccaagagagagtaaggaaggccacgagctacatgatctcgatgctaagtctgttgcaagactaagtctacaatgcgcaaggtcaccctgcgcgggtcaacccgggtcagatcatgacactcgcagaacgaacggaaagaaagcggagaatggtagaaacgaatcaagtcaaccctcctttgtcaccgatcggcttcttgatct

SEQ ID NO: 2188 - DNA, 986 bp, Xanthophyllomyces dendrorhous
gagcaggatttctgtcttccaatcatcgagttttttgacctggtcgtactcgaccacatgggcggtaaaggctttgacatcgccgtcaccgtatgcggtcacgacgttgttcaggaatcgggcttccctagtggaggggaaagtatcatctttggtgtggacgcacacaacggaaacaggaatgaagcagtgctatggttgtttccttgtattcgctaccaaacaaaaacggacacgataggacaaaccttgttgagcaaacttgtcgactagctcacgagccagcacgacatcgtcagctcccagcgcactgaaccatcagaaacaaatagcgcaattagcctgatgggccgttcgcgatctctggccgcaagaggatgaaagcaaaacggaccaaagaccagccttgagccagatctccttgacgctgtactttgccagtggactgcttagattccagtttgcgacctggacaaacgtatcgatcgcccgttcgtaatctccaaccaagccagagatctctgctgcccctctgaggatagcgtttcccatgctgtgaatgatccgagaacgtgaacaggaaagcgcagagcggtcaaacatggtgcgaacaagaaagaagggagagatagagaacctacgcttgggcgccatccatctggtacaaatgtcccgccttttcgtacgcgtccctagcggcgggccgattcgacactctgaagatgtcgccgacttcgttctgtcgatcggcagcttgccggaatcggccttgctcagtgagaatcttggttgcccggttcagcgcgttgacagcgtcccgaacggaggtttctgaagtggatcgctttaacctgaggcggatgagaagaggtaatgtggcgtcagatgggggaggggaacgcaacgtgccctcggcgagggtcacagagcggtatagggaaagtaagtggaacttacaattcggatgcatcacacaaggccgctat

SEQ ID NO: 2189 - DNA, 1107 bp, Xanthophyllomyces dendrorhous
gcgtcatccttcttgttcgccttgagtctacgttctccttccctgagcgacggtaggacgggttgagtcaacaagcagaaagacgagagctgattagggtgacaagccctgggtctgatcttggttgtcaactcacctgaccaaagctctgccatgaagatcccagtactctccaggattgaacgctttgcccgctcgatgaaactgtggtggtgtttccgcaacaagatcaggtagatagaagctcaacgatcaatcagctggacgaccgtctgcggtcgagtggaaagaaaaaattacatgcatgaggatgaacaagatcggtatctttctcgaactttgttgctgaaaaagaggaacagcttgtgagagaagcaaccttcttttcaagcctctgccaggacacctaccgaattacaatacttgttctgtgtgcaagtgtgatggagctgtgaggtgtgtgagagcaggtacttgatggatgagtggatcgaacgggaagtgagagaaggacaaactttgtcatagcgtctttcttatagagctttccgtcgtgctctcttccccctccctcccttccttacttggctttgagcgttcgaactctcggctctcagttgatctttcgtatccgcgcatccatcttctgccgaggcatccgatccggatacacataagatgagtcatctgttgggaatacttgaataccatgcatcgttttctacatatcatctacctacctacttaccaacctagctagctagctagatatgaacagaagaagtaggaaacagcctagcctggtgcgctagctgagtctgaggcagctaaacaacaaatacggacaatgccccgtattcaggtattctccgcgtacacttcgtcgttttgtcctttcgtgtttcttgatttttccctttttcgcccatatctccatcaatcctgcccagactgccttcccacttgcaccatcctcaccgggcagcttccctccatcgacccataccgttctttccatcttttcgtgtgcttcacttctctcgacttttcactggcttgtctccggcttttcacctgctggtttcgtcatcttccatttctatcaga

SEQ ID NO: 2190 - DNA, 519 bp, Xanthophyllomyces dendrorhous
tagatacatcacacaacatgacatgacatgacacaactgatcgctactcatccgtgcgccatctcttcctcttacagttttgccttcgtctctgcctcgccctcctcgcccacactctggtcctcagttgactcatccagccgcagtgccttggagtggccctctgccagtatgttgcttaccacaatcgatgcatcttcgtccatgctagtcaccagtttgccagaggacaccgggtcctccggtatgactatgtagtccatcagtggatgatgctctgcatttcgtcccatcttgtacattgcctcgtctaggttccaatgagtttccccatcacgtgttcccacatacagcttcatgttggaaacacggtagactagattgtcagtgttgatgccgtgggcggccgccgctttccagaactcgctcggctgtagctctctcagctcagctcttccacttgactgggcgacaagctcgctcagagggaagtcccccaattgacccccctgggtcgca

SEQ ID NO: 2191 - DNA, 1210 bp, Xanthophyllomyces dendrorhous
tgatcagccagcaatcgcagtatacgtcacacacgaatggctccctgaccggtgtgtatatctcatccaaagtatccggcttgtatcttctgttgggatacttgtcctccggcatgatagtcgatagctgaatgaaagctctaccacggaacagccaggacaagtctcgatcagcgaagtagctttgcgcgcacacactagatctggtgacggacgtactggcggggagagtggagttgtcaggtcagtacggagactcgataagaactgaagatgacgcaagctagacaagatagattgaagacagtgggtgatagaagaagagcagtctgacgaaatgtgacgactttatagaaaggcacggcgaaggaaaagcaaacgaaacgagtcgccacatagactttgtttcgtcgttccaagcttcctcttctcttggcctgtccatcttttcttattcgtactttctctcttcttcagttgtttctctctcttctcttcagttgtttttctcttcctgtttgatgccattttcattcttatactcattcctttcattcttgcgctggtttgaggcataggctgacagtatcgaatacgacccggatgtacagtctacctctctctcacattccttcgcttcccatcctttctactctccgtgtcagagatctggccgagttgtatacgtagtattcatttgcatacgatctcgacaacatgtgtttcttacctttcgcgcggtcgatacctgtgtgcatctttccgccttgcacccttttggtcttcaatcctttctttactgcatccttgcccaagaggcgaagagacaggagtgctccgtcgctttccttttctatactgttcttcttctcttttctctcacgtttgagttctgtgaccctcattcaagatcgtttgatccatgattcttaaaatgtctctatctctggcgcgcctgtgaagatccaaaagtctgagtttcgaaacgatttgagacaatagaactcttcacctagtctagtcgcgacatatcagttgccgcgctcttccgcccttgcgcatctactcgttccagtatatctagccattcgatacattcttcacttctactcacatgagcacggacggggcaaaaagaagtgaccgtagggtgaattgaacacccgtcgtccgcgactttgcgtttcggctgaagaaccacaagcggaag

SEQ ID NO: 2192 - DNA, 2077 bp, Xanthophyllomyces dendrorhous
gtactaaccactatactatacgatcctggtatcttgcaggcggtcgatagtaagctagactgttgacatgcacgcataggttgatgaacacacattggaatagctgcctgactgttacctaagattcagcggtcagagtgatctcttcgctttggcactcgctctcagtcatgtcctcactgctttcccacagccataaacacactatccaggtgtgccagtaggaatgggtcgagaaaccaggagaacagaagagaactagctagacgttcagcagctttgtgaagagacgctctcgggacccctcacaagatctgtgggtgctgcgtttgggagaacgagagcaaagtagaactacaatgatgtcaaaacggtcaaacacgcaacaaagatgagtgcaggccaaaaggcatgcgcctcgtggagattgcgagctcgcgtcgagggctgaccagggttgccacaatggctacggcatgactacagaatgtgacgtaccacgattacggtctcccttgttttggtcttgcagccggatacctcatctcgtttgacagtccgccatcacagtaactcaccaccggttctcctcggctctctactccttctcctcaccatcatcttcatcattgctctgctgcatcgtagaaccggtagccaccgcattgaagctcgtctgctgcctgggatctatagagacactgtgcagagaacgatatagtcaagtgacgacagaggacagaacacgacacgactgatgtcttgttctcatctaatggctgtatgttcctttcatcacgttgcatcatgttgtatacgatgtcgtttttcggctgtgtttgtagtgattgaaagatatggtaatcgttgtgctacgatcgaggtgattcgtggggtattttttgggttgttttgtgaattgctggcttggttgagttgtttggccattgggatgctggtcgttcagtgtcagaacatgcccaccagctcaggctctcgagaaaccatgcgatggccaaagacgtatgcgtagacgtgtatgtgaagtatgaagacgggtgcttcgaatagaaacggcaggatccagatacgagagtaaatgagagaagatgacagaaaaaaagaagacgaaagaggaagaagacacgaacgacgaagaaaggaaaggcaacaaagtgcttgtatctgtttttcatacaaacgcagaagcaacaagggaagaatgcatacagacctcagaagctgggagatgggaaacacatagcgtcaaggttgcatctactagaatacggtgtgagccactctgaccgatctttgacggcttggtgataggtatgtgatggctgtcgctctattggttactagttgagattcgtggtggtcggtgatttctttctctttgccctattccttgtttactttctcctgccctcactctccgttcctctttgttcctttccttgcctttgcatttcgtttctttctctttctgcctctacttctgtctaacccttcttctgctttcacacatgaccgacctcgctcacaagcatatgcatatatttgtacatggcactgacaccctgagaacgtcaagggaacgatggcgctgggctgttggtgctggatctcgagcattgatctcgagcttggatccttgtcgctctctctcgtttgtcttacgtcgctgactgtgcttgacaagactatctatctgcatctgctggactcgttccctaaaatcccgaagtctatttctcgccttggcacccgtgtcaatggtatgcgtgtgactcactccgttggcatcctcggtccgtcccatactgccggccaaccgtgggtcacgtcacacaaaaggtggagaaagacgtctgagtcgccaccacatccgtcgaattactcgtcgtaccactaaccatgctcttttggttcaacggaggattcaacgtcctacattgggtcaaacggtttcagaccgattttgacgaagaacgatcctcctctgaagagtcagtttgtacatcagatctgccatccgtcgatctctcaagtcgatgctgacctggcttgcttt

SEQ ID NO: 2193 - DNA, 3841 bp, Xanthophyllomyces dendrorhous
tgctgacctggcttgctttcttgtctgcttgtgatagaccatcgttcgtccaatatctctttactactgaatgacaaggaggatgactagcagcatgggcatctgttgacaactctgccttgttgtcttgttctcttgtggcttatcttgttaccttctacagaacatgtaagcttccgtcggcatctgctagtaggacgaaagtgctccgactcatcctgtcctattcgctttgatctgctccggccttagtccaggacgtggagactctgctccagacagaagatgatctgcaccaacaggagctccggcgtgcgcagggatcgaaagaagtgggacaacccctgacgtggagacttcttgcttacgacggcaagcacttctcaacgcgtccgttgcaagagctagaacggatcgagctgggtgacatgatgtggcacaagattcactatgtaagcttcttcctatcttatctctcttatctcagtcttatccttaccgttctcctatatctctatgcgacttctggcgaatcggcagccaggatggctaacatggcttggctgcttctttggctctgcttgaacactctcagggccgatatctgctcgttcggatcgtctctcgtcccactaggatcacttccatccgtttcatcggccaagacccgtcaggccgggccgagcttatcgagctccaaacggctgtcgacatgcttgtggagactggaccggaactggatgcgctctaccctatgggcagcttgctagctattcgggagccccactacgtccgatgtctggatgaagacacgatcaatgattctcatcggaaacgtatcaagttgacgaaggtatccaggatcagggtcgagtctccctcggatgtcgtctggctgggtgcagacgatcaacttgtcagcgagctcacatggacgagcttacctgtttgtccgacgaccgagacagatgctcagagactgactgctgaacaggcaaagtcaatcggagacggacggctggacaaaggatggctcatggcggccgagcgcgcgtatacggagggtctgaccgtcgacagcaagcatattgtgctcagacttgaccgagcgcactgccggatccgactctcacggttcaggggcgcatttgtcgatggcgagcatgcgctgcgtggccttcttgacgctatgcgcgcggaggaacctgcacgggcgaacatggcccattcggatctgctgcagaaagcataccactggcttgtgctagcttcgatcggtctgcgcgactggtcggtcgcacatgagcactgcactgcatttgctgagcggtttcctgattgtgctcctgctctggacttgctggcgttcacacaggccagagtggacgaggctcggacgggtgtgtacgattggccatcgatcttccggggggatcttcagccggggggaacgaggaatgtagttgctgactgggtgtcgccatctttcaaggtaggccgcagtcctacgttgggtgggatccggggcgtcatcgctgaccgaacgatcgagcccggtgagctacttgtggtatgcaagccgtttatttctgttgacttgaaggatcgagatttacggccggtgacggaggtagtcaatttgtcggttcaacaatgtttcccagaaatggcgtatgcatatctggtacgagcgatggtagacaaaatcaaggatgaaccgagggcctcggacatactgaataggctgtatgctggacctaaatactcggatccagagctggtcgatctaagcgccttcaaactgcctggcgcgctgggagacaccgagaaggaggatgagccgcgagatgtggacgtatcgaggctggagggggtcagggcattcagctcttttgcgactaggtcagctgttattaacgagactttgcccttcaaatacggccgatatggagatcaattatgttctggtacatctcatctcttgccttggtcatggtccctcttttctctgaccttcttgctctctctgtcctattgtcttctctaacgatgctttgtatgcgttacatgtttttttgccaaacgatatcaaaccttggtttgtacaggtgtctaccttgtcccctcgttatttaaccatgcctgcttcgccaacgtcagttgggtgttttggggcgacatcatggtccttcgttctcgccagactatttcgccaggcgaagagctgaagattacctatcttcctggtagatcattggttcggcgaacaaaactgattggcaatctcgagattggtctatgtgactgtgtcttgtgcaaggagaagaggcttgaccccccaaacagacgtaccatgtggtcagactacgtatggacatctgcgtatgacgaatacatattaggagttgccgagatagaatatgggaagatgcataggccgaaaagaagaaccctcaagaaggtcatgaaaatgacccggtccatcgaatcgacatacgatcccagacgctcaccaagtttcatgcctgagctgttccgcttctataacaccttgtcgggccttcacatgaataaagtgacgggcggcatgaaggaccccgtagaaacgttgctgttgatggagcaagcgatctactggaagaaacgtgcgcttgagtgttgtgggttcaaagggatagagtctgatgggagagggacaatgacgtctagtccgttcacatacgagacgagatgtatgagtgtagggttgtcgatcgtgtcgatactcgatagcatggataggaaggaggatgcgcaacgatgggccagagtggtgttggagatgcatgacatcgttttcggaggtgggaaggaaacactggtcgttctgtggaggggtccgttggactcgatgaacttgcttccgtacttcagttgacctcgtgtggatgagatcgcatatgaatgcatgtcttgctttgtatcacaacagcgatagtactaggccaggtagtcgatagcatatggtgtcttcccgtgtgtcaaactagacgcatcacgatcgagtggaacaagcagaggacacagagaatcttgtcatctatatacattcagtcctcagccttcgttcgcttctgcttgtgcttgtcagcaggcacaacttgctggtgcgcggctgggtgtcgagcgagttccgaagccaaagagtatcggtgccgacgttgggcacgtcacgtcagtcatcgtccagagcttattactctcttatgaagtaaagcgaatgacaatacagaaacaataaaagaggaatgaaagaaaaacaaacagggaaatagagagaaaagaggataaatggaggagggaggggacgaacatggcttccgcaccttcttgagacagaaacgtgatggcaatacccgtctgtccagctcgatcggtatatcccatgacttgcatgcggagggcagaacaagaaataggattggaccggttcgacatgcgtaagcctcgatcgcatctgacatctgccaggtgatgacaagcgagacgaccccaacaccgacctctcgtgcagcctgtgtgagcgagcgcagatgccgggcattggttcggccgtgagctaagtgggctcatcggaaactgacaaaatataagagagccgaatcagattgtcggtgaagctagtatcgcacgtcccgtctcttgagacttgacaaagcatctttccgccggtcctgcgacctgttcgagtggagcgccataacagaagactgaagctgagtatgggaaacgggaatcaagtcaacagagtcacgtacttgaatcagcttgtacaagtcaaagatgaagagaggccaagggt

SEQ ID NO: 2194 - DNA, 955 bp, Xanthophyllomyces dendrorhous
gcgtacgccctcaccatgttctccagtactcctgtcgtcacagtcgacccgacaacggtcgccaacttctcgtccgccggctgctggcaagactcagctaccgaccgagtgctcaccggttcgtcctcgacactcggcctgatgacgacggcgcagtgcgtgtcctcttgcagcacccagggctttatctacgctggactggaagcaagcttctactgctactgtggtaacacgatcgcctcgtcaagcctgctcctggctgcttcatcttgcacgtcaccatgtggtggtaactcgaccgagatctgcggtggtccgtccgcgctgtcgatctacagtaccgaagcggtagagaacacagacagctcgaacagcacgtggaccgatgagggttgctgggtcttcaatggtaacgacacgaccacactgtctggcttgacgacgtcgtctagcgcgatgactcagtcgctctgccgatcgcggtgtgatttcgggggctatgcgttcgccggtctgcagggcgactactgctactgtgctaacacgatgggcgtgtcgagtgtgctcttgtcgagctactgtacctggcagtgttctggtagctcaaccgatatctgcggtggctcgggtacgatgtcactctctcgatcaacctcggcggcggcggctgctcttccagctgctcctggttggacggcgctcggttgccgaagcgactcgagcgaccgaacactgcttgactcgacccaggtcgtgagcagctggatgacggacgattggtgtatccgatcgtgtgaaagtcacggctatacgctcgctggtctggaggacggtaacgagtgctactgtggtaacgagatgagctcgacatcgacctacctggcttcatcgtcttgttacaagacctgtccaggactgggaagcaaacaatgtggaggagcgtacgccctcacca

SEQ ID NO: 2195 - DNA, 697 bp, Xanthophyllomyces dendrorhous; identical to SEQ ID NO: 745

SEQ ID NO: 2196 - DNA, 507 bp, Xanthophyllomyces dendrorhous
cgagaaaccgaagagatagaaagtcaaccaactcgcaacactcggtggttggtgtctagactgctatatccaatacttccatcgtggctgtttctcttagtgtctttttagcctctttcttcttatctttcttctcatccaagcacattgtgttctctcacatatatctgcgctcgatactttcgtttcttttcttttctttttctttttctttctcttttttgttaagaatacttgaatatggtgcattcgtttctgcttatcatctatgtaccttaagccttagctagcgcactctgccagctgccatacttcttttcttctccttccttctttttttctttttctttttctccttcctcagcatttaccataactgtttcgttggtgctgaggttggttttcttctgtctttatgttgttaacgctttccatacaaatatgcttacaaaacgattgtcattagattactttattttagtttctcaggttcgtttataaatgtag

SEQ ID NO: 2197 - DNA, 362 bp, Xanthophyllomyces dendrorhous
acaagacaaacacctcgttcacatccttctacaccctaataggtgtagaccaaagcctaaagattcatatacaaacatgctaacggcgaagttaggcctcgtatacggctcaatcgttgcagaggcctttctgaggcatcaataccctaatgggcagagcctcatccagcgctcacaagagtgctctaaaaagtatagggctctactagcccctaaaggtttataagtagagcttccatagctctctaaggcgcaaagccaaaaagaagaatagtatcctcttccaaatcaacaagccaatggctatttctcaaaagtcctctgcgagggagagcgctcgacgtcacatgtcctttccgacg

SEQ ID NO: 2198 - DNA, 359 bp, Xanthophyllomyces dendrorhous
tcaatagccaatagagaccgcttaaacttaccaaagagggctctagaggctacaagagtttttcaagaatggggtaacacccctcaaagcggggtccattacccctagcaagctaaacaaaagcaaaggcgttctctgcagagtaaagccgaagctaaacaaagcttaaaagctagagcttttctcagtactcaaagagctcagaggttaagcctcctatctatgccatccaaaagcagatagataggagtgcttagagtgaaagctcgtagagtaccgcgcacatgcgccttcctcccttacgaggaaagctttcaaagtttaaaaatctcttcaaagcttttcccgagaacaatagc

SEQ ID NO: 2199 - DNA, 559 bp, Xanthophyllomyces dendrorhous
gacgaagacgaagacgaagacgaagacgaagacgaagacgaagacgaagacgaagacgaagacgaagacgaagacgaagacgaagacgaagatgaacatgtacatgtgagcatgatagcacagagaacgactctcggcggacagaccgtccatacgtccgttacccgtgttcttgttcggtttcttgcgttcttgtccgcttgcgtacgttcttggttgttcgttctctggcccatctatatctggtcgtgttctgtcttgccgtccgatgaggagagcaagctcggtgggctgagcaaatttgacgagagcgcgagcttctgactgctggtcgcccagccttgccttctctccgagaggctgaacctgctggccatgccttggctagacgatcatatctgtctggtgtttctgtttctatcttgtctctatttttgtgcgagaaacatcagtgtgtgccgtgtgctacatgctgttcccttttccgtcgatgatctttccctcttgcccttctcgctcttctttcggctgtgctctcttctcattcgctgctccttct

SEQ ID NO: 2200 - DNA, 1450 bp, Xanthophyllomyces dendrorhous
actatgtacatcgcagagaccggatggccgacggttagttacgtcttttgacttatttcaccgctgtttgcctccatctgacatatcagtatgatcttgaatctttttgatatagtcttcggacaacgcttccgacgtcagtccttcactcattttgcttggtcagacacctgatcctctacgtttgtttggctgactatctgatctgtcgtcatcctggaatacaggcgaccaacggggcaggttcgcccgcttcgatcgttggacttcaaaccttcatggacgaattcaactgccaagctaacgcgaacaacaccgaatagttcgttggctatgttaactgtagaggcctgcatcccaatcatcacagtgccagcgatgctcatgcaccttgcttggcttccgctttttgttcagcttcttcttcgagttcaaggacgagacctggaaagagatctacggtggtgtcgaaccccactggggactcttctacccgtgcgttatccgttctactctgatggcccatatcccaaatgtccgaagtcagtttagctaaaaacgatggagacaacttggatttgaacaggaaccgaactctcaaggctatcaccgtccgttttgccgtcttcttttttgccatctcgtgcttgtgctcatgccgactcttgtttcgttcctggacatagatcccagagtgtgaagtgagctccccactgaatggaacggtcgctcagcttgtcttcccctcatctggatctacggcagctcagacctcgtctggagcgtctccctcgtcgaccagctccacagacgcaagctctgcctctaggagcggaactcagctgggtgcgggactgtctaccgtcttgagtctcagcatgggactggccacactccttctctgagcatgcgcaatcttccagcaacgcgggctcgatcgatccactcgttattctctactttattgcatttcactctcctttttcactaccactcgatctttctgcctatcatcgcgtttcatcttgccgagaacatacctctggacactatatcgaacacacggactcttttagagatacatttaccatccacatagctagctaccccatctcgtttggcgctctcgaacacgatttcaactgaatttgctcaacatagccttattccggtaaaatctttcaggactgtatggggttgtatctccagttgtttcgcacagttcgactgtcggatctggagggaagattttgacgatacgcactttgcttattatccacagccccgacagatatacttggcaaaaaagtgttttacacaatggctgtgccatccttttccaccaaaactttctgtggcgttgaacggcggccgtcgagcgaatgccaacttaccgcacttcaaggcggtgcaggggtcaaatgaattatattacaacatcgagctagga

SEQ ID NO: 2201 - DNA, 4404 bp, Xanthophyllomyces dendrorhous
  misc_feature (1605)..(1614): n is a, c, g, or t
caccgctacctcatctccaatccgtaatgagccacttgagctttgactaatgagcggtactgacggcggccgtgagggcgcaacactaacatctttctgttgagcatcccttctctccgacttgcttaaaaatgaggtgtctagtagagagcatggaagaagcaacttaccttccctccgattctcattgacactcgctcgcaattcagctcacctcggcacatacttgaacaggaagaaacagatacctcaatctcgaagatgccctctcacaaggccgagatcaggctgattaacatcatccatgctatccaattcgttcttactgtcgctgtcctcgccatcggtctggtcaagatgtttatcatcaaaccgagaacatcaagctccagatggttgctcagtgtggtaagcattgactgatgttctattcttgataggacggactgtccagaagccgacactgatatccttatcgcttgtatatagtctgccaagtctctgatcacactggcatacatagtgttgagcgagaacgtgtcctacttccatcgatgggccagtttgaaggcaaacatgatactcaacatcttggaagccgtcttttggatcgccgccatcgttctaacaaccatgggattgatcaatggaggatgtgcggcaggagtcggctgtggaacaacatacgccgccattgccatcggatccttgcttgcgtgagcggtcttattatattcgaatgcatgcgattgtcgatcatcatgagctgacgatcatctctcaccttctaacagagctttggccctgccgatggcgtacctctctataaaacacttcatgaaccgaaacaagaatcagtatcaaatcaatgacgattcgagctctgatgggtcgaccccaatgataacgaagaactatggccatcaggttgtggtcaacccgacctatgcgaaccatccatcccgtgtttaaacatattttcccctgcctttcctcgctccactgagcctgcataaatactgctattcccttttggtctcgtttatagagatagatagttattcatgattttacgagcaaatagttcaacaagctaggacatcacccagattcagcactaaatttcatacagtcgcagatattgggtttgatgagctcaacctcaaccaacaacggtcgatacatggtccttcttggtcttaggtttccttggactagaatctaacaacggccagtgtctttagagtagcctatccttccaaattcttttttcattcaagctgtggccgctttggaacaccgccagcagagacaacccaccggatttcatgccttcaaaaacacacatcacgagtccgagcaaatgcagtatgtgtgatttttctgcaaaatacatatcattctgacctcatgatacgatacacaaagctggcaaagacatatctagctaccgagacctgtactacacgctctcagttgagccctcctatcctctcgcccacccggaccagggtttccatggcttgctcgcttgatcttctgatgtcttcatcccaggtcgtacttcctgtgggcgtcacaaggatcaccgtgctcccaccgtannnnnnnnnnaaacgagacgatccatgtcagtctatgctggctaagcatatctcgtttacccttctagacctgagcagcgatcagggcaaacgatcaaggcagcacagaagctcggtacgtacgcgaaccaaccaagctcgtctcctttctctaccttcgtcccttcctgggtgtgcgtccagttaatcgaaccaaccagcatggccccgacggcaacgacgtacacagtttggcccgaaggaagatggataggaaggaccgatctcgagttctcagtaaagacatccaggtcctcgttaatcgcttgctgcgtttcagaagatggccccacacaacagcacatatcagcccacgtagccacctcctagacggtctgaacggcgaaacacacgcagtcgaccacagcaggacgcaccgggtttacagtgtacagcttccctgggatgtttatgctctttccaagcgttccagacactggcgtatggaaccgatggtagtcctgtggggccagccggaagactgcaacagcaggactggggccgagagtggaggcaaaggcctcgctccccagtagcgcagggatagtaaactgctttcctttgatcctaggtatcgacatcaaccaaagacagacgtccagtcgcaaacatcttgagacagaggacatctagtgagatgcatcacccatcgcgagatccatgcttaccatatccgggtggcatcctcaacacactgccaaacagtcagtcggcagtccgcctgggagactaccactgccgggtcggaaggcgaagcgataggtcgagcatccgctctgagcttccggtagaagaactcgttgaacgtctgggaacaaggtatgtcagaccacgtgtcaaaacgctgagcttgacagtcctctcaatcagtcagacagatgacatacattgtacttgctcagatcaggttccaaaagatcagaaagcggcagtccaaactgatcgacaaacgattgtatgtgaggaagaacctggaagatcgagaatcatcagcatctagtcacgtctgacaagacgagcaggtgtctgtccggcttgactcacctggggacccatggcatcgaacgtctggccttgtttcacactctgagcgagtagcagcttttcgatcttggcctgagacatcaacggatggccagtcacgaagagtagatgcatgccactggagggaccacagttgggttccatagagtcatggctcagtcgaacgctttcaaggcaaatgggccgagtagagcgagaggatgtatatagaaactcgagacatatcactcacatccggacatagatcggcatctcttcaaagatcctctctcctgtcgaccggacgatcacaaagctacaagggtggacaaccagcggcagatcagctacgccggcgtccggtcgagcacggtcgctatgtccttgcaagacaggcttactttcccatatgttcagaagcaaaaagctgggaaacacaaagtctcatcagcagccagcacaagggaccaaaagaccgccagtacagaagctatagcaggcgacagacgccttatggggtccttctcaccttgttcatatcgtcctggtcaaagaacttggcaagccagcctcgcttcgagcctccttcttgagactgatacgaatgagcatcggactcgcaggagtctgtcttgccggctagtccagatgttggccaggatatcgacacaagtcacagatccagccaccagccggtcagaactcggtcgagatcgatctgacggtacgaagataggcggtcttgggcaacgcgagaacacaccttgctcaacgctctgcacactgcccggctggacaagatcctcgagggctgcttgtagtttgaccgggttctcgtctttgttggccgtcttgacggtctcatgagaaaccgagtttggagaggatttaggttggccgaagcttgggatgtgcatcttgcgagatgattgttcaggcgtgaacaacagcgagtgccagaggccatctcggtctggcgatgttgaccggtcgcggcgaatgcaatagtgacgtcaaccgagatacgcttcatgccagtcgcgacggatgaagttcgcctgtttttctactcaactccttcgacttggttttctatctagtagaaaacacattctgtctcagtttctgcccgaacatctgtacactgttgcaccggaagcgatgtccgaatatgagctagctagacaggaaaacatcagagccaaccagcttctgctagcgtcgctaggtatagatcccgttcaggtagatgctgctattttgtgtcgttcccgtaatcgtctatgttgctgatctctcgcttcccatgctgcatacggctcgatcatcagacgaagccagctccaacaccgaaggctgagcctgatggaaaaccaaagaaccgaaggccggctcgatccaagccgtatgagcgagctcgagcagtccctattcgacagtcagcccgaatatctgctctcgatgcgcctatatactcagaccacctttctatcgctgcatcgatggatgacaagcagggcagtattcgccgggtttactcagactcacctcctgcagtaagaaaggcgatccggcagctacctcgagcgccttctccgtatgttgaggacgatgtcgactactcgatcgtcgcgcctcaacctgcgagagacgacgacgggacattccgtttcgaggctggctacgaaggcttcacaccaaacatggctccgtgggagatgcttcgagagggaagctt

SEQ ID NO: 2202 - DNA, 17311 bp, Xanthophyllomyces dendrorhous
ccccagacctcaccgcctaccggtcggccctccctccatcgtctcagtcgtgtcgaagtctccctcgtcagccatggcatacatacactctcactcatctacccggtcaatcatctagcttcctcgaagcaaacctaccaatgaacccatccgagagctcagccctatacctctcctctgaccagcgattcaaacaaggcgaacgctcactcatcatcatctctcccgtcgtcggtcaaaagtcctacagcaaagagaaacggcaaggattagtttactcttaaactcaatgcttcaaagctttgatcggtgtctcatccttcttcgttctctgggaatcaatcttactaccctaacacatatgcctgcccgcacacgcttgcacccatagatttctctgccctccaccggcagtctatctcgtcggcccggcctggttcgacccgctcgttcatccccaggactttgcaaactacattcaaaaccaagcatcattcaagttgaaccctcgactcgaacctccccagatcgttctttccatctcgggtgaagtgccacctgccgtaaaacaggcgaccgtccgttggacctcaatcgaggctgacacctggccgaacgagctctttacctctgatccttcagccgacaagcacgccgacctgacctcacccaacgaccatggcccacaccggactgatgaacctccgctctatggctatgctatcgaccgaacgctctaccttaccgaggggatcacccctcctgacgcagccgacggcatctgtggaaagaagaatacaaaaagagtcatcaagaccacagtcaacatcaccgcgcccccggtagttccgggggttccgggcattcagatcggcacgttcgagggcaaggagatcaagttggtctcaaaaccggttcgaaaaaagccgggtctgcccctatcgagcggcaatggcaaggcaatcgacagtgggtgacctggctttcttcatacactctctcttttcttttgacgatatcctccttctgacacaactcttttccctctcctcaaagtcgctcttacccatggctccctactttccctctaccaacggcatcgctctcaaacctccctcactagatatctttgcatgtcagactgtacatcctggatacttgcaacagacggaagcaatctctgtccagacgagggcttgaagagaagagaatcaagaaatctccttcatccgatcatgtttatggccaagcctgatgtatggaatggtgagtattgacaattttctttgttttgcattttgatcttcaagattcaatgtttccctcttctttccctctcgtataatcagcctacatcatctggaaggtaaacacacaacgtccttccccagcaacaccaagctttcctatgcctgaactagactggccggctcctcctgaagaagccatccctttcaatccatctaaacctaagcccattcgatatagtcagtccagccccgctctctctctctctctctccccccctctctctctgtttctttgctcatttatctcctctctccgactgacgcgcgtcaattttcttcctcttaaagataacacgatcatgcttcagtgccctcagtctggcgcgctttctccggtgctagtcatccgccgttcggccgatgccggttacatcgtaggcggagatccagaagacatggaatacgatgaggaggagcgagcgtgctgtcctcccggagaaggaccaggcgagcttgtcactcagcttcagaaggtttgtcaattctctccttccacatcgccttgtacctcctccgatgcgtatggaagatctcatcatgttgcccgacatctcgccaaaggttgctttggaagtatacagtccgagccgcgttccgttagcacctggctctttcggcacgtccggttcgttcttcgccatacacgaggaacgaatccaaacggatcaaccccagacaaaccgttcagccttctccggtccgcctgatcctgtcaaacacgggaccgccagctggttcgttcgcgtggaagaccggtcgctctggtcggtcgtcagtgtcgagtctgtcaaacacacgttctgtatccctcggatccccactggcgcaaaagaaggaggaagacagctaggcatattggacagaccggtaaatccgttaccacagatattgaaagtcgaaactctagagtcgtcaggaacgacccaatggatcgaacataaagggttcaaagcagagatcttggttaccgatggagaggaacaaagagacctggccgtcctccggtgagtcttttcttttgatataatttccatgtcactattttggcaaaggaaatcaattgagagaaagaaaaaggagaaagaacaaaacgtggactaatcgcctttctatttgcttgtggaaaattgtcgcttttctatagcggaatgaagtttcaaaaattcccaaactcttcgttctcttcgtacgacctcatgtttggaacgacgccttcccctcgaacagagctccgatgtgaagaactcttgacggccatcatcccggatgaacacatttctcgaaattctctcatccgacgcgaaatcctcgatcaggggcaggatgaatcgaagatggacctcgatgggttccagaatggttatgctcatgctaagaaggaggagaaagacgaggagcgaccggtgctgagtctagtaaggaagtcagacgggctgacgttcgtcagtcagattgtatacatgccttgatgaatcgtttttttgttgtttcgcctcgtcgctttaaagtacatttcataaggagcatccgtccctagcgagcacgttcacgttcggcctgttctaacgatctgaaggtttcctcccaaccgggtccattgatcgtagccatctccaaagcagtcatcccttcttcctcttcgcccgtcctttctgctccttctgagccagcacggtctcggatgaggggatcggcgcctttgagtagaagaaggttaactgccgagagcatattcctatccgatgcgaggtggagtggcgtgtaaccctttgtgaaggcgaggcgcgcaagagaagagaaagacaaacaaaagttcagtatgtcatccagattggattttacatctcccgagagagggggggaaaggaacccccaaggaatgaagagaagaaaagaacgcgcacaaatgtatcaaactcattcacgtcacctactcggctctcatcattcaaccatttctttagaccttcaatgtctctttctatgacgaaccgatgaggttccctctcatccgcgcccttttcgtgcccatgctgcccgtctagttgttcagccggggtgctcgatagagtcgatacctttacacccatccccgctcgtttcggtcctcgaggagacccagggggagtcgacgaatctgagagattcgcaaggtcgaccgagtctctttttacagaagcaggtttgtagagcgatgctatcaccgggtagatccatacaaacatcagccggtgcaggcgtcaggagatttcaggagttgttgtagatatctccacacacacgcacatcacatggatacatacgaggaaggagggactcacgatcgaaacctagactaatcccgacctggacgtactcctgtctagcccttccttccgcagactgatcaagcacgtctccggatcctatatattgttttcctaccttctcccaagcgtcccatttggaacgaccggataggtcccagatgctcggccgggaggtaggagggacaggagagtgcgtggtcgatagtttgaacagtccgtaaagctactttgtcggaagagaagaggacaggccacaaagaatgagagatggtttcctggctgtcaatatcaggacaaagagacaaggacgaaagaaagagcttacgcgtaattttgtggaaacaggtaaggaagcggctgccggacaactcgagatgtattcagaacaggctatgaatatgtcttgcgatgggtatacttcagagacatccccaggagctgttgacataatgagccgagagataccgatgggaatggaggtgtgttggccggaaccggagaggaagttgcaggctgggtaaagatctgatggatggatggatggacgataatcgatgacggtttccggcaggcggatgatcttgatttctctgatactcaaacctcaaagtctcttccagaccgtcaatcgttcatcattcggactgcgattgtacaactaaacacaggtttaataaagagcctaattcaagatggatcaaccagaattgggtggacacagtcggaagaccgtgccccgactggaatacccccatacgtatgaaacctttctcgtaagttcgtctttgattcttgctcctctccgagttgtgactgaagcaggaagtttatcgtttgcctgttcttgtccttgcttatgtcttttactttcttcgttggaggggattttctctttgttctttctcgtcaagactagcaagatcatctgatcccaaacgttccttgtattttcccatcctcacttacgtccacctggccctgcttccacacgtttctcacttcggactcttcgtcggcagcctcgacaaccaagactatcgacagagcgtatctactctcccttcaaggctcagaacccatttcagttcatcgaccactgacagcagttgagcttgctgaagaagaaggagaggaggaggatggggatgaaacctcggatccgaccgagcgaacgatatgcgaacagactgggttggcaaatgtgctggacgcatgggcccgaggtgaagggcaagggttatatatcaaggactggcatctagctctcgaagcggaatcaaggtatggtggccgaccactggaagacattgcttcctcctcctcgagtcgaccaggagacaggttctataccaccccaggcgtgttcgaggatgactggttgaacggatattatagaagtcgtctaggaaacgattttcggttcgttgtatgctcttttcttttcgtttctttctattaggcgtttgtgaatacaggcttcttgctcggagaactcactcgcgccgctcgactctcctttcctctcaattaacagtacctaggggcatcaaagacaacgacacttcttcaccgagacgtctactcttcctattcattctcgaccaatgtgctgggtcgaaagcgatgggacttgtacccgccctcacacagcccgtttctccgaagggatcctagtgggagtaggagtgagcttctgagggatgtcaggaaggtcgatcgatcaaagtttacaatgtgggatcaggcagaacaggccgggctgacggtgattcaggaggagggtgagacgatattcgtgccgagcgggtggtatcgtgagtgctgttgttgtcaccgtcatcgcttttgaagttacatgatgaagagtctcgctaagaatgatggccttcttctttgaatacagaccaggtggagaacctgtcgactggggaagggactggttcacagatcttatcgatcaatcacaatgtgcgttccctgtttctatctctacttctctctctctctctctctctatacatttgtctctttgtgtgctctctacttccgttgactgaatgtgaatggtatttgactttatggttatataagtggggcaacgcgacgaacgtgagacagatgtatgactgtctgtgctctgatttggatgcgtgcgcggaatcgatagcggacgtcaaggatattctccaactcaaggccacgagggatggccaggatgaagcgagctggatggcagactgggtgaacgagatccaggagttgtgcgagcgggatgccggctgggcttggcgagacttttggaacatggtccactggggcgtccaggtgagtgtatgagtgagcaggaaggatgcgcaaggcacatatctgacgtcatgtccggctttttcgtcccttcctttcttcctcttgtctgtccccgacaggacgcttgcagtgtacctgaccgcgcgaaccgcccaccgctggaatacgtgagaactcaggtttccgggtgcgtccaagcctacaaccggcgatgggaagcgagctacctgtccgaggtgtgtgccgtcgtaggcttgatcgaggtggccctgagcgcggtctgaccgtgttcggtccgccaggcagatcaagatggacacggaaagagaagtcagcaacacgatggctagacgatcgtacgctgaaagggagggagcgggaccggtcgaacggttcttcggacggctgatcgaccaggaccgctgcgggacttctaggaagcaatgagagaagagatatgttcactagaataaagttcaataagaagcgcttatgtaaaataccggtctaaaaaagaggggcatcatcccgcgctgattgttcgtctgtccacggatcttattagcgtctttttcctctttgttgttgttgttgttcttgccgttttttgtttttcttctttcatttcatcttccttacttttctaaccgggcgtgttatctgttcaaagggaagcagaagcctatacacgatatgacgccgtccgtctgggttagccttcttgtgctctcgccagccgcccgcgctcgtcggctgttggcgttgtgggagagggcgtaatgtttatagttttatgtttatagttccctcgatcaccttctactaactctcagggcgcccaggcacgacagctaaaaccggctacttcccctcggtcacaccctcacacatacacgcacacgcacgcacacacacacacacgtactaccattgagcttatccaacacgacgttcccctaaacaagcgtgcccttctttgtcctgtttgggttctatcggttttagaagctaacggaaagaatgacattcttaaaggaatacacacaaccaatctcgtgttctttcgtttcttcttcccttcctgttggtgttgctgctattgttgctactgtcactatcgctattgccattgctactgctaccgctactgcactgctgccgctcattcaccctgttgggtagaacatacttcgcttgcctacctcacttataacactccatgtcgagtctcacctcactcacctcactcatcgttgccttagccgtctcagctagggcagcaccgattctgccggcatcagacacttcgtccatcagactatggtctatcttctctggtcaccctgtcgttccgtccgatctgtcagtcccgttttttctccccttcttttgtctcttcttcctccttttcctcctcccagatctacatcctgaccatgcctcaaagttcgcaccttacccttccactagtaagcttaccctggtcaactcatcaccgacggccccttcggccgtggctctcgctcttgcagccagaagctcaataagtgtaccgaccagtaactctgataatgaccccgacgcccagatggccgcagcgatcaccggctcaatcgtcttggtcgcttttttgtgcattgccggttacttgatcaaagagtggaacctgagacaaaagtccaacttggacggataccttggtgatccatggaatagctccaaaggagcttgcggaagcatcaacgagccctacgtcgtaagtcgctcgcttgttttctcctcctcctccttcttgcttgttgttctatgcttacctgccccatccgttgtttgtcatcttcatttcaaaggatgaatctccgccagccaacccgcccatgactaaccaaacatcaccttcagccaattccagacgagcaactcttccagcatcaaccgagatgccaataagccagttacccgccgcagcacctctcggcttccaagcgcccaaaatccgagtccctaaaccgagtgtcgttcctctgtcgggcgtggtcccttccgccggatacaacgctgaccaaacaggatcttggggatcaaacaaaccggtagagaccggatccccttgacatcagcctctagctgtttcacccccttctcctttccctcccctttcccttactccctcttgaaacgttttagttgcatccaaaagtactcttcaaccggtcgacctctgaatcgcaactccttcaaaattgaaagcatgtaatccacgtcacaactcgtccctccgccactgcctgacggaccgtcatcaagcgcatacacctcgatgtctgggcacacagaacgaacatcctccctttcagaacagcgcaggtcatcgaatggaacgtccttctcgtctcgtcatcctcccgctataggattcgcttgtttcctcatccaaggaccatctttattatatccttgcatatatccttcccccctttcccctttcaacaacaccttacgcgcgcttctccctctcttttttgtgttcttttctgaattctgctcgatgagctgaccaacaacaggcaatagctcaggccaagaaaagagggatagagagcaaaggccaggaaagaggaatgactaaggaaactgtatttatatataaacccccgtaatcacatctacaaatgaatcttctgcctgccctactttgcttccccttcatcttgtcttttgacatctcttggattgatccacatcctcgcctcgtcctcaaacggagacgtttatctgaccccttgtctaaccgatctcacagacacgcggagggggcagagcgagttagaacgaggtaggacacatcacatcgaggctctaccaatatgaagcataggaaccaaagagagaatcaccgagaattgggatcgaaaaagaaggcatgaaacaggtttacgttaaatgaaagaagagggaggggggggggaagaatccttaagaaacacaccgagtcacaaagaaaagagtgaatgaatgagtatatcaacatataaaatagaagaaaagggtgaccagtcggcttcgatatcaagtttcatgaacgactaatcaagagaggcaaaaatgagaaaacaagttttgagaagagaaagattgtccgatagaaaggaaggggaggagtaagaatctctatttgggaaaaaggacagaaaagaagaggaaaagagggatcatcaacaaatcagtaagagcgagtgatccaagaaaaaagaagggaatggaagggtatctgatgtactagaaatatatgtttgttgtgtagaagaaagaaagaaagaaaaaaagaaaggggaataagaaacgtgaagacgtaagaaagaatgtacactgtaggtttatcagacgcctttccccgattcaaatcctgtgcgacagtgtacgagtaggtagatatattggtatattggtgaagagaaaccaaacaaagaacaggtagtaaaatactaaagattatacgaaatgggtatataagcaaatagacaagcaagcagacagcttaacaaaggagaagaagaggaaaagaatggaaataaaacaagcaagcaggaaagtagaaaagcacagagaaaagagaaaaaagaagaaacgaaaaagtagaaacgaaaaagtagaaacgaaacagtagaaacgaaacagtaagatcatccgagttttatttgtcaacctgcatcccggacctcccttctcttgtaccctcgtcgtcgtcctcgtcatcgatcaaatcgatctctcgagaaggatctctaatgcgtaccccgctgaacgaagttaatacctgagctggaatgaagcttcctgtccggttcggctgtcttcctagtacacaagccaggaatgtctctggttcgggaataaggctcggtcctgctgatgagagcaacaccggcgagttgatggacgggctcgctcgatcgaatgaccagcctgaatgggggggcgcagctgccgctattgtcatcccattaacatatcctgagaaagatggttgtttgaacaagaaaggagttcctggttcggtcgatcccgctcgttcctttcgaccggcatccatcaaatccttggcggatctgactacgaaatgactcaagagccctcctgccgtcggtcggaccgaaggatcggaagccatcatctgtttcaccaatgcgaccatcggttcagacccccatgatttcgcatccaaaggtgtacccattagggagggcttcatctggtcaacatcgaggaacgtcgagggaaagtaagatgcgccaggtgtgacgagtgggacagaatctagagtgtgcatcgagtcatcggaggtcgaggtgaaggtagagaatgtgtgaaacaatcttgtcgatggaaatcctgatggtgagggcacatgtgatagtcccaatgagtcttctaggtcggagaagtcgtcggtccggagtcgatgccacggatcaccgcaggtaggcggaacgatgttcgtaatcgcctccaacatgagtagaccaagactaaagatgtctccttccttaccgacaatccccctgactccttcagcgctcaagtaatccctatctccctctctctcccaatccatcaattctgttctcgaaggactaacttctgaaaatccaaacgcaccgcctccgctacttcccatagctggtcccgcagcaggttcgtccattgactcccatccagccaagttggatcctttcaaaatctctcgaggcgctatcctaggccagcgggtggagtgtccccaatcggccagcacaacctctccttcgccgtcgatcaatacgttcgaaggtttgatgtctagatgaatgatatccattgagtgaacatgagcgagcgcggatgcgagtgaagcaagcaacttccacgcccgggactcatctaatccgccagtcgaattggtggtttggtgaacaaacggaacgaacgaggacccagaaggagtgtacacaagagacgcgaggaaggttgacagatcacctgactggaatagaggggtgtgaaggtacagtcgaccattttcttcccaaccagcatgaagagggagaatatttgggtgatggggctcgatattggacgagatggaacgaagaatgtcaagctcttctgcgtgtcgaatcctgggcaagtgtagaggaacttaagtcagccaagtctctgatgtttatttttaccaggagaaaacaagtgtacctatctcttagcccagaaaagatcgtactgatcttcacggccccttccgtacctgtttctctctctctgactgaccagactacacctccgtttccttggcctaacttatccacacactcaaaacgcttctcgaaaagattcaccattgctctctgcaactttggccgtctcgccatcccgggtcgctgatgtcctccctgttcccgctcatcgccgctactctgaaaattcgaggtcggactctcagacgtcaacgacacgcatgtcagggtcggttgagcaaactcgaacgctgctcggctcggtaatcgaggagcatccatcacggcctctcctttccgcttcaatcgttttccaccatcgccaccgccactgataaagctagcagacgttggggagctcacatcaggtgtcccaaaagtagagatgggaaagttaaaacctagcccgaccaggctgtccgggttggattcagagtcagaccgatcaataatcaccggctgggttgttctacatccatgagacggcctcagtggactagatgaggccgaatcaccagatgatgagttgagtgctgtgctaaactccccggctgccggagaattggggaagaataatctcgacggcctgaaaggtgtcgacgtgacggaagaaaaggaggatgctgatgaggacgaagggaagaggtctgttcgcctgacgggactacgtagtctaaagtcattcaagatagcttcttcaaaggaaggaccgcggtgcagatgaggcgagtcatcgatatcggtttcttgtccttcagccctggtagctagaccggaccaggaagcggatagatgtttcaccctagggtggtcagtggaaaggactgatgaagagtgaacgaggttggacgacgtggacggtttagaacacgagtgtgaaagtgggttgatagtgcgccgggtgggttgaggagaagcctcgtccgagaagaacggaaactcgttgaacttgggcgacgggagagaagatgatgaaaacttgcgctgaaagttgatcttgggatttggtgtcagaggtgactgttgaagttggacgagatgactggtgagcacttgttgaaagactaatatagaagaacaagaaacgtaccctctgcatcgattttttagcagatccatcttgtcccttcttgactaacgataccttgaatgcatccggacttggttttgcgtcttcaaaactcatctcgatctgctgactctcgggtgaccccatctgactgtccctgaagccggaacccaccggtttgccaggagatgggccaataagcctctgaatctgttggggcttaggacaagacccgctcatgtacgacgttgacgacgaagatggtaagaagaccggacgtgggctagtccgtcgagatctgaacgatggaggaagtgacgaagccagcatgttttccttgtcttcgacaacagtcgctaccgaacttgatcgagatcgcttcggagatggagggccggtaggggatagttgttctctcaaattaaacgccagatcagacgtcgacgaggaggcatgcatgctaggggatgaagtagcaggaggtgacggcgcattgaagcccgttccaaatgtgatatcgcttagaccgtttgatctgtcagtcccaagtttcgaggatgatcgaggccgaattgactggaaggtccgcagagtggatgttgagctattgttccgagtatgtgcgtatccgactgttttagacagaccaatgggctgggatgtgcgagaagctgtgggtaaactgtcgagaggggaagcgactgtagaagctgggtcaaccagcatgactgaagtcttttgcatccgagaagtacgttcgttcctagccgagagcggactggcacatctctcggtttcctcttctgacgaagagtcatctgttccgatggtcgctctgaaatctaactttcgtctgacagcagaaaacgaatggaaatggtgagctgagctatcgagcgtggtagacggtaaggtcaaagtgtcatcgagaactgagggatcatgagtgacgatcgaggacgacgaagtccgagagaaagactgagaagttgggcgaagggattgttggtggcgacgaaatgactgatgaattgaccgacacggatcggggttaaagatcgagggctgaaccatggatgccatgatcggacgtagattggtaggatggggaaaaggggtatatgcgtcggatgagtttgttaagattcgtggtggctaaattgagtaggaggaagaaaggaaaggcgaaaaaagagtgtgaagactgcagatgggtttaaagagtgaaaagtgcctttcttttccaatctgatggagaggtgaacaagaccctaggggaagatagaagaacaaaaacagggagaaggcgagcagtatcgaggaaggaacagaatgttttttttttgttttttttttacaaacgaggacgatgagtgaacgatgcagcggatagaatcaggccgtaaagttggtcacttcgcgtaccttgaaagtgaagggaatggataatagtgatcgagacctgactgagagggcaagagaagtatgcgctttcctctctgtgtctctatatgaagagagaatgaaggtcgtggtgattgttgttgttattattctcgtcgctgtcgtcttttgtccgtcttcgtttgtgtttcaaggaggaagttcagtcaacaggggaaacgatgagagcaggggacgagagaaagtaacagagggaggtggaaagaagaaagggcagagacgtgaattaacgcttttttgccctttgttaggctttttctcgtcttatcatgaagtctagtgtttttctgttttggcatgtttccctattttgcttcttcgtcacttcattccgccacgctctttccgactcgattgactgtttgtgttatcatacctgagctctggcgagcatccgcgttctatcggtaggtggctcttcccatgtagattaaataaagctcaaaaaccgtcaacagagaacgacgccgggagagaaaattatgacgaagaaaaagaaatcgaaagtcagtcgcgtcaagacgcgtcataacgtgtctcgtggcaaacccgccacattttccctcgttgcgccctcgtccgcctctttccgccttccagctgtcggtcgacattcgcatcgactcgatttcttagtggcttgttcatcgggcccgaacctggttgtttcgcattttctcttttgtctgtcgtctggctcacttccaatccagaatcagtaagctttgggatttcgacatcgagaagatgcaaaacagaacacggaactaaacagaaaagacaaacaaaccgaaagattgtccactggtcttttcattgattctttctttcgagtgttgatgttttggttatctcttcttctatatttacaacccttccgttgggtcgtcttgccacacacaaggatagttcattaagcataggtctgtatccgatcttcaacgacaatgatgttttgcatctaaacccttcaacaattctcaatccttcaatcttgcaagggtcgaaagatctcctttatttttcattctttctttcatactttgtgtcctccaaatttcatttgtgtgcgttttggatttcgaatcttctacatctgatctaatcgatagactcattcaaagcaactaatcagaaagggaaaaaaggaagaaaaaggaaaagaaaaaggaaaaaaagtccgtcgatcgtcttcggtcagtcagatttcggagattttgattccagacaaaagaaactataaaaagcaaagtagacgtggacaacaaaccttaagattgcccgtgatctttcattaaagtacatcggaacggaagaaaagaagaaagaaacgcatgccgtttcaaaggcctttagctcatagtttctgctgcaacgatgagagaaaatatactgaggggagaacaagtacttacctggtttatcaagctcacaggagctaccagccgggttcaaggagagagtgaggaacagttgaagttaatgccctaaaccacgcgtcaagattgtacgagacaagtgtaaaacttaccaggcccgaccccgagaactgtacgacttccagccgcaatttgagtcctaccagcatcacagatatctctcgcgcaaacattcaacgactgagccaccgcctgaagtaatagcaactcgtcctctgaattgacttgaagggcgatcttcgcttggcttaatattcggatgacatgaaaccatgagacgaaggctttttcagtttccgcttgtcgctcgtcttgcttttcctttaatagataaaagacagaatccatacccagtccgttcccagtgcttcagcagcgtcggattcgatgccaaaagtgttctgtaacaagctaacgtcgcatgtctatccaaaataacctcaaatgtccgatcagtattctgtcatcactcctcaattgaagtagtaatatgtacgtacccgcattgagcagcaatctttcccttggtcatcttcaaatcagtacggacaacgagaacctgtaaagaatagtatccatacagaagatggtgcgaggatttcttgaaaaatggaactctcaatggcaatagaggaattaagagaacaaaccattttgcattcttccatgaatccagcctgaacagtgttcaatccttccagaggccggtcctcatcctcactttcatcttcactttcatcatcttcctcatcgtcagattcaactatctcctcctcctgctcaatcgtgacctgtctaagtttcgattcgtcctcatcgttcgaggatggagtagtcccttctttcggctttgcggagccaacaacctcatcattctcaggagcagaagaaacgctccgatccctctggaaagaaagactgttgcctactcctatccaatatcctaatgtcctgtttttgtccggtagtccgttcagcaaaggagcacagcagagtagacaacagaatcgatcgctctataataaatatcgcagaagagtagaaagagattaggacatacaatgacagaagcgctgtggcaacgatactcgatgtctgagccattttatggtttgtagttaatctttgctcgattactctataaatgtacaaattgatgagctggattgagattgaatggcagccactatcgaggttcaaacgcagctatgaatcactggtattccctatacgttgaacattcctaagattttaaccgatgtctgacatcagactcttcatgtaaccctaacacatacgacatttcccatcatccccttgagatatatccgtatcattaattttatactgattttcattcctcagtcactcatttagaaactaattcaaagacaacaagaccatccagctaaaacaaggatctttgaataagaaaatcacatttatgtattgacagatcttcagatacaggccttcccattccatcccagccagctagttgctgaccttgatcacaaccttacctacaaacccagtctgcccagcctggaactcatacgccgcccgggcatccttgtactcaaacaccttgcccacgatcggccgcatcttgtgcagcgagatcgcatcgcacatctgctcaaactgtcgcctcgagccgacgaggaagcccctgaagaccgcacccttgacgagcgcaagaagagcgacattcggaggcatatcccccggcttggccaaaaagccgatacagctcaccacgccaccctgcttgaggcacgagaacgccttctcgatcgtgccctgtcctccgacctcaagaacatgcgcgacaccctggtttcctgtcttcttcagcacctcctcgtcccactcgggcgtcgtcttgtagttgatcgtctccagtcggctccctccgagcgtcttgacggcctcggcaacctgcccaagcttctcgtcagaggatgaagtgatgatcgctcgggcaccggccatcagcgcaaactggacacagccaagcgacagaccgggatgtaacagatcagagtgtgacagcacaggtcagcattgggaagcatacgggtacacaggcgcacggacgcatgagtacgggtgcatggacacacacacacacacacac

SEQ ID NO: 2203 - DNA, 774 bp, Xanthophyllomyces dendrorhous
tcaagaagcatcaagaagcaacaagaagcatcgaaagacatcgaagaatatcaacagagtcgaccgacgtacagcacaaggaagagtggcagcctcctcgtatgtcaggtgctcaggcacccggacaagaccactcgtaggcatgatcacatactcggcaagcatcccgtcgatagcaccgccgatcgtgctgtcgaggaaagaggcctcgtcaaagtatccgttctggtggtcgagggtgaaggtcgcctgggcagacagaaccgagcgagggtcggtgagtgtccgatgagcgtccggttagcgttcggtcagacatcagcaagaggccgggcgagaaggcagtgtgcactcaccatgacccggtctccagccttccagttggacacaccgtctccgacggcgacgacgtcacctgctccgtcagatgcagggatgacctggctcataggacggagcgcagattgatcagcttgaccgcgacgagagaagagagagaagagagagaagagagagaagacagaatgcatgcactcacacgctcagggacggcgctcagcgggtactggtccttggcgatgatcagatctcggtagttgagcgagacggcacggaccctgatgagcacctggttcaggccgggtgccttgagcgggacgtcctgcttgaacttgatcgagtcaaacgtccctcggttctcgaggtagtagtgagagtatgtcttgggaagcgagctggtcgacattgtcgtggaagtggatggtagtggatgac

SEQ ID NO: 2204 - DNA, 376 bp, Xanthophyllomyces dendrorhous
accaaacgaagggctccagaagcgatatcaggaactagtgggatgtttgacttacctggtgacgtgcacgaggtatgatatcgcttattcggtcggagtgcttgcccgtttctgttcgaaccctgcacaagtccatatggaagcagctcagcgggtgttggcctatctagcatgcacaaagcagtttgcactcaccatcggagggaaagcaagcaagatgcgaccggcaatcgagctgttcaccgactcggatcatgctggtgacaaagaaacaagaaagtcagtcacggggatcatggtcttcgtgtttggagctcttgtttactggaaaagcaagaagataccttccatcacgaaatcatcatgggagtccgag

SEQ ID NO: 2205 - DNA, 316 bp, Xanthophyllomyces dendrorhous
gtctcaaggagcatctcaagtcgtgtggattaggatgctgttgggacagctcggctactcgatcccgactgctgttgccaagtcggacaaccaaggagcgattgcgtcagtcaagagtggtcagctccatcaccggtcgaaacacatcgatgtgggatacaagtatgcgagggacttacacagagaaggcgtgctggacctcggatgggtccgaacgaaggagatgccggcagatatgctgacgaaggcgttgccgagggagacgtacgagcacctgaggctcaagggaggactccacggtcgagtcggagtcagg

SEQ ID NO: 2206 - DNA, 766 bp, Xanthophyllomyces dendrorhous
agcatcctatccagatctattctgaccacaaaaacctgcagtacttccactcgaccaaaatgctcaacagacgacaagtacgatggtcgatggtgctgaactcgtacaagtatgtctttaactttcgtcctgggaagaaaaacaccaaagtaagtgctttcactcgacggcacgactatacagaggggggtaacgctcgagcatctgacgaggctccccagttgctgctacgaccagtcgaggtatcacctttcgagacggacggggccatggaagactcagcagacaataacccagaaaatgccttggaaaatattacggatagcgcaacgtcggatattgcgactcgcgtgaaagcaggttatcagactgacaactatctgaccgaactcctcccttttctcaagaacccctctcgtcaagctcccgtccagttgacaaaacaactcaagaaactcactcttgagcctgacggactaattttatatcaaggcttggtctatgttccagatgaccaagacttatagactgacattcttaaacagtgtcatgaccacccctcagcgggtcactacggtcggtacaagacgctcgaactgttgtcccgcaacttttactggccgaacatatccaggtttgtcagagactacattcgttcttatgatatctgtcaacgatcgaaacctcgccggcatcggccgtatggtcttctgcagtcactgcctgttccagaccgaccttggtctttgatctcacttgaccacat

SEQ ID NO: 2207 - DNA, 848 bp, Xanthophyllomyces dendrorhous
taaaaccctaaccctaacccactgtcttcactctatcttgtctagcttgcgtcatcttcagttcttatcgagtctccgtactgacctgacaactccactctccccgccagtacgtccgtcaccagatctagtgtgtgcgcgcaaagctacttcgctgatcgagacttgtcctggctgttccgtggtagagctttcattcagctatcgactatcatgccggaggacaagtatcccaacagaagatacaagccggatactttggatgagatatacacaccggtcagggagccattcgtgtgtgacgtatactgcgattgctggctgatcactgcgacccaggggggtcaattgggggacttccctctgagcgagcttgtcgcccagtcaagtggaagagctgagctgagagagctacagccgagcgagttctggaaagcggcggccgcccacggcatcaacactgacaatctagtctaccgtgtttccaacatgaagctgtatgtgggaacacgtgatggggaaactcattggaacctagacgaggcaatgtacaagatgggacgaaatgcagagcatcatccactgatggactacatagtcataccggaggacccggtgtcctctggcaaactggtgactagcatggacgaagatgcatcgattgtggtaagcaacatactggcagagggccactccaaggcactgcggctggatgagtcaactgaggaccagagtgtgggcgaggagggcgaggcagagacgaaggcaaaactgtaagaggaagagatggcgcacggatgagtagcgatcagttgtgtcatgtcatgtcatgttgtgtgatgtatcta

SEQ ID NO: 2208 - DNA, 1107 bp, Xanthophyllomyces dendrorhous
tctgatagaaatggaagatgacgaaaccagcaggtgaaaagccggagacaagccagtgaaaagtcgagagaagtgaagcacacgaaaagatggaaagaacggtatgggtcgatggagggaagctgcccggtgaggatggtgcaagtgggaaggcagtctgggcaggattgatggagatatgggcgaaaaagggaaaaatcaagaaacacgaaaggacaaaacgacgaagtgtacgcggagaatacctgaatacggggcattgtccgtatttgttgtttagctgcctcagactcagctagcgcaccaggctaggctgtttcctacttcttctgttcatatctagctagctagctaggttggtaagtaggtaggtagatgatatgtagaaaacgatgcatggtattcaagtattcccaacagatgactcatcttatgtgtatccggatcggatgcctcggcagaagatggatgcgcggatacgaaagatcaactgagagccgagagttcgaacgctcaaagccaagtaaggaagggagggagggggaagagagcacgacggaaagctctataagaaagacgctatgacaaagtttgtccttctctcacttcccgttcgatccactcatccatcaagtacctgctctcacacacctcacagctccatcacacttgcacacagaacaagtattgtaattcggtaggtgtcctggcagaggcttgaaaagaaggttgcttctctcacaagctgttcctctttttcagcaacaaagttcgagaaagataccgatcttgttcatcctcatgcatgtaattttttctttccactcgaccgcagacggtcgtccagctgattgatcgttgagcttctatctacctgatcttgttgcggaaacaccaccacagtttcatcgagcgggcaaagcgttcaatcctggagagtactgggatcttcatggcagagctttggtcaggtgagttgacaaccaagatcagacccagggcttgtcaccctaatcagctctcgtctttctgcttgttgactcaacccgtcctaccgtcgctcagggaaggagaacgtagactcaaggcgaacaagaaggatgacgc

SEQ ID NO: 2209 - DNA, 986 bp, Xanthophyllomyces dendrorhous
atagcggccttgtgtgatgcatccgaattgtaagttccacttactttccctataccgctctgtgaccctcgccgagggcacgttgcgttcccctcccccatctgacgccacattacctcttctcatccgcctcaggttaaagcgatccacttcagaaacctccgttcgggacgctgtcaacgcgctgaaccgggcaaccaagattctcactgagcaaggccgattccggcaagctgccgatcgacagaacgaagtcggcgacatcttcagagtgtcgaatcggcccgccgctagggacgcgtacgaaaaggcgggacatttgtaccagatggatggcgcccaagcgtaggttctctatctctcccttctttcttgttcgcaccatgtttgaccgctctgcgctttcctgttcacgttctcggatcattcacagcatgggaaacgctatcctcagaggggcagcagagatctctggcttggttggagattacgaacgggcgatcgatacgtttgtccaggtcgcaaactggaatctaagcagtccactggcaaagtacagcgtcaaggagatctggctcaaggctggtctttggtccgttttgctttcatcctcttgcggccagagatcgcgaacggcccatcaggctaattgcgctatttgtttctgatggttcagtgcgctgggagctgacgatgtcgtgctggctcgtgagctagtcgacaagtttgctcaacaaggtttgtcctatcgtgtccgtttttgtttggtagcgaatacaaggaaacaaccatagcactgcttcattcctgtttccgttgtgtgcgtccacaccaaagatgatactttcccctccactagggaagcccgattcctgaacaacgtcgtgaccgcatacggtgacggcgatgtcaaagcctttaccgcccatgtggtcgagtacgaccaggtcaaaaaactcgatgattggaagacagaaatcctgctc

SEQ ID NO: 2210 - DNA, 564 bp, Xanthophyllomyces dendrorhous
agatcaagaagccgatcggtgacaaaggagggttgacttgattcgtttctaccattctccgctttctttccgttcgttctgcgagtgtcatgatctgacccgggttgacccgcgcagggtgaccttgcgcattgtagacttagtcttgcaacagacttagcatcgagatcatgtagctcgtggccttccttactctctcttggtatcgcttgattctctcttggtacatcttgactcgtccttggtatctcttcgctcttgcttgtgtttccttgtgtgtccttggcttcatatctcgaatgacatatatactaggtagtcgttggctatctccccttttgcctcccaagcttggaacctcgttaaatcctctagttcctgatcatcatccctactctgcagtattgcatgatccattcctgcctgagagctcaagcgtactgagtactgtcctcactcagcccccttgcctgcgcccataacaccgggactcatgccagatgaatcacaagcaatcccaatcgcaatgtgtcgaattctgggctcttccgcccatgaagtaac

SEQ ID NO: 2211 - DNA, 826 bp, Xanthophyllomyces dendrorhous
ccggacaaagaagcatgacgagaagatcgcacacagatatcagaggaggctagatcagaaacatgtgcagtcggagatcatctacttctatacaatgcaagccacccgatgcggttgctgacatgtacgcagctagcagactttgttatatgctcagccgcacatggacaagatgaacatcctaactatcaagatagagcgcatgggcagagttgatgaacagagtgagacagcacgctgttccagaaaggtaagagacagatcgaagaggatatacatcatctctatcgatattgatgcatgcgatgtagtagaacaccctgaaagacagcagcaaatgaagggaacaatgagaagacgaggtgagctcaatcgattcgagaagaaggaagacgagaaaagagacagtagttcactagaaaatacctggagataagataagtagcagccaaacgattcaaagtagaggtaggaagcttggcatagtttccggtgagctgcgaatgacagaacagacatcagatcgatgcctttccctccattcgtcaaatgcaaaagacatatcattaggaggtcatcctaccagagccaatgctaatattgggatgttatctattccatcctggtgagccgccttagctcggaggacgaacttctcgctatatcacgaatgtagaagactacatcagcctcagcctctccatactcagccggttatcatacctcataaagaggagtagatctgataaagacaagaatagaccgtactctttggtcagattctctttcgcctcctgctggtcaaagtatctctggggacctatag

SEQ ID NO: 2212 - DNA, 390 bp, Xanthophyllomyces dendrorhous
agaaaaacgatatgtgtttgaacgcaaaaatcagtcagcccaagatggaccatatatatgtttcaaccctcgtagtcaagttgatagacaggacattggtcgacccttcccgttctatgtgttttctatgggcaagtctgatcgagaaaaaaaaccatacttaatttaggtatctcaccatccttcagaggaccccatgtgtgaagggtatagaggaaaggggcggctgtatgtagcgcccaattggggtcgccatgagtaagtagacgttgagtgcgccgaatcgttgaatcgattgcagaaacactgaccagtcatgacccaagctgcaggcacagcgtacatagagtagtttttgtttccgtatatataagacgacatgatgaacag

SEQ ID NO: 2213 - DNA, 570 bp, Xanthophyllomyces dendrorhous
cacgatgggagaagatatctaccaagatgtcgactgagacagaatgggttagaggtgaaagagagcaagtttgaaaatgattccgacaccaatacttccgacacaatcaattccagaaagtgattctagaaggcaattcgagaagaggattcgaacagataattctaacaataattccaacactcccaatcatcgttgctgtttaaacaacgatgtgaggatagattgatactgaaaaacaagagataaaagatagaatgaggataagataaaaacatgaagaaagaagatgattagataaggataaaataaaataaactaaaaagaaatcaaccaggatgaaaagagaaaaactgaaataaagatggtcgaaacagctcaatccgaagcagaaagaagcgaaaacgattgaagcgaaatgagtaaagtgaacaaatcaaaatgatcgaagagtgaacacgaaatgtcaaagacgaagcgtcaagacgtcgaaaggtcgaaaggttggaaagacaaaaacagtcgcgactcaaccaccatcttttacttcttgcttcacctctggggtca

SEQ ID NO: 2214 - DNA, 510 bp, Xanthophyllomyces dendrorhous
gaggaggacgaagatgaagaagatgaggaagacgaaaaaattgaaaaagatgatgaagatgatgttgaagaacgagaaggaagagagaaagaaagagagaatgttgttgggggccaagtcgttggaatcgcagaagaaagtgcagctgacgacaatgtagaagaagaaagcgaggctgttcaagtggaggagaaagaaagaacggaagaaaaggaggaggaagaagaagaggaagaggaagaagaccaaagtccaatcgaaacagaggtagtgtcagcagacgagtcagactcggatagcaccatcatctatgaacctcgaacgactagaatagtgcctgctgatgttgtgtttccagttcagacagacacagtaatggaatctgcttcggttgttgctggatctattattgggccagaaagggtgatagtgttggaattgttgttggaattatctgttcgaatccttttctcgaactatctgttcgaattaccttctggatttctttag

SEQ ID NO: 2215 - DNA, 511 bp, Xanthophyllomyces dendrorhous
agagagaaacgaaaaactcggaacaagttttccgagagagactagagatctctctctatatccgggtaaagtgttacggtagcactcttgctttccaagcaagctgctagggttcgactccctatacccggaataacgcagcactgctgtgcaccgctattcctaatggtaaggagctggtttttgtaccagaaaatcgggggttcgattcccccggcggagcccctctccccattcttgaagccttcgccttcacttggggttgaggaggcccctcccagggattcttccccaactacgttggacaagaagaacccccgacgggtggggtggggacctggcgtagtggtagcgcccagcctttgcgtggctgtagccccggttcgattccgggggtctccaaccgacgagcgagtcgccggttgtattgcccggaatcttccgtggcttgcagcctcgaaagtcgggcgtacctctacgcgggtgccctctctccttctctctcccctgc

SEQ ID NO: 2216 - DNA, 319 bp, Xanthophyllomyces dendrorhous
actccggcagggagagaagggagcctctgctcccttacctcctggtaaagaagtcggagcaggcctaaaggccctactccgccttctctccacaggagaagcggggcagaggacgggcagaacagcgtcctgaggggtctgatggacacgcgtctagagtagcgtactctcctccgaccgttagctacggagagtactactctagaacgctacgctgttctccccacccctccctgctttctccgggcggctggacgcgtctaacggacccgcgtgctctctcctattgcagccctcggcgtacagctcgggctgcaat

SEQ ID NO: 2217 - DNA, 393 bp, Xanthophyllomyces dendrorhous
cgtacagctcgggctgcaatggagcggagcaacgcttctcgccctgcgaaagctaggagggtcttttagtcttcttcactcccttatctgtcccccccgggccttcctccttgccttagtattccggtagccactacgggaatactaaggaggagagaagacgaaaaagggggcttcattgactcgtcccttcgttctcctcaattcttccctccttttcctaacccgggtacccgggccacggggaaaagaagactaaaagtcagttcttcttcctttactatccactccctggtcgtggagtaaagaaatgagaactgattgcgaggcttgtcccggacctcaccaccgagtttcagaggtcccgtttctttgcctcctcttcttcttact

SEQ ID NO: 2218 - DNA, 752 bp, Xanthophyllomyces dendrorhous
tttcttttcttttcttgccctgatctggctgacctcaggaaaggatgggtgtgaacgaagctttgtctgaactcatcgcctcatcgtctaatcgcatcatcgcatcatcgctgctttcttgcttgtgtgaatgcctgcctgcctgcctgctcgctcactcgctagctctgatcgtccactcattgtctgacgcatctgatccggctggagacgtctgtgtctatgtgtaggcacgcccagggagacttccagtcgaggctgacgatccagctcgcagatggagctgacgtgccaggtgtcaagcacactatgttgcatgcatactgagagtgatctgccgggtcgatctgtacgtgccactctttgacctgctagtcacaaacggtcgtcggacaacggcagccagctgacgacgagaacacggacagacaaatagatgaatagatgaacagacaagcagacaaacagacaaacatacacccatacgagtgcacactgatagctgcaggccgagcatggcctttcgagtctgctcggtcgaccagtctctctgccggacccttctgggtgtcagcccccacgtcggacaccacagccgatggttccggtggtggccggactggaggacagggcggctctgattgttgctctatcgatctactggtcgtggtgatttgactgagcgattggtaaatcatttgtcctgttctctttgcgttctctgcgttctcgactgcttcttcacttttatt

SEQ ID NO: 2219 - DNA, 2452 bp, Xanthophyllomyces dendrorhous
  misc_feature (1218)..(1227): n is a, c, g, or t
cacgacaagctgcctcgtgacgtcctgctgctgaccgagccaagatgctgatagacaggcggacggatggatgttcctttttttttctttttttttcttttcttttcttgccctgatctggctgacctcaggaaaggatgggtgtgaacgaagctttttgtctgaactcatcgcctcatcgtctaatcgcatcatcgcatcatcgctgctttcttgcttgtgtgaatgcctgcctgcctgcctgctcgctcactcgctagctctgatcgtccactcattgtctgacgcatctgatccggctggagacgtctgtgtctatgtgtaggcacgcccagggagacttccagtcgaggctgacgatccagctcgcagatggagctgacgtgccaggtgtcaagcacactatgttgcatgcatactgagagtgatctgccgggtcgatctgtacgtgccactctttgacctgctagtcacaaacggtcgtcggacaacggcagccagctgacgacgagaacacggacagacaaatagatgaatagatgaacagacaagcagacaaacagacaaacatacacccatacgagtgcacactgatagctgcaggccgagcatggcctttcgagtctgctcggtcgaccagtctctctgccggacccttctgggtgtcagcccccacgtcggacaccacagccgatggttccggtggtggccggactggaggacagggcggctctgattgttgctctatcgatctactggtcgtggtgatttgactgagcgattggtaaatcatttgtcctgttctctttgcgttctctgcgttctcgactgcttcttcacttttattatactttatttattcatttatttatctactcaattctcttcccatccgtcttttctctattcgtgttttctactcttgttttctctatttgcgttttctatatttttgttttctctatttgcgttattctattcacttttttttctttctattcacgtctttcctatatgccctttctctctgttcgctctccgctctattcttttttccctcccgcttgccgttcacttgacttacaagcttcctcttcgttttcgtctcgttcgacctcgctacgccttccagtgccttgcttctctctgccttgtcttgttcagcctagctttctcaacttagccaagcttcattccatctttctctctttgtttctnnnnnnnnnntctattcacttttttttctttctattcacgtctttcctatatgccctttctctctgttcgctctccgctctattcttttttccctcccgcttgccgttcacttgacttacaagcttcctcttcgttttcgtctcgttcgacctcgctacgccttccagtgccttgcttctctctgccttgtcttgttcagcctagctttctcaacttagccaagcttcattccatctttctctctttgtttcttctctgctctccttccctatttccactcctttctgtctccagccttcttctgctctggcaatgcctgagacgatctatggcggatgtctcgctaacaagcgtaagcacgagtgagtggccgacccttgatcacatgtctggactatgcttctctctgattgccaaacggacggccgaccgagcgatggttgatcgtgatgtccttgtcgaaagcacgtcgcagctttgcacaggctcttgactgactgtcctgttgcttctttcttttcttgtcactgatctgttgcgactggccttctgctatctctgttacttcttctgctggttccgtgcgcgttcctctgttcttgtggtcttgcgaactcgtgatcttgtggtccatcgttctgcctgcctgtctgtccacctatcggctgctgcgttggctgtttgctcgatctctccaccgccccttcagattgcaggagatagcccgtgcgatggggatccgcgtgaacggaacgcccacgaaggcagcgctcacaaagctgatccaggacgagctggacgcgtgtaaagaggtgcgcatgtcgaacgaccttcctttccttcctctctttctttctcttttttctaccttttttctttttcttttcttctttgtttccttcgtttctctctttctttgcctgctatcggaggaacatcgtgctcacactcgtttgcctttctctctatgtttgtgcatttccatttttctgctttgtgcgatctttttctctcccttcttctctgcctcattttgtttcgcaccttcctttactcgatcccttttctcccaccggcttgtggtcttggtcatccgtgtctgactgacaggtctacctctcgcaagcacagttcagagggctctatgtgtctgctcgggtggctcgcaagtcagccacgagacgttctctgtcgcctccggtcgtgtatccgaacatcagccaccagtccgact

SEQ ID NO: 2220 - DNA, 1778 bp, Xanthophyllomyces dendrorhous
ctggttgtggtagtccttgaacgcgtcgttacccttctgaccggctcggatcgatcgataggcgacgatgaacccgtttttgatctcttttccatgataaagaatactgtggacaacagtggcagagtatacagcaaagaatgcgccatacatgaccaggttggaagcggacatgacaggctgggagtaaagctggtactttgtaacgtccaagttcttttttgcatcaaggattttggtgacgttgtaggattttccggtgttgtcaaatattcggttggagaccatagggaagtagccagtattccagatgttgtgggcccagaatccggcgatgatggggatggtagcagccattccagcagcgacgttgacggtcgagaagaatgggtagatcattgggtaccatgagttaggattgtaccacgaccaatcgagcgatggaataggcgagataccgagcccagagattccaccggtaatggcgcttagggtaatggacttcggattgatccaggtgatccagttaaagtacgaaatgcattgtaatagtgaaccagggagccagtagtagacaaacatggcggcaaaagcgacgaagaagaacttcattcgggaaatcttccagccatttgcagatcggttttctgtatcgtggaaggacttgtttaatgcaatagtagacaggttaaagagcctacgcataaatggagaggtagacatctttaactctagttgcacgatccaagattaggtccaagtccagatgtatgactgaggaatgcttaccagatacagtgctcggggtaaacgatgaaacgtcgagccatgccggcaaatccaaaaccaatcatctgcatggaaagtccagtcaatatttggtatccgaaatctcctgcccataattgtccatagaaaatactgtgagaagggagagaggcaattagagatcgaatttgatagcagtgaacaaattgtggaacatactcgagcttctggactgcgtgccccggaagtcatgaacaagtaagaagaggaggcagaatcaaacatcagtatcctcatcgagttagaggcgtggttaaatatgataagaattagaaagaacataccgatgatgatatgcgtggtgtagggagcaaacattccgatgttggccatgatggtgataagcatgtgctccttctcgttgaacggtccaggctggaagtagagaggatggggcggaacaggatcagaataggtcaggtcaggtcaggtcggcaaggcagagataccaccaggaagagatgactgaacagctggagagagccggagagatcgagacttacgttcatgttgaagccgtgtcctcggaaccggaaccacaccttgttcggcagcaccttctccatgatctttgcgatcgggtacgacagaatctggatctcgttcaccgtgagcgagaacgaaggcgtacggatcgagaagaactggttgatgaacgagccgataccacaccagatcgtgccgatgacccagactcggaaggtgctgacaggagtagacgtgtcgtcatggcagccgacgaccgctcggacctcagggtaaggggacgagaaccggatgagcgcggcctctgtgggtgcaagagggaagggagagaagagagggaaggaaagagtggaaggttagtgagccgtcctgaggacgcgcagcctggcttgagcgcggaaagagagagagagagagagggaaaggcaggactgaccgattcgcatctcttcgagcaaggcatc

SEQ ID NO: 2221 - DNA, 3591 bp, Xanthophyllomyces dendrorhous
tgagtattggtctgagtattggtctgatcatctgggtgagatactcacccatgtatccatctatccgcccatctgtctatctatcttcatctgacagcatcctccttccgctcttctgtctctctctactcctctttctgctgcctctgctttatctatgtcctctgcgtgctctatctcctctctccgctcgttgattcatcttccctatcgctcgtccaaccgatgatcgcttgccatgtcattcctttctgcaagagttgtggcatacttggggtcagaaacggacacatcatcacgattgactatggagacagtgtgtggagccagagaaagcagaacaacccaaaagaaataaactacaagtatcagactacaggaaacaaactacacgagacaggagaagacatccctaggcaaaggaaaggcaaagaagaaggggaacagaaagaaggagaggaagcgaaggaaagcaaaggaaagcaaagggcacaagagggatcacaacgaaaaaagatagagaaagacaaagagaagactggaatgacaaacggcagcacacaaggaccgatcgtcccgtccattctgtttgccgtgtttgtcctgcccgatcatctccagacatggccgcttagcgatcgctagcttggctcgcccgcagaaagctgctcgtcgtcgatgaacgccactccttgtctccggccgatctgacatccacacaggtcgagcctgtcgaacggaagcagaaagctctgcagagaggaaacgctctgaccggacgaccttggctgcatccttgatccggggagacgccagtttggcaagagaaggagcagaccggtctaggtcatcgacaagctcgaccttgatcgttggtatcgtcggccgtcgagtctgtttgccaaacagaggcgagctagcaggtgaggagtcagaacgctcgacaggtggagcagacagaacggacggagcaggcgggctagacagagcagatccagaaagcttggctgaagataggtcaaagcggcgcttcgcaggacgaacgtccgaccgcctcttctcctcgtcactaccatcatcgtcattgtcgtctttgtcatcatctatcactcttcgtcgcttaggtgactcgaagggaggccggggcacttggagtcgctctcgatcgaccatctccgtccagctcgctgatcagacaaaaaatcaccagaaaaacatcagtcacaggcacaacaagggcgagcaagaagcccgggtgagaagacaggagaaaggctcgacagaagagagacacccacaagaagccgcctgaggcaaaggcttcggtatcgccgatgggttcagaaacgcatccatctcggcatccgtcatcggctccatcccccgcagctcgaagcgctgtatgggcgtgaggctcttgagatacgacctctctcgacactctgtcgtcgtcgtcggtagtctgtgcgaacaacagaaggatggaagaacagaaggatggaagaacggaagaacggaagaaccataccacgtcagtctagaaacaaacatctgacaaactgaaggcgtaagcagccaaatgcatcactgacctcatagcctcggcctttctgacccttccagccctcttgacgggctgaggccggtcgccctgcctggctcgactggccacgttggcccgttcattctgcgatgcagcgataagaaagtcagtcgacacgaccgagacaagccatgacaaacaaggacggcaggcgaaagaagagacgaactatgggcaagccctcgacaggatatctcttcgccggccggagcggcttagcggcgggagcagttcggctaacgggtgtaggcgatgcgggcatgggctgcgtgtccgaggaaaagtgcggagcatccaatgaggcgtaagaggggctgaacgcgtgtaaagcatatgatggggaagacgcataggagatgctggaagtgtcagaagtgctggaagcgtcggaggcgccggacgtatcagaggtgtcgagaacgttggagacggaagaggcaggagggagggaaagactgtaacgagaggacgcaaggctgaggctcatcgcggtttgtatgtaatgctagtatccggactgcgtcgaacggtagtgggacaggaaatgagacaagtgcaccaggtggtgtgcgagcagggtgcaggtgagtgtgagtgtgcaaggggggtgtgggcgggtgggcgtaggtggatgacgcgtagcgggttgtaatcggtcgatggagtgttcgtggttgatggtcggaagagtgttgcaacacaaaacagcgcagtaccttttgtactctggacggacaagtgtccagacagataagcgggctgacaaacaggtatgcggctcggtatataggtcgatgtgcaagtagagcacttacagaacacccggcctgatcacttcatcgacgcgacaagataggcagacagatcaataggtcgaaaggtcggcaggtcattcgctaggtaaaggactggcttggtacaagaagaagtcgagacatctgacatgaacagagcgaaagatcacaagagcgggaccagctagcgcgtcctgagggcgagcgactgtccggacggccagctagccaccagactaggcatgaccaccctggccatcggtcgtctatcactgagaagcaagtcaaagaacagagtggaagatggcatgacacacagagatcaaacagagaacagagaaaagagaacagagaggacaggggaaacggggaaagaaaagaaatggagtaatcgaggaaaacaaaggggaaaagggactgcgttctgtacgaccaggaatggcaaacctgcgtatcgtacctggccaagctcacaccacacagctcggcggccgacgtccgggtacaagacactcgatcgcttgctcgtccgttcgctcactcggtctgtgtctgagctctcttcgtcaggcagactggtagatggacatgtgtggttgttggcagcagcgggagcaggaacagaacgaacgagcagtcggatcgagacatggtcagcttgtgcacaagagaaagcagaggcaaggcagtagaacacatgaacatccagaggagaaagccatcagagtgtcagagtatcagagcaccagagtgtcagagtgctagagcatcaaggtatcagaccgtcgggaggtcaaggtggacagggatgtcagtccagtcagcgacgctgcactctggaacaaccgaatgagccgccgacaagagatacagccgacaagatctttgcccatccgtcgcaagcgagtcagttactagccatggtcggtacatgcagaatcacaggtactatcacaggagcctctacgggcactgatgctggtattgacaccagcacgggcactgggtaagtgaaacggagatggaggcttgccggactcgacgaccggatgtagtccagctagtgaccgcgactagggatgcgatcgtagttacgacgactgtgcctttcaactgtaaccctaatcatagtccggtcgtacatcgagtatcaggccatccacaccacgagacgacgactcatctagagaacta

SEQ ID NO: 2222 - DNA, 462 bp, Xanthophyllomyces dendrorhous
gtgttgagaatacttgaatatggtgcattcgtttctgcttatcatctatgtacctaagccttagctagcgcactctgccagctggcatacctcttttcttctcctacctctttttctttttctttttctccttcctcagcatttaccataactgttcgttggtgctgagattactttgttcttatatctcagcaatacgaaaccgtatttgctgtcaactttttcctctttttctttttcagtgtctgtttttccttccttagcagttatcagaactgtctcgttggtgctgagtttgaatttcttgttttccactctattttatatcacaaagagtttacttgctatcaatctaggcaaaacacttggatattctcacagattcttttttctattgataccatatggtcacacaatgtacgagagccagatgacatgtaagaccccagatgctctgaaaag

SEQ ID NO: 2223 - DNA, 1873 bp, Xanthophyllomyces dendrorhous
gattttacatattggaattcatgtgtggttcaatatgtatgaggccgtttggcggagtggtctaacgcggtagccttgaattcaattttagatagctactcttctctgaaggcgtaggttcaaaccctacagcggtcgatttttcttttgccaaattttttcaccacacagtttgtatatcgccagactggctgttgtgagctgaaagtggacaaaagaacgtacgggaacttaacataggtttcctcgagtatgacgggatcaggtgaatatcatgcgtcttgactgtttctcaaatttcggatttttacgatatcagccgacgatatctgaagtccatgttcttcatcagtctcgcatttttccgtctctccttacttctaccttcccttttcttttagctctgaccaagactgtttagttgtcgagaatttcactatggtcagaccttagtcagtatacaatggaaggttcagttggtcgtggctgtctttcttggtgcccgtcaggacacatgctccttctctttttctatcttggcttccacgtttcgtctcttatcttcgcacatacgttccatgttccgactctggcttcgttctgtctgctcttcactttcttttcattgtgtcgtcttcgtcgatgttctattcttcaccttgtctgagccttcatttctctcacgttagtcaccaaggttcgtccgacatcgctgccatctttccatcttttgactgctcgtcggtagcctacctgttccgccgcagctggatatgtctctttccgtcttgtaggcttgtgtatacaatggtggcttccactcgcatcgttctgaacgctcagatggaatgaacatttcctagccgacagaaacatcactaccaaggtctcaacagcatcctagtctacagacgttgcatccacgtttgcgcccaccaaaccgtagtcgacagcccacacacagagcccctcttcatcccgatgacgatgcaaagggatgcgaagagcctatacttgttcgcctacctcaccttttccaaaacacacgtcggtagcttagtttgtcccagctctttctgtcacctcacccacagcatcctccatcgagatcatagccaactcgagagcacatatagtacgccgtcttgatccagatgaagactctactcttgacgatcacatccaaacgtgttcactctgttgaaagaccggcagcttagcccaacactcagcgagctgaccaagatcgtccgaacaacagtctcgaagcatcgctgcatgatcgtagtcggacacaacctgcacacggaaagcacttgatcagtaatcggatacatcatccatcagcatcgtaaccgaagaaaagtgactcacgtgcccgcgtcagtctggcttggaacacaagaaggcgacaaggatagatgagactgaccaccacaagggccgtgaggcatggaatgcatgtgtcagccagctcggctcgatcctcgacacagatctatgtgcgatcaggccgatgctcagtgaccgccaaccacgttcggagtcgggccactcgatgcctctgatgacgtatactttctgaaagatcccccatgttttacttacatcgacgattcggttgttgtcatttcagacatcaggatcggaagacagtggctccggtctctctacaagtaggctatggtaggccaaggctgatgacgaacaacacatgagtacgggcaagcttggcatggactctgctagacttgacaaccgaagaacaaaaggacaaaccacaagatatacattgccaggatcatggagggattcgactgcaacatcgccttctgtgaaggtcactgtgattggcgatctcactgtgtatcta

SEQ ID NO: 2224 - DNA, 458 bp, Xanthophyllomyces dendrorhous
agcatgaagcttagactcggataaaggtaggacaggcagaaacataccttctcgtctcttttgcatgcttcgagcagatagtcatgctcgtatgcagagactccgttgcactccagcatacgggtatctccttcgaagtcgcctagcatatgttgtagaagacctacttgggcgtccaacgagacttgcttggtggagaaggtagatgtccggccgagcacgacgacgcgctcgatttggcgagcttcgatatggtgctggacggaactctggaactggtgcaacctggacgttgcggcaagttgaagtggactgttggaaggagggagtgggaccaaaggagccagtgggacgagaagagggactttatcatcgttctcatcttcatgttcgtactcgaaatcagctttatcgtcaactccaagatcaacttcaacttcaactccaagatcaactcc

SEQ ID NO: 2225 - DNA, 1465 bp, Xanthophyllomyces dendrorhous
  misc_feature (914)..(923): n is a, c, g, or t
gtcgttcgtcttcgtcgttcttcgtcgttcggtctgtctagtttgtgaaagagagtcttcgtttcaccccgcccgctccgggcacgatgcgagtggccgccaaagatgatgtacgtgtgtctgctgtgtctgctgtgtctgctgtgtctgctgtgtctgctgtgtctgctgtgtctgctgtgtccccggtttctctgacagactgacgaatgcaactgatcggttcggtctttccacggtctgtgctcacttggcctagatcatctctctgagcgagcccatcaagggccgggatggcaagctgatgacagagatatatgtgccaaaggggacgacgatgtttgtccgtgagtagagcagccgtccgctggatgtacacgctgtccgtctggctgatgagatatgtgtggatttgtcgtgcgtcggacacagcgatcatgcgtatcaaccgtgccgctcatatgtacggcaaggatgatgctgacatcttcaggtcagtcggggctttctctgttgcgactcagcctggtctggtctggtctggtctggtctttcctagcctggcttggatcgccgtgtctcagtgtcgaggcgttgacctgttgctaatctcttggctcgtcgtgggaaacgctctagaccggaacgatggctagagccgatgccacgatcggtgatggaccttgatgtgccctatggtcaccaagcgacgtgtgagtacagagcctgctctgtctgtcgtggcgtcttttgactgtcgctgatgagcgctgacatcgctgccggtcgaccgggtcctactagtcctgggaggtcctcggggatgcatgtgagtccagtcggtcagatgaggtgggctacatgggccgtaggccgtatgggctgtacgagctgacgcgcgctctgtttcttcnnnnnnnnnncgttgacctgttgctaatctcttggctcgtcgtgggaaacgctctagaccggaacgatggctagagccgatgccacgatcggtgatggaccttgatgtgccctatggtcaccaagcgacgtgtgagtacagagcctgctctgtctgtcgtggcgtcttttgactgtcgctgatgagcgctgacatcgctgccggtcgaccgggtcctactagtcctgggaggtcctcggggatgcatgtgagtccagtcggtcagatgaggtgggctacatgggccgtaggccgtatgggctgtacgagctgacgcgcgctctgtttcttctgtcctcgaagcggctaccggtttgctcttgctgagatcaaggcgtttctgtttgtcatcctccgccagttgacgttcgagagcgtcgtcccggcgatcgactatgagcatcgggcaaacatggtacaaagaccgagggtgaagggcaagaaggaggaagggttccatatgaagctccaagtgcgatcggtcaaggactgaggaagcggactgtgttgcct

SEQ ID NO: 2226 - DNA, 1682 bp, Xanthophyllomyces dendrorhous
aggtaagcctcggaggcctcctgaagagccatgacggccgacgactggaatcggagatcagtcttgaaatcctgggcgatctctcggacgagccgctggaagggcagctttcggattaggagctcggtcgacttctggtatcgtcggatctctcgaagagcgaccgttccgggtctgtagaggagcaccgcagaggcatgtcagtctgaggttactctgagcagaagagcagaagagcaaaagaccaacctgtatctgtggggcttcttgacacctccggcagcgggagcagtctttcgggcagccttggtagcgagctgctttcggggagcctttcctccggtcgactttcgggcggtttgcttagttcgggccattgtgttctaaggttaataggtataggttggttggatagtagtgtgtggctgagtgcttggtgagtgcttggtgaaggtagctaaggtgatgacggtgagtagtaagaaggaacaaagtcagcatacacccccacacatgcccactctttatgtctcagctcggtcgaatccagttctcgtcccgatcggctgctcactcagacagacgcgtcgtgaggatggcgagcgagcaggaaggaggcgggaagcgagacggacacggacacggacacggacgcggaatataatgatccatacggaatataaaataatggtgtcgaatataattgacgcgtcctcgtgtttagcgtgagacgcgagtcgaccaggtgactacacgatcactacgcgacgactgtagtctggctctagcttgattaggaaagcgactaggaaagtgactaggaggctagctaggagagcagcaccagcccgtcgacgcgtccggccgacgcgtccagacactcagacgcacgtcgcgaccatagagaccacgtctccccgagtcgcgtcggcctgggtgcctgtctcatccgtcgcgctcgcctcacgcgtcagtcgaccacgcggccggctgggcgcgtcagccggacgaccgaccggatggtcttaaagccagccaattcttcgtcccttttcccattctcttctcttcccctcatccaagccttcatactcagccaagcaaccagccagccaacacccacccaccccactcaccaacaacaaacagccatgtccggacgaggaaaaggaggaaaggtacgtgtcttcacctgtgtctctgtcgatcggctgtctctgtctgtctgtattctctgatcctgacatgtatcctccattcgcccgttcttctgatctgccttctcgatctgctctaccctcacccacagggactcggaaagggaggagccaagcgacaccgaaagatccttcgagacaacatccagggtatcaccaagcctgccatccgacgacttgcgcgacgaggtggagtcaagcgaatctccggtctcatctacgaggagacccgaggtgtcctcaagctgttcctcgagagtgagtctccttgtcgatcctgcatcgatcttctgtctctgtcgcttgatccatctactgatcgctggcttatcgcacgtgttcttttctccccagatgtcatccgagactctgtcacctacaccgagcactcgaagcgaaagaccgtgacggctctcgatgtcgtgtatgctctcaagcgacagggtcgaacactctatggtttcg

SEQ ID NO: 2227 - DNA, 1148 bp, Xanthophyllomyces dendrorhous
tagtcgtcgacgccgcttacgggttctaacccccaaggggggagatagagagccctggcgggtccaaggaccactagccgcaggcagcaggcggcactaggtgacggccagaggggtaacctctggctatctccgcctccgttccttcaaccaccgggaggtgatgaagaaacagacgaggaggtctagtgcaactagccgacgagcagtagcgggctacgatgagcgaacgtagggagcgaagagaaggcagcatagaatcaataaagactagcccggagggcctaacagaaaagaagacgatcgacatcgttgatcgagacaacataaagcctagctttatgcctaaaagcttctgcttaaagctaatagagctttaaaagaagcttagagagctctctctagcaaatcgcctacagagagatcctctctgtagatttccttttctgtcctacgcaaactagcggagaaacatggctccatgtttcagcaaattgctcttctcaaattgtaacaggaatcgaacctgtaccgaaggtactttaaaccttcatgctccataacaccaacaattttcatacttataatctccgagagtccaaaggacaggaggagacaaaggaagtggaagagagcaacgctcgatgacacattaataagcgccgcaggcataacgaaatgccgtaggccctacgcgaagcagaggaaggcgtagcctgataatgcttctatatgcggggtaacaccccacagaggttctctagcgagagaagctctcgtggaataggatattcctcgagacttccagagcgcttagagcctccccttctactcccgctacagagcatagctctattagtgggagtacaagatgcagctctagctgcccaaccataacactcaccagctcttggagtccctactgccctcttgtctctatacgcctagtgcgtataaattagtgagacacagaggtcggtagtgacccaagttcttcccctcacgggtaaaatgttcaacgctagttggcgtaaataacccctcgtggtctccaccactgaggcctctacgtcttttaggagacatggggcccacgcagtctttggctcgctgcgtgtcgctgtcccatgctattctcctgcacacat

SEQ ID NO: 2228 - DNA, 464 bp, Xanthophyllomyces dendrorhous
  misc_feature (380)..(389): n is a, c, g, or t
acagcggcaagtcgacgatgtggtcaagtgagatcaaagaccaaggtcggtctggaacaggcagtgactgcagaagaccatacggccgatgccggcgaggcttcgatcgctggcagatatcactgttgagaatacttgaatatggtgcattggtttctgcttgtcatctatgtacctcagccttagctagcgcactctgccagctggcattcttctttttttcaagagattcacagtttgttcttttaagagtctccacagcaatctgtatgaaatgataccaaaacacaacactcagtatcacagattgcgtatctggtgaagactgagggaaaaggaatgagagatggagaaaagagggtttatatagacgagagaannnnnnnnnnaatctagaaagagagggactgagttggcccgagctggactgagttggcccgagtcagatggaccatgaaaagaca

SEQ ID NO: 2229 - DNA, 866 bp, Xanthophyllomyces dendrorhous
tttcaagtatatgagacgaatcatcaaccaacaaattctcagaaagacgtcaaactattctcgtcgttgtgtattgagagatgagcttgagtctattccactactatacatgcctcaacaagatgagttacgccgacatcatgaagaacaacgaattatgacaacaaataaatcaaccacattgaacctgcgtatgggttcattgtgaatccatagctttaaatatcattctgaagccttcatttcattcagcaaacaaagaatctctgagagtgacatgaacaattaattttaaaaaaaagaaaaagaagggatgaaagcgttgagcacggatgtatatcaacaaacatagagcagaacagaaatacaatgatgagaagacatatgaaaacaaagatgaaagaagagaaggcaaaatgacgctaagaaaaacagccacgatagaagatgatgtctgccaggatgccggctggcagaatgagccgagggtgaaagagagcaagtctaagaaacaagtctgacagaattggatcgagacaaaaatctctacgataatcctaacactctccctcgttgttgctgttgaaacgaagatgtaaagaaagaatgttgagaagagagaggaaagaacaaatgaaatgagggtatatccagggaggtcaatataaggtaaatcgaacttcagaaagaaaaagaagaatctcacaaaataagataagtcgaagcgaagttgaataaaacaagtcgaatcgatacgatttgaaacgaaattaatcgaagcgagatgaaaaaaccgagcagatcagttgatcgaagaggaaagaggaagaacaaaaatgaagggtagaaaggccgaaaggttggaa

SEQ ID NO: 2230 - DNA, 497 bp, Xanthophyllomyces dendrorhous
caccgagatcccatcggtcagaggatgcgcgatcgatacagagacgagcgcagaagtagaacttcaggctctcagattggaactggggtgaacagaggcacaagggaacagagttgatagatctcgatgatggattacactggtgtatggcgagtacacgaactgggaacaagagcagcacggaggaatgacaagtggatgaacaaagggtccaggcttcggaggctatgctatgggtggcaaaggaagcgtgtttcatatctggttcccagactacggaggtactgcatggaggtagtatgacaggcagatacacagacaaacgtatcgcacgaaaggatagaacgacagggttgcacgcaagcagagatcataggatgtggccctggcacattcggtgtacgtctacatagttagcagttgatgcatcacccaaggagtaggagctctggcattggatctatggtactcaggctacagacggctaacactcagct

SEQ ID NO: 2231 - DNA, 1267 bp, Xanthophyllomyces dendrorhous
catcggttaagtcgccagcggaaggaggccgccctccaaacccggcccgcagcaaacgctggtgaacgacgaccggccgattacaccggtgacgccggctccgaaggctatacttcaactctgtctccggtatattacaatccggggtcgctgacagcggccgcggataccgttgtctgtctagcgtgtcttcccgaccaatcgtttaccatctaccgtcttccatctggcgggacgaatggcaaaacgattgactgtcgtcatcaggctctcagacgtatgcttcactgcagcgcccgtcatgttcggtgaatctccttttagacctgtagcattcgttgtctgaacgagcgaagggcgacatatatagcaagtgagtctccttaggatacgcctgaaagcttcttgttcctcacaactcctctctctctctctctgtctattcccggttgtccattctctttcaatctacgctttcctttcctgttcccaaaagatgcgacgtgcattgagtccccttctcttgggctctgtcggccttgctgcctctctctccgagatctgcacgacgtcgaacgtccaggctgcccttccagccgatggcttcatcgagggtgtcaccttcaatgcgtcctctgttactgcagctctcgtctacaacgagacctacaccggcgagaacaactttccggatgccacgatctcctactgcaacgttacctttgcctacagccatgccggtctgggtgacaacgtccaggttcagtactggctgccgtccaacttctcgaaccgatttttgaccaccggtggaggcggatatgccatcaactctgtcagcaccagtctcccggaggccgtgttctacggcgctgtcggcggtgcgaccgacggtggctttggcgggttcgacagcgagtttgacgctgtcttccctctccggaacggaacggccaacttccctgcgctctattcgtttgtgagtggagagcgctcagagcagtgtcggatcgtgtcagacagaagagctgatggccattgctttgacctttttctttttcctttttttcttttttttctttttttacgatcttgtttgacctcttcttttaccctttcactggcctttccttcgatcttacctgccacaggcctatgagtccatccacgagatgagtgtgtttggcctcgagttcaccaagcagatctatgagatcgggaacgacaccaaggtctacacttactatcacgcctgctccgagggcgg

SEQ ID NO: 2232 - DNA, 1882 bp, Xanthophyllomyces dendrorhous
cgagaggggtggagtcaagtccagcggtacggcggccagtttgatggtgccgtcgttggcgctcccgccttccggttctccttccagcagttgaaccactttggagcgaactttgttcagcagacgcttgactactaccctccttcgtgcgagcttgacaagatcatcagcgagaccatcgctgcttgtgaccctctggacgggttcaccgacggtgtcgtcagccgatcggacctctgcaagctggacttcaacatgacatccctcatcggcaccgcttactcgtgcgaggagagcagcgcatcgtctgtccctctgagaaagaggcagatggtcacctcatcggccacgcctgcccagaacggatcgatcaccgcccagggtgtcgccgtcgtgcagaccatcatcgacggccttcatgacaccgatgggaacgccttctacttttcctatcagcccggcgcggacatctcgtttgatgctgcgaccgcctataactcgaccagcggcgagtgggggatctctgtttccggcgtcggtgccgagttctaccagcggttcctcaagctcgttgactctagcagtctggactcgatcgagggctacacgtacgacaccctgaaagcatggatgatcgagggttggtacaggtaccaggactcggttcacaccacgaaccctgacttgacagagttccaacaggccggcggcaagatcatccactaccatggcgaacaggacaactcgatcccgaccgcatcctccatccgatactgggactctgtccgacaggtcatgtatcccggtatgtcgttcaacgagtcgaccgctgccctcgccgagtggtaccagctgtaccttgtcccgggcgctgctcactgcgccccaaacacggccgagccgaacggtccgtggtgccagactgccctgggagtgatgatcgactgggtcgagagcgggatcgagccggtcactctgaacgcgacctacctggcgggcgactacatcggtcagaacgctcagatctgccaatggccgttgcgaccgatgtggtcgaacaacggaacgagcatggagtgcgagtatgaccagaggagcttggacgcctggttctacgactttaccgacagcttgaagcttcctttgtactagacaatgacgtttgctagcttttgtattgaaaaagagagaaggatcatgatataatgtggcacttttgttttgtacactcgtttgctggaatctagagtattcagtcaaacattctgtgtgaacatgcgtgtattttgtcggacaagtaatgaatcgaacagaagaaactgaagagattgtcatcaaaaagagacacatctctacaaacgtagagacggctgactgctggtctggacggcatcattattcagcccacgactgtaaccctaactcgccccgaggattcctcagttatctctccgtactacgatcgcgcattcatccctaacctcatctcgacacttaatggtggcaccactgaacgccttcaccgaccatgcttgacgaacctcttccgatgtcgcttccggcgatccttgtcaatcccaaacctgcagctgtctcttatcctcgtctggattccagagcgtctggatcccggtcgatcaaaccgcttacatccaccaagcgagctcaaggtcggagggctcggctgagaaaggagaacggtaagtgttgtgcttcaggtgctcagtgttgttcttttctagtctggcaggtactgatcgtgttgcctgttctgtttgtctgtggaaacatatcgatgttcagactctctggctggcaatccccatgccgtcgctcctagccggcacgatcttccacttgctcctcagaggcttccgccacc

SEQ ID NO: 2233 - DNA, 1721 bp, Xanthophyllomyces dendrorhous
atattcccttcgcctctgccaccatcccttcttcctcgaacccgcccagctccttcgcctgctcttccgtcatcggagccagggtcgacagaagccggctctttttcgatgtcgctcaaggggatcagaagaacactgcaacgaagaggagctagggctgaggacctctgcaagatcgtcgaggacgagctgacgagctggaagaaggaggttaggcgagaggtgatcgtattttccggtcgaccgcaccagtcaaacgaaggcgggaggatcgtcgatgcttttctggttcccacacccgctcgagacagcccgtcgactccatatcagagtgccagtgggcgggccggacctctgccgctggacatggtgagcagatcgttcgaccatgacggtttctgtccggccatcgtagagcttgcaagaagcgaaggaagcctgacgtgggcgatagcggaaggtttcgaaaggttcgtcttgcacatcgcctctgcatgggtctcattcggtagtacctttttgacgtcatgacgaccattctatagatacgtcgtacactgtgtcgctcgataccacggccttgtgactttctccaagacatcaccttatggcactcgactgacatacatcctcgtccggccatcccgtgttccggccagatcatcggaccgcacggtcacagccggcactttggatactcctccgacaactgacatgtctagtgttggtggaagcggtacagacaccgatcgagcgctcttcacggatgggcagagcgagagcgaggtcgagactggatggggagggtgggattcggagaatgagcgactcgaagaggttgagacaagagcagaggaagagaaggctcgattattagcgcggcctaccggacttgtttccacggttccgaaaaccctcgagctggtctccctggcgaatcatcacgacctggaagctgatgtcgaatcttcagacgatgagtcggcctcgtctacgactgatgcacttgcgtcctctctggtgtctctggactttgtttcgacaccttcctctccatcaaccttgagtcatgactcgtattccagctcgatgtcccgtgtcatccgaccatcatctttgtcattcttgtcttctgccatagcggaggacgaagaggaggatgctgatcagactcttacctcgagtccatctttcgaaacttccgcacacgtggattcaccgacgatcgatcgtacgaaagaggatgcttcaccaggccctgtggacgatgaagaaggaagaggacgacacttgaatggaaagagcacacgtagtttttggcagtacgtgtacggctgaacaagtgtcaacagttctgtcagacggcgtgcatcagcatcaatatcggcatcagcagcatcagcatcagcatgaacatcaatatcaatatcattatccagcattagtgaaacagtagattgtcatcaagctcattatggaatattccagaaggatatatgtctgtctgcttgtgaattcgagcttcttcttatgagatgttggctagcataaggacatgccatcttgtaggtatggcgtgtctgggtctaccttcatcatcgacattagggcaggtaatctaacatgagcggcggactcaactatgtatcgagcgtgaaactagaaagaacaaaaaaaagagcagagaaaatatatataagaggagtaaaaaatctgagaga

SEQ ID NO: 2234 - DNA, 48432 bp, Xanthophyllomyces dendrorhous
tttctcgagctctatagccagtcgagttgctttgaactcgtcggtgagctccctgttgggaaacaaatgaagaaaagagtggccagtgagcatcactcgatcgagttctcaagacatacatcgtcatgtcagcagacgacttcgaacgactgaaacacgctgcctcaccagaaatcatcaatctcgaactataccccaggtcatagagcaatcagtcagacagagcagtcttccatggttatgcaactcaacaagggactcacaggtctcgaaacaccgacctattgagagaagcaagatcacgtcatccagtcagtataccccacgtatatgacaagccataacaagcgatgacaagccatgagaacctgacggagacctactcgtagtaaaggagtcaaccatgagaacagaacccaagaaaagaagttgacatggttctgagggatctctttcccttctgcgaaccctgccggtcgaggtttgatcttgaaaccaagaaagctctgttgggcgacttcggaaatttcgcctctctcggctttgtccgaagttccctgggtcgcactcttgccaggcgacatgatcgatagaaaattgagcagacagagaagcaagcagacgtctatggatctgtttcagtgaagtcgggtctaactgacaaagctgaatcgaaagaccaccgggaatgatgagtgttggttgccacaacgaagaacaagaccgatcagatacgtagagtcgagtttggactgatatctgcggcccggtcgtaatctgattggatcttgctatcatgaccgcgtggacacttcattaaatcataccctcgcggacacttcatcaggagcgctaatttatcttgacctcgtctgatcttgtaccgcagctattagtctcgtgttcaacatctccatacgcgccagctagttcatcatatggtattctatgttcccttcagtccaagctcgccaaaatctctccttctatcgtccatcccccctcgggcacggtgaccacgccagctttggtcagtgtcctatcagtaccggtgggataaaagaacagtatgaagcgtatcagtctttgaacaagcaatgtgagatgtcgaacgagagtcaaacataggaaactgactcgagagtggtgaggatcatgtttttgtccatcccttcgagcttcgagaagtaagagaccgtctgaagccaagcctcgacatcggttctgagtcgttcaagatgtatacaagcgaaacggtcgtcagtcgttgcatcatccatctcgcacccgtcgcctgcagtgctgtccggtctctcgatcgagtagttggaaatgacaaacctgggatacccaaactccttctcgaccaagtcgccactgttcttcttccggctcgtctcagagtcaaactcgttcaccttagcctccagcctgtgcaagatctctcggacttgactcttggacgccgtagaggcaagcgtcggggcagatgcagcgatggcccatgagggccatggtgttggcaccgagccgatgaagcggacctcggacaggtatggcttggtggtaaaatgctcccacatctgaccatgccggacacacacaaatatatgcaagaaagacaaaagccaaggagtggagtatgtcgagatcagttgcagctactgctgagcagtaaaacacataagacaagtcctgcgcaaacatacaaagtaagcggtcgacccgtcgttgacggactggcggagtctctcgaaggacccgttcactgaaaggggtgttcccagccagcacagtgcatcagtcttaggtatgaacgaaagatgtacaaacatgcacaaacatgcagagacaagtagagacacttatcacatacccacaaagtccattgcttcaggtcgaccttcgttgtccgtccaaccctgctggtcggccatgacttgcgccatgacctagagagataacagtcacataccgcacattagcacgtgtgtcgctggcgtgaagatcaagtgatagctacgttacttacttgagaaccacttccaatccgagacactccacacttctgtcccctcaggtcggctatcgagtggaactgtgtgtccagcccggtgatcacagccctagaacattcggcagaaaagcacgggtaagagcatgatcaccgacaggcgtctagtccggaagcagagaagcatctaactgaccagttgagaggagagctgacgtagctgccgatcatcttgtaggccttggatccgttgacgatgcctgcgatcagactctccgtcaacgcgctacacacattcaaaccgagaggcagcatgtcacatgtcagagctgaggagatacaggcggatggttccatacagacagactgacattgaaatatcgatctcgttggctgtgagtcgagagatcatttctccagttccggctgggcacttgaccagggtgaacgtctgaccgccatcttccttagctagctcaagcagaggggtactgcaatggacatggcagggcgatgaaggggagaaaagaaggacaaatcagatgctgacggaggagacgttcgaacagtttgaataagacgagcaaagatcgcttttacctaaaatgctctgggacatatccgattcgaagaggattcatgatgcgagatgatagttcaggataatccgtgagcgttttcgttctcaagtatttgtcattggcaacgtcatctttcttacttctactctcgttctgcctcacactctatctcgcaatggaactcagccgaaatcgtcctcattctgttcaggagttggtcgagcatgcatcttcctcaatccatttctctccccgttattcactcaaagcctgggtcaggtcttgcgaggctctgaccaaccaggcgaaagcgtattaccatcaacagggtcagcttcaccttgagcgagggaaggaacgagagaggatagaagcaatggaacgagagtttgtctgcatagtcagatgttgcaggtaaaaccttggatgtctacgctggcatgtcatctggctgttggtttaatcgagacattgttgcttcggttttctgtatatctgcatacaaatctctaggatcttgatggaccttcttccatgccatccacagtacaaggatctgtcagccgaagacaaggctggatttttgaaagtgagcacaccctgtcgggcataatcgttttccagtgtctggccagatgcgctctgtattgatagtctcatctctcatcagcgaggccacacagcccttcagtccctctcgcagctgaagcctctggtcgcaaagcaatatgactcctggcggtcccgaaatttggaacatgactttgttcgtgagagagcacagataaaggagaagaggagaagagagctagagagcgatcatcggaggcatatgcaactgaacggagctgaagatggaagaaggtcgctagagggtgaagctagtcggccggcctcgagaactgtaggtaatgattctacaaacaaatcctgggccgcccattctcctccatcggcagcagcctacccatcatactctactccttcgtcctcaacatcgttatcaacattcacgaatccatctccagctatcaaccgctcacaacatgcaatcacctacccgagtttgcctagcgcatatcgtcgaaagtttctttcacaatcccgcccatcatcttcgccttctccgagtcctcaatctacatctgatgtcgatctcgttggcggattgcggacgattaatcttccgcctagtataatatacaggttcttaacggtcgccgaaaggaataccaggcgagaaaaggagacttgtggcttccttttagggtcgcttgataatggaacgtttagtaagtatgcatttgatggctgctacctgtgagatttgcggactaatctgctataaacgattaaagcggttcgagtactccttatccctgttcaaaaaggcacgagtaacacctgcgagtatgttgttcactttgtttgtctaattctttcgaagacctttattcatctgcgcatcatcatggtccatcatacacaatgacaggactctggaagaagagaaagtctttgaatttcaagatgccagaggcttacttaccctgggatgggtaaatagaacgtctcttcatcacaaaaagaaacattcacaatattgacacctttaccttgtcgatatttatctttctgtcgcgttgcagatacatactcatccgacgcagacatgcttcatgtcatctctagatgtgagtaattctggactctttttcttcctgacggaaaaaagttgtaactgacgacgatcatccttcattatagcttcacacgcatgcatcgtatcagatgatgtttccagaatctatagcgatcgtatgcgctccgaggagcaacccagagtgagcacttaagtttcgacgctatacctcccaatatctgatttctgactttgagatggcttggtgttctgcttgtgattagtgttgggattttcagacttacagaccctccaggacttcaagtgattggtaattgtacgcgaaaggagacttttcatcctcacccagatcctgaaggaggtatttacactgtaagccgattgatacttcatattccgttgacttgaggatgtgtctaacgagccttttcttgatttcttcctctttcaccgccatagggcggtttcggaattcgagataaaggttttggacatgtgcgcatgagggagggtcaagggatagaactggtcgatcttcgatgaactacatagatgattcatgtcgaatatataagattgtgtttcagtcagagcttgaaaagtttgatacgatcgagcggtcgaagcaatttgaaaagtctctgagagttggcgggccatacacgcgtaacttgtgcgacccgagcgtttcgtttcgaacatccttcccaacatacaaccacctcagctctcacttcacccgccaccttcatttagtacacctggtccttcaacttttactgcaatcgaaattatgtctgcgccagctctttcaaagcaagagtccactcttattttgtacggccgtttgactttctcatccgtcttttcttgtgattatcccacatctccttatattcatctgtttctgttgtttttttttcctttctttacacctgtagcaatcatctgcgaagtcagaaagccaacaaggttcgttgctatctttatctttcctttcggtcgagcagacaacatgctgagcatgcggaccgtcaaacatgatcatcaattcgtaatccattcaacgacatgtaggtatgcttcgattgcaaagccaaaaacccaacgtggtctagtgtcaccttcggggtctacctttgcttggattgctctagcgtccaccgaaacatgggagttcatatcacatttgtcaggtgtgtcgcttcaattttcctcgattcgaacctttgagcacagaatatcgtttcgctctacgggaagatgtgagccattatcgattgacctgaacgtcaatcggctagacagatctcactctacgctttttaagcttaattgagaagaaagagtatcgctagctccttccgaccttagactaagcacaccttgacgttttgttatttgtttcaatacagatcgacgaatcttgattcatggaacgtcaaccagctgcgtggtatgaaagtagggggaaacggtgcggctaccgagttcttcacaaagaacgggggttcaaacattttatccttacaagacggcaagcaaaagtacaccagccgggttgctcaggcgtataaagatgaacttgatcgcaagaaggccgaggatgctaggaggtgagtctcatctctgtcgcaatcttgtacgaagcgaaactctttcgatgtactgaactttttatacttggatgaattatgtctttagatatcccaattctatccacatcgatggtctggtcgatacctctgtcgccacttcgtcttcagccgccaatgctgacgactttttctccagcttcgattctgctcccgtcaaaccccccgtcacttcggctcggccagctggtcccactcctatcgctgcacctgtagtcgtccggtctacatctactcccactgctccacgaacgacttcttctgcttctctaagaaccagttctgctgtccccggccggactgcatcagcctcctcgactactggctcggctccgcgagctatgaaattggggggttcgaagctaggtgccaagaaggcagccgcgcccatcaacttcgaagaggctgagcgaaaggctaaagaggaagaggccaggattgctcagcttggatatgatcgaaagaaggaggaagaagaggagaagaagcgaaaggaggccgaagctagaaaagagatgggttcaacttcgttgggaggagcgcgatcggtcggcagcgggcgagggacatccggacctagttcggctcctcctgtacccaagcttgggtttgggcaaacttttgcagctcctgtggctaaagctccggctcgaagtgtagaatctcaggcggatgagcgaacgtacgctcgagataaattctcttctcaaaagggtgtgtaattgaatttgtagtcgttctcattcaaaatttgagctgatcatatcaattttctggatatcgtcatatctctgaatgctcagctatctcttccgatcaatactttggtagaggatcatatgatgcagctgcgacttcccaagcacagactcggttacagcaattctctggagccagcgctatctcgtccaaccaatactttggacgagatgaggaggaagagcacatgcctggtagcctggacgacggagaagggttggagtctgttgagagagccgcgagggagattgttggtaaggtgatggcgaatgagaatgttcagaactttgcagaatccattagatccggagcactcaaagtaagttcaactattttcgaatgagaaaatgacatccagtttcatctctctctcagtgagctctatatctcatgtgtatgatctttttttaacggttttcctgctcaaacagttgtcggattatttggcggacatgtccgttgagcgatagatagacactcaaggccttatggtttttcagccatcaacagtatctttcttccttcatatcgtttctcttctatctcttctgtgtggagatcgcccgtgttgtcgagattgtattccctggtctagaccaatcggcaaggtacttcatgtcttgtcgaaaacaccatcgttttggatctcacagtgtcataatcatcctttatctgaaaatatatgcgcgttcttctctacaattttgtgttcaagcatcttcgattccttctggtgtttatgctcctcgctccgcattgccgtcaaacaatgtgatctcaaagatggtctgtctcctctgccaactcttctagcgatcttctcagagcaccgtcttcccaccttgcccaaacaaatccagtcaccaaagccacgcagccaccaaacccggcgatgccggcaaaaaaggcaaaaataggcgagtaatatgagtgattgggaaggaaagcggtcgatattgtgaaagctaccagtaggacgagtgctctgtaaatacgttggagcgtatcggtaagatagccaatttggaatatgaatcaatattacgacttttctgacaggcgagaataatacacgagtaaagataacagagaaacgacgaacacaggtactccgatcaacaagtgcctaccatgaggaacgtggacctctctgtgatgctcgaccacgcgtctcaattcattgagcatctgtctctttttttccccggagaacatggagagtggagtattcgaggaggtcgaacggtctgataaggtgggggatgatatttcaccattgtatcgattgttgtttgtcaattcggtcgttgtagctgatgttgcaggcatagaagaagacaaggaaaatgaagctcgaacggcgaaatggtctgaatatgaataatcttttcctggcacatggctggtcacaactacttctgatgatgtgcactgaagcgaaggattgattcggtccgtcaaaggccaacgtggaggaggtgaaggatctcgaaagaaaatgtagtcgagacgtttgccaaaagtcctttgaacttcaatcggtatatttttcgtcaaggtccaactattcagaggagctttaaaacaaaagaaagaagaaccaagacggacagaacgaaccacagaagaacacaaagacatgtcagcgtaggcaggggttaaagaactcagactttacgtgctcacaatcaacggtgatgcctgcctcgcttagagcctccatcgcactcgagcacggtctatcgactctgtccgcagtctcaacatctcgattgttgcgagctcgagaacatatccaagcgtctttcactaaaccatggtctctcagtacggcatatggaagctcattggattgaaagttgaaatctccacactggtcatcaggcagggagtatttggtaaggatacactgtacttctgtcaggtgaaggaagcaacaataccgaggcagaatgaactaaccgcaatgacgtatcttccctgagatgatgctcttctaatctcgttcgaaagctgccaggcctgcagggatcgataagagttacctatatgataaccctcgggtcctccagcgtgcatctgaatcgtagattagaaaccggaaccgatgacttgttagcaccgatatgtttggaacgtcaatgaattgcataaatagatcagtcaggtactgacatgggttgtgaaaacttcaacctgcccgagctctggatgctcgatgaccacgcttccagcggctttgttgacgaagaaatcggaaaagccaagaggtcggccggataggtgatagggtatagtttttgtcgagagtatcggatgtttggagaagatacagagacccgatcctagtgctccgcttgattcagtacattcatgagtatgtgcatttggtggcagaagacgacatgcagtcagaccaaataaaacagtgaagtacatccgtccagaaagacaagaagtactgaaacaacaggacatacgttataaagaatttactatggggatagttttgcttgatgcgggtatatatacgaagaaaatcctctctaacccacacctcttgaagacaaatcagatcatactggcgggaagcgagcagttcaattgctatggcctgaatgacacaggacatcaggatcaacttgatcaagagaacacaaagagcgacagcaagagcatgataacgacatacattgacccgttctatccgatactttgaaattggtcgaagtcccctgtagggccagatacaagcaatggttagttgaggaaggacttgtttcaatgagtccaacggaagatgtttcctgaccagcagttcaacgtcagaatctctagcatactttggttttagttgccggtcctactttggctataaggcgacaacgggatattaagatctatcgttggtgttgactgatgttgcgatgcacttacgtcagtcccggttagggttacacattagggttattttcaattcagactccgtccgcccctgctccctccgtgcctgtttcctctgccttcttcaccgttcctgttccttcgtgtgtttcctagtcttttttttttccttcttctttccctcatcaatagatctccatcttcttctttcgtttcttttcgctcttccccttcaaccattgcttcaaagaaacacaaacacatatccgctatgactactgttaaccgtacgctagtttcttcatatctatcccttatcgtttctaacctgaaattctttcctcttctcttgcttttgatatcacgttcgttgcccgcgcacggttacgtttgacctggcttttcgaccattcttttttgtttatccttctgtccttttcgtctggttcaatcctcatggtgacttgtttgttctaccagacaaagtttgcttgatgttagtacagcatatgtgatgtgttgattattcgagcaaaaaaactgatttcgtgttttcgccccaataactcgcagcgttcacgacggttggggtatcgctcctgcgaagggtgacaagggaaacgctatcgagcacgccgatactaccgccatggactccatcgctcaggagcacaactacaccaccatcaaggcccatggtcttgccgtcggacttagtgacggactcatgggtaactccgaagttgggtgagtgtctacaaatcgcgccaattatttctatctctatactttattcttctttccttacgtgtactgtcgtttcgctgactctaatgttcttatctacctgttgactgcgttcaactcgtacagtcatcttaactgtggagctggtcgagtcgtctggcaggatatcgtccgaatcgatcagtgtatgtacatattcttctgatatcaatcacgtcctcttcgactcattcctatctcggtctatgcccggtttgtatcgaacgataaatcagctatcaagaccaaggagttccaccaaacctccaacatccttgaatccttcaaccacgctaagaagaccaatggccgacttcatcttctcggacttgtgcgttgacatgccatcatccagttctctgtgcatgagctctagctgaagagatttgttttgtccgactttccaccgcttcttgcaggtttccgacggaggagttcactcccatattcaccacctcaaggctctccttgagactgccaagcaggtcggagttcccaaggtctacattcacttcttcggtgacggacgagataccgctcccagatctgctgctggttacatgaaggatctccaggccttcatcgccgagaacggagttggagaggttgccactgttgtgggcaggtactacgctatggaccgagacaagcgatgggagcgggtcaagatcgctgttgacggattggttggaggtgagggagaggctagtgaggatgctgtcaagacgattgaagagaagtatactcaggatgagactgacgagttcctgaagcccattattttgggtggccaggagtccaggatcaagggttagtttttgaaatccgttctgtaacctctgaggcgatcagaatcagcttacgaacaacttcttcgcacctctatgggattctctagataacgataccctattcttcttcaactaccgatccgaccgagtgcgagagatcacttctgtctttggtatcgaccctaagcctatggaggtcaccgttcctactaacttggtgagcgacttttctgaagagctctttatagatctttctaagctcaattgtggttctttacttctagcacatcaccaccatgtctcgatacaactctgagttccctttcaacgttgctttccctccttcgtcgatggagaacgttttggccgagtggcttgccaaaaaaggtctcaagcagtgccacattgctggtacgtttcagtttctacaagtcctcgattcaacttctgcgctcaaatagtgtattgatcaaatatttttcacgacaacctatccagagactgagaagtaagtcttctttttggtatcgtttagtttaggaacactgaactggctgaaccaacttttctttctttgacgtccttttcagatacgctcacatcaccttcttcttcaagtgcgtgtttcaacaaacctctctggtatcgacaccacgttttgttctgctgaggatttaatttttatattgatttgtcttccttcctcagcggtggagtcgagaagcagttcgagaatgaggttaggcatatgatcccctcccccaaggtccccacttacgacaagcagcccgagatgagtgtccaggctgtcgccgacaaggttgctgaggttgttaagtccgatgagtttgagttcatcatgtgcagtaagtgtttagagttcattcaaaactcgcaccgagctcctagttgttgatcacaacatctcctcagactttgctcctcctgatatggttggacacaccggcaacttggaggccgccattcaggctatttccgccactgataaggccgtcaagaccgtttatgaggcctgtcaggctgccggttacgtgctcttggtcactgtacgtaatcttgtatgaaaccacacgcccgagtacaacaggagcgcttactcgaacgttctgtatcacctggccatcacagtccgaccacggaaacgccgagcagatgatcaaccccgagaccggaaacccccacaccgcgttcgttctatcatcatgttggctatgtcaagcacatccacgtacaatcgagccatttgctaaccgtttgacgtttatttccatacctattctgtagtcatactactgttcgtcaacttttaattttcaaccttcgattttacctcacatttgttgatcacttgcctattcgtagaaccctgttcctttcatcatgaccggcaaagattccaagggtcttggcttcatcaaggacgagaagaacgagggatgcttggctgatgttgctcccacgattctcgacatcatggtatgctccatccaaagctcatgatcgagactcatgaacagcacatgatgttaattgaaatgtttttttgttgtctgcccttttcttcaatagggtctcgaccagccggccggtatgtttgattccaacagcctgtcaccttatttgaagcattatctgacatgttttcgaaactctctccctcttctatctattttcattgaccaacatagagatgagcggaaagtcccttttagataagtctgctaacaagaagcagcgaaccgaataagcgtctattgctccagttctctcagaaccctggtttcctcaacaaataggaagccggtcaaacagccgtcggattcaatcttatctagttttacgtatcgtccagtcttagtcctcttctcaatagatttcagcagctctttttgcccatatcaccaacattaagggatactatatacaacaaaaatgatcaatgaggtgttttggtgtataagctcgttgagagttgaccgttttacagagtcacattcgttgagaattgttaaacctcgcaatctgagtgtgagattcggtatactgagtccatccgcccttgcgtgtttacagtaggtatgctgccacaagatcatagactttatactcagatgatatatattctatacacaagcaagtgaaatacagcctggaggagtgatatgatgccgccaagagctcaagaggttcgtagaagatagtgtccatatgcgatctgaaggtcaatccttggtcttcaggtttgtgatatccgtatcaaccatggcttcgagcgtcatcgatctagcgcgattttgtgcagaacgtccaccatcgtctccctcgtcaaggttgtctctggtcaggagtaccttcgagatatgatctttcctgttggctttgcagattcagagtgttatgctaaggagctagccgcattcgtcaactctcctatcttccaactcctcacagtgagcttcaatcaactgatatatgatcaaaacatgcaggtcgttgaccgagctgtccaggtggagatccatcatctagattcatttcttacgggtactccgaatgacccctggcaaaagctaccaagcgaatggcgggcttggtttgaagatgattgtgaggatatagagaggctggaaatgaggctgcgagacgttcgaatgaagggtacttcaaactgtaagctgagtaaatcgttgttctgtgtagaaagccaaatttgactatctatatatctttattgaaatgagcaagtgctcaacagaccaaagacactcgatgatttcttggccagactccgcggtctggcccttcctaggctgcgaagagagtcacgatccacgttctctcaaccccatatcgctgaactttctccggatctgttgagaggaatgtcaatcaagaagcaagttgaggttattgagtttgcagggattgtacagagtctcgcaaaccgagtcggtgcagaaaatgctatcgtgagtatcacccgtccattcgcacaaccagacattcctttctagagctgatcaggtcgaggtgtattctacaggatattggggcaggctttggtgtgagtctttcaagcccgttgaaaatcagcattcgatcatctagtgatatccaatactcgtcatcttgtgaggaagtatcttagccgaacacttgctcatcccgacacgtcaaagcctcttcaagtcctcgccgtcgatgggtcacgatctcagatcgaaggatctatcgcgctatctggttcatcggcatcaacgactctagagccctcaataacatacctactgcaacacgtctcctctgcttcttctgggcgagttgaagttgagtgctggctgaagaagaaaggtccagcagtgatagtcggactgcactgttgcggcagtctgacagatgaccttttgggtatgttcttgcagacagaaacgattagaggagttgctgtggctggttgtacgttcaagtcttctcgagtgcaatctttggtctattcttgtactcaatattcgggcttgacgcactaggctgtttcaatcatcttcggacctccgctacacccgccgagtcatgtatcgggcaggacagtgtcgatgttgaaccgagcgcgtcgacttttccctcaagtagtctactgaagtcgtacagcttacgtttgagctcgacagcaaaaatggctgcttgtcagaatgtggggggttggacagatagtaccggaagagaactgagtgaaaaagagagaaagaaggaagagcagaatcaacttctcagcaggaaaaggtctgtctcctggtcaagtttcaattagtttatgcaaccttcgagctttgtagcaacgtctttcgtgctgattcaaattcatatctcacttggacggctggcttagaaaacattaccgacgcttgtttacacgattactcctttcctcgcaccttttacaagagtctcgccctcaactggaaacacttcgactaggctccattcctagaaacaaactgtcatccttcacgccgtatgcatcttatgttctctctaagctcgacttgttgacggaagagaacaatggttcattgatggaggaggcaaaattgatcgaagagacatactctgggtggaggtgggacgcgagaggcaggactatagaggcccttggcaaggctatcggagaggttgtcgaatcgttcgttgcatcttccatttttcttttcatatgatcaacgattcgaagatattgatttagactgttacatgcgtattctatatccagtactatagcgattgataggtatctcactttaaagacgcaccatgcagtagatccagaaactgtggacattttccagacctgggcttatgaggattctcctcgaaacttgatcctggttgcgcaaaagaggcctttatgaacctcaatatatcatgtagatttaagaaacaatatatcggcttaaaacgatatctgaaaaagaaagtctggttcagagaggctaggtatcaaaaagaaaatagcaagctggcgctactcagtaatgtgggcagattatacccatgacccgtgagattttggatgtttgtggtttgaggtctcagatcacccaggcccaagaggaccacgtatggagcatcattgattaggattgctctcaggcatccaaagccacaatgagtgttcacgtattttaaagcgtttacccagaatagcctgttcccttcttctctaccacagtcaatgaaaatcgataaacaaccaatgtattagttgctaagttacgattaactctctttctaagtcaaacaaatgttaggagaaagtctctcttcaagcccaggctcatcttcgtcgcagtatcctgccggcccagtatctcagaaaaagagagtattgatcggctcagcttgtgacgcgtatgttttggtctaatcttctcctttctgcacaaagcttattctaatcagattactttcggactcctctcatccctcaaggtgtcgaagatgtaagacccgttgtgacaaaacaaagccaacctgcataagatgcgttgagattggcagggtgtgtaagtacagtgtcgatggccggaggtgcgctttgattgttctttcctggatcgtatagtcttgaccggttaagcttgggacgtctgagactcacttcgattacctttataatcttctcccgaatacatccttcaagtcttcgtggcgcagagaacgcccctactgtactccaggccaggattgtggatctagaggctcggcttgatgctgcgttgagtgtgcggacaaatcgattagatactctttccgctcattcaagcaatgccccatcccagacaagatgggttccgggaggatcactttctctttcatcttacggagctcttcgttaccatgacccaacctcatccttcttccggacgcaccaccccaatagaagcaaaaaatgtcgaatgctcccatcatcaccttctggcaatttgactcctccctcgatcgaagtcaattatctccccattcagttagatcatcagcttcatcgtcatatcatcgacctggccttcagtcgcattctaggctatggatcctttgctcgggaagtcgattttaaaacggatcttggcgcgtctccactcttaaggacgagtaattataccccttttgtacatcttgccgtcctagctattggatgtcggtacttgtcacccgacaaacatcatcttgtctgtccgccaggagtcgactatgaacagagaggacaaatttttgcggaggctgctcaagagatgctacgacgtgacggcgcggaacctgatctggcgtttatcagaggcgtcacagttcttttgaaatacatggtaggaatgggccaagagtaagctacccgcatgcgatcttgagaagagatcatttttcggtatgagaactcactcagttttttccctccactgtcaagtaatttggctgtgatgtatcagggaattgcaacaactgtcgctctagattgtgagtcattctcttgcatcttgtcatcaccgagagttacataaactgagttaaccaatttccactcaaaagtccgactacatcttgcctttgaccctagccataaagatccaaatttgccaaataattggcgaacaatttgcgatgaccgcatcaagttgtttgccaccctcagttgtgtagacgtgatgtggagcgcctacctcggcagagaatctgatttccctcgaatgcatgtcactcaagcgaacttgccaatccctttagacccgcagtctttacctcttgttgatctcgcgctggcctatcattctcgtctggctgttatctcttctctcgcgattgaggagatctacaccgacccaatcttggacatagattcacacattaaggcgtgtttacgctatctggaggagctggactactggttagttaattacaatatacttctgagtttctccacatgctgattagttcaagatctttgatgaggtaggtttcagtctctaccatcatcgttacgccttgactctgatatcagcgttaccatgactgaatctcagtgagtgcattgattattcagggtatcgattagcgagactaaagttcgtcctttttcggctagtgtttgtactctgatcatgtttcattacgcagttcgcattcttctttgtcaacccttcattggtactcttcaagagcatcgatatctagaaactctttgcaaggcgtgtgaggacgccacctggcaaatcgtccgcatcgtgagtatctccccttttttggatttttcttttagttcttttgaggtgcaaaactcacgagcgagttctcattctacgatcacagattcgcctcatcctagcttcgtcaggtccctcgagtggtccgttgaacaaccaagatattgctttcatagccggtggtgtcttagttctgttagcttccggtcactttccgcatacctcctccaattcaactacaacgcaaccaaaatcatctgacgagtccgtcccacagatgacagagatatgtcgacggaacttagcagtagaagctctcaaggacatctgttcatttctacgtaattttggactccaggtgtggccgaatcccttacaatctactcaaacattggaaacgctactagctgagtttgcactgtaattcttgtaaaacgaccttgtaaaacactcatgactcaaaaacctaagccatatagctagcctgtatagtatgctgtaaaccatcccatactctttcgagagcttgagctcttggacatatcccaatagccagccaactaaacaaacaaaagctgattttgtatcaatcactactcctgtacttatatccacctctatctacaacatccggatgaataaagctagcgaatccgactcaaggaaaaaaaaaattagcaagccaaacatctgggtatgtgctgaacttagcatatacatatcagagattgagaacagccgcaagaccatcgatcgattcgactcgactactttgatgtttacattacatgcctggcatggagcgcttagatgaatactgctgagatcagctgcaattggcccggttgaacacttcttctccatctcttcgtttgtctgttgttttgtctgatgatcaccttggctgctcatgactgtcgctatgtctctttgtctctttgtctctttatatgttcatgtctttgtctgtggacggtagagcgttcaccaggtcgttcatcatgaccgacagccagtcgaactgatcaaagggaaaaccggtcaaaggggatttcctgcaaacaagcagacatcaatcccaacagcttataagacacaacggactcgagatgatcagagcgctctttcgtatcagaacatctcttcatatcagaacacttctccataccagaacactcactagctgctttgaggagtgccgctcctcttgtgttcgacatgaagcgcaagaggacggctcaggcctcggcaaagtcttctctcgcagctaacactactactaccactactactgccacgtgctcagcctgcggtcaggttgggcactcaaggcgatctaaccacctctgcccgttttacatccctcgtcagggagtagagatccgcgccaagtcagcggtccctatggtgtcacggacagtgaagataggctttggtcctttacccgcctttgggccactggctggcccgatcgagtcggccgttgcccggctaggaaagataacattcgacgcatcgcgactactgaatatccacatgtcgaaagtctgcgcggatggaggggagataccgaatcttccctccatgatgcggctctactttcaggctgttggtttcaacacgcgtggaggaaatctgcaccaaggagcgccaacactgaacgaagggatcaacgacctccgcgacgcctctttccctgctgagcaccagttcacagactccaagtgagtgatctctttggcgatgacagtaatgcagctggctgtgaacagggactgactgatttgctgttgtcatagatacatgggcaaaatgatcagcgccaaagctcagtcgtggaccacggcctgccagaaccatgtcgtcctgaacatgccgcgccgggcttctcggctcatctcttggtggctggagacacacgtcggagaagcgatccagagccggatcagtatcagccaggtaaggaagacgggtcatctgaggaggtatctgaagaaaggctgcagcaacgactgacctatctgacatatctgatccatctgttcgtcctcagcgcactgccctctcccatcagctctgggagcaactgtcccctccctctcctcgaggaggagaagagggagaagaaagacaagagggtgaagaggatagagaggaggagccaccacaagctgccacatccctggtggccccgccctggctactcaaactcctccttcctgaccagcgcacggtgatggaggctcatctccgaggcttgttcgacttcctcacagatcacatcttcggaggtctgcctctgacgggtgaggccatcaagaactcgtggaggtcctatctgcgccctctgtaccggatactgaccatcttcgaggaacatggcccccaagatgcggctgcaagacggaccactcgtcgccgggggcatggtctgcgcctgttctcgcttctaccgctctcgtcccaccggtcatcctacgtctttgtagacaccatggctctctacgacctttggtcccagctcaagttggaggacgcggatatgggatatatgcgcggggtgactgaggagtccttccgggctgactctgacacttggtggaaacggtcgttccatatatccaaagtcaagaccagaacgcgacagttcgccatgtcgctcagtacagacggcatcggcgtgtctgccggaaggctgagacccatatcgtcttcatctggcatcgacgactacgggtggagatgggagggcgaaggcaaggaccgtcaccgagcagagtatgttccgtggggtgtgcggccagaggacgaggtcgtggggctcgacccaggccgtcggacgctgctctcgacgaccgccggagggctcgacatgtctctggacaacggcggtctggctgagcggggcacgcagtggtcgctctctctcaagtcatggaggcaccttgcagggatggaccgagacgctcggaaacagcagctgtggatgaagaaccatgcggaagtgccaaacactctccgtggtgagtgtctctcacgcttatactcacactcacactcacactcacactcacgttcaagctaactgtgcaaacagcattactgaccttgcaaactgccttgcccacctcggtgtcttgctttggcttctttcctcggtgtcttgctttggcttctttcctcggtgtctttctccagatcttccttcgttcagatctgccagtcttgacggcctccgcgctgctctcgtctcgcactctcagtcctactcctggctcgcgaccttcttcgctgctcgacgctggagacgtcttcgctggggcgcacacatcagccgcgatcaagcgtaccacaaggtggcgctccgtctgtcggcaggacgtccacgcacctttctggccttcggcgatggtgccttctcgtcatcttctcgtgggcatgcttctggtcctgtgaagacgatgtatgccaagctgagggcctctccgttgctctatgttcgcaaagtgcgggagtatcggacgtcgagggtgtgctcgaagtgccatggcgagttctcaggaaggaataaagtgtgggcgatcaaagagtgtcgaagcgtctgtcgagtaagtgctgtgtgtctattacatatcttatgatgatgtctcgatgactgatcgttctctgtgcttgctcattgttttctctgctttctcttctctctctcagacctggtggaacagagatgtcaatgcgtcgcgcaacatgctgcacctagcccttcatcaggaagagaacgaaggggcaagaatgctggtgtttgatactgctgctgctagtggggctgaggctgaggctgaggctgaggctggcagagactaaacccatgacccatggggacttgatggtatgtgatctgagggcacaccccagtccaaaagggccatgtattgaccaccattgatcgagatcaacctcaccaagcgtaaggcttataacatatacatgttgtagggtctgccatgtcttcatgatatttgttcagaatatataagccgagtggctgtaagtgttcggtcgaggctgctgctcacaccaaacataacacttttcggataatacgcccgatgatttgcaaattctgaaattccatcttttcgacttggatttttcccaatctttcatacttcttccttccatcaacacaccatcatccacccatccatcaatcactgtccaataatgtttgcttcttcatccagacgagctctcctttctgcttctagaatctctactcccgccgctaggtctgccgttcaccaatttcgcccacaagttctctcccgaatggatcttagccgcggtaagagtggttatctgcacccatgcttatgatatttactgtattgaaccttactcatgataattctcatcaattctggtcgccttagcttatgccactgctctaaagaaaattcaggttgccaatcccgtccgtagaaatcttcatctgacaagttgtcttctgcgacctaagcctgatcatgcttgtcttcgctcgactaaacgtaggttgtcgagctggacggagatgagatgactcgaattatttggaagaagatccgagaggaggtaaacagctctttcctctcatcagacacccaaacaggcaagcgaggtcaaggtctaactttggaccttcccatcgctagctcatccttccttacttggagctcgacattaagtactataacttggggtaagcctaattacagggtttcaagttgaagttgattttattcaaacttatgcgtaaattgttttaatgcgcccgctctagaatggagaaccgagatgctactgatgaccaagtgaccattgactcggctgaggctatcaagaaggtaagcatcccgttttgtctggtccggccatcaatcaagcacatccatctgataatcatactctttacatttgcgtccagtacaacgttggaatcaaggtcagcgacgaaatcgattcagtagagccagagtgcaagtcaatgatactcaacattaccgatttgttattttattagtgcgctaccatcactcccgacgaagcccgtgtcgaaggtaaatcaaattatcttgaacatctgaatcatcatttcgcggctgacttgattcttgcgaaatacttgggtcggtttagaattcaagctgaagcagatgtggcgatctcccaacggaactgtgcgtatccttttttgaaaccagaacctttctacaacctgcttctcgtcagttcagtcgttcatctctatctatggctgtataaatatgttctgttagattcgaaacatccttgacggaactgttttccgagagccgatcatcattccctctattcctaagcctgtgcccggttggacgaagcctattgtcatcggtcgacacgcctttggagatcagtacagatcgactgactatgtggccaagggtcccgggaagctagagatggtttacacgcctgaggcaggaggagagaaggtcgtcatggaagtctacaacttcaaggggccaggagttgctcgtacgtttagttcttatcaacttgactgcgtttgttcataatacagaatacggtagtctgacaccaatatgcgtgctgtgtcacctccgcacagtggccatgtacaacactgatgaatcaatcatcggatttgcccactcatctttcaagatggccttgtccaagaaaatgcctctggtgagtgtccttgttacttgtaatgctgtctttatttcatgtactgtttttgcgctaaacacctgtctatcatgctgctcaatatatagtacttgagcacgaagaagtaaggaccctatctctcaagattcaacacactgaaataacggctaaacgacgtttcatttcattcagcacaattctcaagaagtacgacggaaggtttaaggacatcttccagggtatctacgagaagtatgtgctccacattctgaatactaactttgaggttatagctgaatctcaatcaaacttcgtcattctcagaacttatcagaaggactttgaggctgctggtctctggtatgagcatcgattgattggtgagtgtcttgcatgtatcactctaaaataaaaatgatttctgaccatttgtctgcttcgtgttggccaaacttccagacgatatggttgctcaggccatcaagggagacggaggtttcgtttgggcctgcaaaaattacgagtcagtcccggacgacgctgtgtctcaaaggtgataatggactcaatttgtctgtatttgtcttttcagcggagatgtgcaaagcgatatcttgggtcaaggtttcggatccttgggaatgatgacttcagagttggtcactcctgatggtttggtcatggaggctgaggctgcacacggtttgtttagaagttaaccttcccgcggttgacacagtctcaactaaaaatttcgatgtctgtcgggttttctggaaaaaatcataacaacataaaaacaggaacggtcacccggcactaccgagagcatcagaagggaaaggagacctcaaccaacccggtcgcctccatctttgcttggacccgaggtctcgctttccgagcaaagcttgacaagaatgagaaccttgcagcgttctgcaagagtttggaggaggcctgtgtagagagtatccagcaagacggaatcatgaccaaggacttggccttggccattcatggaaagaagtatgcacactcgctcgttcatggcttagctactcaatattcactgttcttcggaaccttgtttgtcttgttctaggatgactcgagagaactgggttaccaccactgtttacctcgaccatgtgaacgtgagtgtgttttcttgtgacaggctgtgcctggacgcgttgtgttctgactctacggccctttcctctacacctcctcatttgctgtgtccttatcaggatctcctccagaagaaactttcgactcgactcaattagatagctcaaaaaatttgagacacctgtcccccagtcttgggcggttcaggagtcatcatcctagccatgactgatgtaactaatagacttatccgattgtaaatggcattttcttcgtggtgatggtcccttcctagagctatgggtttgccgcggcagccaggcacgtcgcgttcaagaccaacaaacaagaaacgcaacgtggcccaaatatacatttccccctcattttaaaaggaaaaaaaataatcgcgtcttctggatacggtcacatcagtttgtttcttccaagtttcaatacatctaacgcgtcgctgaccagctcagaaatggatcgacactagttgcgcaggagcgcggtcaaatgaaagagcttactgtcatttgctcatgtattccttgtctacaccatagcgcaacctacatcatcaacttcgactcgactgtctatcacaacccgttcgcactaacttgacttccagttaccgttcctctccccttttacccctcactcttctcctatccccatgaaccaaaagggtcctacccgcgagtctcttcagatgctgaagagagtctctcttcaaaaattgtgcaaagttcgtgttctctttcaacctccatgttattagttcgtatgttcatcagatagaattctcgtcccgattcattttcagagtttgttcattaaaggagccaacaagaagtctgttgaaattattgaggtcattcttgctcactacgctcagaaggacattgaggtcgaagaggcaaaacaaatcgcaccagtcataccatcagagcgagcagaaagagttataccagccagtcgtattgaggctaccaaacgagctgcaacgatcgaagcgacaagagaaccaagaacgatcgtaaggggtgaaggagctggacaagccatagagacagatgttagagaaacgaatatcacaaggtcaatgctgctcttcgaatccgatcttgagttctttaactgatgttttccttgcttcaataaattttctatctcaggcatgaatcgagtgggatggagaatcctcgctatgaggatctacctatgttgtctgtagttgatgaagacaaggagaggttggatctgttgcagacccatttcgacgttagattagcggctcatcgaagagatctcgaggagagagacgctactcagtggggccagattgagaagaggacggcccctcgaaagtcaatcgtttgtcctcagaagaagcctatttttgaaatctatagggatccttcaactcctgaacaaaattttctcgctggaccttcgatgcttggagcggctccgatacagttgctgaccgaacaattgtctgtaaacaagaacgttctgaccgtgatggaatctatcagtttgtcttgtcctcacatcatatcccctctgtctctacgacttaacttttttctctgtacaatcctttctctgtacaatcctttctctgacagtgcctcttcgaggcaataaggtcaagattcgatctcacccatttgtcgcagcctccatggcttccatgtccaagaggaccaggtgttctcgagttaagagctctaaacagtcagggctgaatgatacagccttcgacactggcatcgatctggctttctatgagcaggtctcggaagtcaacttctggctggtcgaatccggaaggagatgaacgatcgagatcaacgattgcaccctcgagcttccctcagtgttcttggtaaacgacaaaggctcaacgatgcaaaatcccttgttttcagagtctccaagcgcctctcttcattgaccgccgtcgaactttccagccacataccaaagaccctatctgttcttggtaaacgagctcgggaaccgacattctctattcctgaatacgaattcgctgatgagttcagctttcctcttcctcctgttcttcgacttgccacccctccgatcatggatccccataaagatccctggccctcagtcggtcctcttttatcagaacctccgaaaaaatccccctctttctccaagaagcccaagcggcttctcgtttttgaaggttgtgccctcacttatataggaatgatgaagcctgggttcgttccttctctcgaacaagttgagagcagaaaaagcttgaagtgctgggtagcggtcgcctctggtcaacgaggtgcgccttgttcctggatccagaaacaccgacctcctttcgtccagtccgagagggaggcgaaggatgatgagcgtcggaggcaggaggctatatgctggcggccgaagtcggtcttttcggatggccacgtcgagttcgccgaatcctattatgaaggctgtagttttaataactatctcgagatggttggttattatcctggtttccctaaatcaatcttgtcttcgtctggatcgtcaaagaagacccgactcaatgattttttatgagacgcaagcaaacttgcaaccccgttcatctctctttcatgctgctcttagtatgagggcgctgtctctgtcgtcttcctcgtcgtcttcagcttggttgtcttttctaccggcttccaaccacaacacttctctatttactcccaattcgcatgatccgaagaattttcccaaatcgatcactcattacttaggggatatcatcgtcaccaaggttccttgtaaaaagtctggatggttcaaaagagttccaagagaccccggagctgatggaccaatccggggtcgagttgcttgggatgcctaaacatcttccttcctctctcttgtctctcactcttggtttggggtttttctgcttcggttctgtattgcctcgactcgcgcttctgcctgttttgggtctgttttcgatcggtcccacatctgtacttccttcctgcctgtatttgtctcttctgtctgttcttatgtactgttcttgtataaaggtttgaactgtgtgatgctttatacttgccttctcaaataccaaatacttctctctttctcattctctttgtctcatgttgtccttttctaacactctatctggtcagaattgatgtattctcatcgatcagcgtcatttcaaaggatcattgatttattcgagtcctgcgcccgcaaaagagaacataggtagttcggcgagccaggcgtattgaacttgagaaacagatcgggcatatgtattcgatgtatggacctttgagaatcaagagaacaagatcaagcattgagtccattagacaagagcgaacagagctacagaggtagagatggacatacgatctcgccgtatagaatagcgtttgcacgtcttccgaacatcgtggaggacggatggattttgacgatctagattatgtgaacgagtgcgatacacaatttggtcagttctagtcggatagaccatcatcaaatggaagggaagggtaaactgaccgagttgccgaccatttgcttatactctccatcccgctcaatggcggtgttcatgaacaacccgtccaatagactacgtaagattggctctgaatcatcccctgccgtcgtcttccaatcgacgttttctctcacacaaatttctctcatttggtccctcgcctgaattgccctcttcaagtttctctcgttgacaaaccgatctcgacaccaaagctttctacctgctgagtccgattttggaagtgcctcgtaagatcggagaacattgagcatggtgagatggtcgccatctcgatgtctgaacgaagccctcgcttctgccgattcggctctcttgtcgatggggtctgtgaagataggtgtttcattggcgagagctagaatatcgagaatatcgagggtgcatgaacgatcgatagaagcgaggacgatccgggcttgggcggggtcgagaggaaacttcagcatgcgggaaccagtgggtgtcaagtgaagtgttttatcaagcgcgccaagcccgtagagggtcatgagagactcggtaactggcaaaagaataagcatataagctcgagattttaattgtcaaatactcgaaagactaggaagagaactcactgaaatcaggatgaggcatatcaaggaacccaaacgactgaacatcgtccacaccaatctccttcaactgaagaacaacacttgacagattcgttctgagaatctctggtagaggggcggcagacattttcttgtatgtttggctggtgtacagcctgtagcagaaaccaggaccctgtattggtgaaaacggaaagagtcagttgagaacaagcaagcatagacagcaatctccatgaagggcgaacctctcgaccggctcgacccgttctctgttgggcagcagactggctaaccagcttgagagaaagtgtttcaatacctgagtgggaggtgaaagacgctccagatacagaattagccaagtgtaaccagcatgcagtcatctaatggaaagagacgaaccggtccctcgtctgctgagatagtttttttctttacaaactccagtgtcgatgacatacttgattcctgggatcgtgatcgatgtctccgccacatttgtcgccagaatgaccttccgggtccgggcaggggcaggctggaaaactcgagcttgatccaggggggaagtagaagccatgaaaggcaagaccagcacctagtggatgtcaaagagggggaaacgaagtgtcagagttggaaagcgcaacagagttatcccgcgaaagatgcagcccacgttttgatagtggcgttccaattggttggatagaaatttgatttgctgagccaggttatcgatatcctcttgacctgtgagttccagtgaacacggagaagaaaacgagtttgcagacgtaagctaagcgcgtcggatgtggaattacataagaatgaggagaagaaacgtacccgaaaggaagataaggacatctccatcaggcctagcggtatgtatctggaagaaagtccggacggcgaggtcctcgtattgatctgaatcttcttcggtatgatatatcttgactggatgctgtcgaccccgaacataaaggatagggcaactgattgtcatcaaaaaagagattctatgagcatgatgtctgcgaaaagatactttgtacatatttcagaaaaaagcgatgagaagaatacgaaactgattgaaaaatgtagaaaacctctcggcgtccaacgtggcactcatcacgatgaccttgaggggcacttgaggatttccagagtcatccgtcgcgccaggcgcatttcgtattttttgaatctcgcgaagggagccgagaaggatgtctgtcgatatgttgcgctcgtgtgcttcatcgataatgatggctgagtattgtctttattatatgaaattgattaattaagcagtgctaagaatgatcagcgagctggctcagtctaaagttagtgaactgtggtacccttacgatagcatagggtccccgagaagttctctaacaagcataccatcggtacagtagaccaaccgggttgccggtccgactactgtgtcgaatctgacgctgtgtccaactcgttgtccgaccttggtaccctgttcagcggcaactcgggtagcaagggatagagcggcgactcgtctaggctgggtcactgctatccgaggtgggcgaggggtggaaggtgtgttgggaaagagggtaagtagaaactgaggaacctgagtggtctttccactaccggtttctcccaggatgaccacagtgtcgttttcttttacagccttctgaatagcctcctgacctgtttcgttgacgttatcagaattgagcacacacacacacacacacacacagatatctacgataatcagagcacagtaattgggaacgaaccagaccaaatagggagctctgctctctcctttgccagtctctccctctcctctcgaagtcgcttgccctctccatgatcccgtttgctgagagtcttgcccttcttgccaacggtctcgaaaccggatgcatcgatgtccaagtgtgcagactcttgtcgcttccttttgttggacgacgtgctggttgagtttcctcctcccagagggaacggaagatcgatttcctcgtcagatgcctgaaaatcgactaccttgaaggccttctgtttctctgtctctgctaaaacggccgtcggtataggggcagtcttgggagtggtctgtttaatagaatcctgtgctggtggttgcggatcgtcgtcgaatgtaaactttgtgtatgccatctctgatcagattgcaggtagggtatatatgagtgtatattggtgtgcgtgcgtgcgtatatgagtgtgtatgtgcgatgcttgctccgttgctcctccaatacaaataactgaccgagctggatggacgatgtaggtatcaattctaccggcagcatgggcaaatgaaaatcctaggcagacccggttagtcacccgaaacatcgtctgagaagccttgctcaggagaacctgaggcaagcagcattcattcatccattcatccatcaagcatccatccatcgtcgtgaatcctggtggtatagtccgtctgggtctttcgtttaaaggacaggtcaaaagaggagagccgtttctttctcaccctccattctttccggatctcgccctcggtctttcttcaaacatctttccaagttcagttcagatgagtgacggtcaggtaagtaaacaagaagcatgccttctcttgcccacctgtttcttcattggtgtcccttcgagctgggtggactgtttttgagcaagccatcgaactacctagagcatgcggcgtttcacgcaagagctctctgtccaagacggtttgccgagtcctatggacccaaactcagacgccccgatattctcacttgcgccgccgagctgagccaacgaaatctgagacattcggacttgcatccttctgttgtgcgcaatgctcgaccatgtatgctgatcatactgtgtactcttttcgtcatctgctgttctccaactatacatctgtgtccatcatgacatatcctcctccccccagccggatggactggtgccgttgccacgtctaccccctcggtcgaaagcccgtctcgcgcttgggaattcaccgtccggatcgtcaacaccggtgtttcattcgacccactcgtcccgagacgatgtcgtccacatccatatcgatgaccacgacagcgttgtcgatgaaggaaagattgtggatatccataacaatgacggtcgtttggtagaatccgcgaatctgtcccctccgttgtcgtcaccttcatctgcctcctctgtctcttctttacaggttcggtcttcaccagagattccctcgcctgcagaatggaagtttccaacatctgttccggtgcactcttcttcgcctgacctggctagcaaacgatcgtctatccagtccactttcgtccctctctcgcccgagatcgatccgtccggtccggtcccaaagcgaccagcttcttccggtgtttacacccctgccagctttccaggtccctccggatcagcccgccggctgtccactccgtctaccaacaaggttgagcctaacgacgccgtacgcccgccgctgtccacttcagactcatcttcattcttcgccagaagtcgatcatacttggcgtacatcaacccctcatcctacctgggcccttcatcggtcgatacttcccaagcgccttccgcgcttgcctctgatttgccctcagcacagccagccgccctcggcaaaggctcaatctcaccttctggtgtctatacgccagtcagctaccacgaacagcaaattcggatcgcttctcgaaatcttacagatccggcggtgggcagtgcatttggaggaccagctggtttcccattactctcgcctagaatcatcagcccctcccgaggttccatctcgacttccccttctgatcccatcggctctggcttcttcagtcagactgaccaaggtccgctagattaccgagctcgcgccagttcagttgaatcgtctctatctgttgaagaatccccattgcgggttaagaaaaagacttccaacatcgccagaaagcctcttcctgctacccttcatgccgacaaggaaggagaacccgccgtggattccggcccggaaatttcatccgttcagaatgaactggcctccagctcggtcccttctccgccctcgtctgatagtagcaagccggttcacctcggcgggagtcagatcacagaatctaagcccgttgtcgagctcacggccacttccgagataccacccgttgttcttccctctcaccctgatcctttggaaggagtggggatgagtttgttacctaacaaggagatgaggccgatggaggttgatcgaccgacagaagagatggtagtcggcagggtatggtagagtttggggggttgtctttctttacttttcttttctctattttccttcggctagatttacgtttgtatttcattctagatattggcgaacaaggaggaggcatgctttctgttcttttctttcattttcatctctgcttgtactatggaatatgctctcacaaggccgtctttacactccttcttgctttccctttccctttaaattaatttctcataatttgacctttttttttttttggtgtcctcacatccttgtttgtaaacctattcaaactcaatcagtaggctagtcagtcggcggaagacttctttctttgtttcttaccttttcggatccctctcttcttcaccccccaagtgtttcttgctttgcgggtgcacctctccttctccgtttcttctcaacctacatcatcttcttttcgactcttctttctcttatcgttattattattattattgccatcatcaccaagtttctttaccttgtctctttctcttgatctttctccttttgcctatacatcaaccaagatccttcgtgtacctgcgtccctgactccatctgtgtagcttttattcgacgttctgatactatctcttatctcaagccctcgtactcgtgtctcgtttcttgtgaacctgctctggattgcaaacccttgcgtgatcaaaacgtttcgtcctgaaagataccaagctttcgtcgtccatcgagatgcagtgacgtgacgtgaggtgacgggatgatttccgaacggaagttgaatcgttcatcaggatcaaaagaaatcttgtaaagaaagaaaacacttgccgaagggaaggccagagagagccaaagacaacaaaggacgtagagatcggaacagagaatcgagagggacatttatcgatttggagtcagcaccagtcatgtaacctagagccgtcctagtagtatggatagagggatgtacttcgtatgttcacgacaaggcttgatggaaacgaatgagatcaaatgagattagttgaagatgaagtgtatgaatgcatgaccaaactgtagagttgtagaaacgaagaactgtagatatgtaaaacaaatagatgtggtcgatagaaactagatacttgattaaaaagaagagagaagaggagaggcgaaaataaagatggacggctgagatacaacgtatattcgatcatgagaaatgataaaatctagtcatcagatgaatttccgtattgttcgtagatcacgaaacgaagcgcaattatgccatagctggagattaggcttgtacaagagggtggacggaaagaacagaatggagtttctggtgtgatgcagtaaaagaccagagggagagaggagttagggagggccaaaaggtgaagacgctgccgatcgccttctccagggcacgaacacaaactcagctgatcgtttgagcagactgcgttggtcgttcaagaccttgtttcccctcccggtgctcatcctccccttcggtgtcgtcctccccactgccgaaactgcgtatactgcccaacttgggcctcatgccttctatcccgtgacgagattgatatggagggatcgcatcgttcgcgctggatcgacgacccggtctgtcatccgccgacagctttcctattcctgtccctgacgagacggatctcaaccgaggctctctcgacgaattgttggacaccattgtctgatcggattgacgtctcagcccagaagacggggaggtccttctatcatgggagccggacgctgccgagagagaaggttgaaagttgagagtgttggcaggaagggacccccgtctcactgctagatccgagggcgggggatgcctgcgaagggctgatgatgtcgaggcgaacatgcctgcttggggggtgataggtgaatgagaggcagcagtagatgagtcacgagtcgagacagatgcagagctgaccgagtgggaagctagtgccgggtgattcagtaacgacggagggatcggaccggacgtgatcgacggttggaaacgttgactgatgagaggaggatggaaatgagtctgggaacctcgtctattagaccgaaggacgaacgaggttgaagggggaactggggattgagactctgggatggctgtcgatgttcgttgatggttattgaaagacgatgccctagagagatacggcggaggggacgaagctgggagactctgtctgcggcttttgttgaaagtgggcacagccgaggttgaaatagcggtcgcgaaaggggaagtggtcggatggagatattccaaaggagccatgggagacaccgggtgagacgctgcggaataggacgaatcttcttcgttcccggtcgacgatagagaggagaaggaagaagaagaggaggtcgacggaagaagaacagcactggatgtggtcattacgttcggtaacgagatcgaacctcttctgtctgtcggtgctggaactggttgcggcctgattgggatttgcaagctgcgactggtgctggctccttgttggtcccgtccggaatgacttgagtaataggagttttcccttgtgaattctgggtattcaaacttttcccgttcggcaatcggcgtgccaggacactggttgattgggtctccgttcgcgtccaatggagcatagactggagatggattgaccatgtccccgtccaagtcgtttgagtctgacgcatcccagcttggagtgaatgatgtggacgtctgtgcggacgtcctctgaggaagacaatacgacgggaaggacgatggaggaaagacaggggtagctctttgagtagaaagagacgaagaagacgacgaggacgaggaagggccagggatggacccaaaggcgctaccacctccgaaggagaacgaggtgagggagttgatgatggcctcggtatctgagtcgacaaacatcggcaacgttggagtcgaaagtggagagtcagcgagtgtctcccggtcgtccgaggaggatgacatgatgtttgagtatctgttgtagtgctttttgtttttcttccgaccaagtatctgcgagcaagaaaaaagccaccgagaagagaagaaagaaagacgaggaaaaaagagtccagagatgaacaacaggaacacgatattcctttcaagatctgatgactgaccagtaggacgactcgaactctacacagaccgtttgagcaagttccaactcccgatagtgatggtgtagctttcggtctctgctttcttgtcgccactgacgatgacggacggtgaagaggatcgggaatatcaatgttgacccaaaagcgatggggagagaagtaaggcggagaaaaaaaaattgattagggaaatcgcctgatggattaacaatttgtgtaatcagaaagtgtaacgggagcaatataggaaaatatagtcagagcaagccgcagcagtgtgccctgaaattctgggcctgcggtctagaatcacacgtgtccgggcagttaggcagttcggcagtcaggtagtcaggctgcccggaaggccggcaacccggccgatagatcgatcaagcggacgggtttccacagaccacgtaaacgtgtagatctctcttgtgaatgatatcatcactttgccttctcgtacgagatagaatcaacattatgatacttgaaacactagtacaacctattaacacagacggacaaagatctcgttttgggtgcgttcttgttgaggacaattcagagccgtcgtctagaagaagtgggcagagatgcaagaaggaaagaaaagaaaagaaaagagaggcaaggtagagagaccgaagaagagagatagagaaaagaaatggatataagtatgaatgatattgaaaacctcaatcgtttttgaccttgtcgaactgagtaaccctcgtgccgtccgatagtgtgtccaccctagagaccaacttataattgcccaatctcggtaacaacactcgccacacgaaccaccacacaatgcccatcgcaaacacggcaataccaatgatagggtagagccagtaaggaagaggaggggtgtctccgattccgcctggcggtcgcaggaacggtgcgacgagtaagaaacaagcggccgccatgaagaacacggccaccggcaaccaaaccttgaacggtcggttgatattggggtatttccatcggaggtagaataggccaacaacgacgagcaaattgatgatctgaccaggatatccttcgatatccaaaataaagttgtatgcgattcctggcggaggggcaaggatgacgatgacagaaggaatcaaatgaacgatcaatcctgcgaacggagagccgaacggccagttgctagccagtgctttcgaccaggggagaattccttccttggcgagttcctggttgactctgctctgtgcgaacgtcacggtgatgacatttcctaaggccgatagcgcgacgaacacagagaccgctttctttgcttgggcgttgaacacaactccgaagaattgagaggcgacagtgagggatgtagtcttgagagtcgctacaggtgtcgcagcaaagtaggcaatgttggcaaacaggtagaaaaagaagcacaacgtcaacccggctggaccggcgatcttcaacgttcggaccggattcttgacttcgttcaacaccaaagccgagttcgaccagccagagtaactgttaaggaccttgaagatcgcggaggcgaacctgaatgtaagagaaagagagcgttcgatagtttcgttagagcctcaaaactaaccaagcaggagaaagaggaaaggaatgagaactaacgcataagaactcgaactggtgccctcaaaggagtttcggaagctagaatggggatccgcgacttttgtctttgagattccgccgcccaagacaacccagccagtgacgacgacgaaggacaaaagggcgatcttgactatcgtcaggaagttcatcaccttgattccgaagccgggtcgaatggtgtgaagcgcagtgacaaagactggaggggggacgaccgtaaaaggaagacaaaatatatcagcatgatgccattgggaaaagtaccggaaggatcaaggatgaacgaagaggaaggacaaacaaatgacaccgacggcaattcctcgagcattccattgactggcggtaacgccagcagcggtcagaatattgtttgcaaacacaatacatcccgactggttgatgcattcatcacacaaatcgcatcagaacgcctatatcgaacttgttgtgatcaattccaagagagagagaaaactaacagcagtgaaaccaagaaagatggcattgacggcaaagaggatggtcatcaagtattttgggtttttgtacgctgcctccaggtaaaccttttctcctccactccgaggaaacatgcagccgagctctgtgaacgagggggggggggaaagtaagtatggatcgtgtagaggcgcgcgcgcacgtgacattcgtagatgtcaaaagatatgatacacatacctatccagacaagaagaccagacattgagaggagatacccgaagacccctagaatggacgaaattagagcagacgacagagtttcctcgcctcatcagcaagagcgccggcgcatgaaacaaggggcgtaggctaagactcacataagcagagggctgctccgggtgagccgacacctttgaggatggtggctggagtagaaaagataccggtaccaatgatcctaccgacgacaaggagctaaaagcaaggatgcagatggaagggaaggtgagtatcaaggactatacagaggcttatcggtcgaaaggcgggcagagtcgaacaatagaaaagagaaaatagacggaaaagataagagacagtttgcgcaccgtggtagagaccaagccgagatgacggcccaagccgccctggatagaatcatcgaaaccgagttgaccgttatgaatggcattccctgcactatcgagttcggatacatgaatgtctgtaagaactttctcgtcgacgatcccatccttttcatcggtgtaagacgcctgggagcctgtgggactcgccgacgccggggctgaatttgctcgtccgaagagagtcatcggcaaaagtgtgaaagaggaaagaggaagtggatggtggtatgaggaaaggacacgaaaagaaccccttccaagtgatcaaaggcaatgatatgtgttcagacgatgaagagagaagaggatgggaaaagcaacgggaacgagaacgggtcgtcagactttataagactgctaactaaaagggattgcatctctcatggcttcgaagatcaacattcttgctcatattcctacttcggttcctgctcctgttgcgacaaataaaaaaagaaaggtttgtcccaactgaatcggagaacccagctcagcagcagcagaggtgaggtctgacagactgagaagcctacagaagagcgaaggcataaggcatagataagagtttgagatcacaactagcacagaagcttgcacgccataagatctcatcaaacaggtggtgggtatttatagattgtagtcgacatgtagtctgacgtgctttctctattaactctcgactgatcaacatattattcctctgtatccgttgattaatgacatgtccaacatggtacaccagacgacggtcgaccgggcacagcacatagggtgcttgatggataggcgaccgacttaactcaggcgtacatatgactgggcgggcaagtgatcaaccaactggacgaaagtagagaggatacgcaggcttgggtttcccggctatgaattttagtcaccttctggtaacggtctaacctgccgatgtatgtgtttgtatgtgtgagagtgtggcactcgaggcttttccgttggataacatatatcattcagttctctcatcaaagccatgcctccgttgccttcacctcagaccaaacatcagagcttgatcgtgagctcttccaaagggttgcttagctattctggctttctattcttttctttctttttttctttcgttttcttgttttttctccatcttgtttcttctttgctcttccattgtgatgtatcttttgtgttgataccaatgccattctcccatacaaatacaatcaggattacccgctgagcacgtcgatcaaccttcgactgagtcaatctcagcaaaattcattccccacaacgggaacaaccctatggctatccgcacaggtactctccgcgtatttgatggacacctacaacacgggcaaacaaggaaaacctaaacggtgtattgagctcggggcaggcgttggcctcgttgggttcgttctctcaccgtttgaaagctcgccaaattttcttgtggaggagatttattttgttttatttcccttttttatttttatttttattcacctcatttgaattcttatcctatctaatcgcattttttcatatctctcctattcacactccccttgcagcctaaccctcgccagtctgtcgttcgatgtcgtcatgacggatatcccattcgtccttcagtcggttttactacccaacatccgacggagcaaaccgcttttcgcaccgtgcccggcttctgacgatccctcctcagctcccacgccatcttccgatcgtccgacgcaaggaggttctgtcgtaggcagagaattggattggacagtcgatccggccgattggaattgggtcgagaacccatcaagtgtcaccagtcaatgggtcgatccttcgagcgtcacctctgtcggaacatgttctaccagatttagtcccgccccggctggaccgccgttcgatctgattctcacaacggatacgatctatctaccgtcactcctacctcatttgttgaaaacactcaaaacgctctcctctctgtctggccatccaccgatcttgttggcactcgaacgaagggatccagctttggtcgaccggtctctggatgagtttctcaatgcgggcttcgaggcaaagatggtcaacaaagggaggttgaaaaagtcggtcgacagacatcttggctgggccaaaagtgattgggatggcgtcgaggtttggaagtttcgctataaaaaattagaatgaacgttgtatctgtaatttttgccttcctttctccgtcttcctcgttcgaccggttttttttttccttgtcttttcggacaagtcacgtccgtctttagaggttcatttctatagaacaatcttccttttcttttcccacaatcagatgacacacattgccaatctactgtccacacttccagaactgttcaagaacagacggcacaataaagtggatagttgtcagcgcgcgagtccaaacgctttcacttttacaatcaaggagagacagaaaactgacgcaaatatctccatcgacaatctcgtagagctttccctgctgtcgctgcttaccagcagccttcaccgcggtctcggttccgtactcctggagatcagcatatgaaaagatctctccacacacgaacttctgctcgaaatcagagtggatcactccggcggcagcgggcgccttgataccctgctgaactgtccatgctcgaacctcctgaggaccacacgtgaagtatcggattaagctagaatgaggagagaccgggtcaagcgttagttgatcaacctttgtgtgaaacaattgatcgctcatttgcaaaatgagagatttctcttatcagactcacttcaacgaggcgtaaccggcggtggtgctataagaatgggaagaaatcagaatatatcagtctccgttcaacgagactagacaacctctcccaagcacaaaacactcacatctttcccaaaccaggggtagcacccttggccttggccttctcaagaccgagagactcgagctcggctccctgctcctcgaagctcatggtggccaatcgctcctcgagcgcaaccgagaacggaattaacaaatctcccgggttgttctcgtcaatccatcccttgatcttggggagccacttgttcttctttcggatgtaatccctctccgacaagttgaccaagtagataaccggcttggcggtcaacaactggagctcgttaatagtgtcaatctccttcggcgtccacgttccctttcggacgtctcgcttgtcggcagcgagcaaatcaagaaccttctggcaggtgaccaattcctccttcttggccttgtcggcaagagaggtactgcctgctccacgagcgaccttctgcttggccgcgattgccttctccatccagtcgatatccttcaatcgaagctcgttctggatgatcgccatgtctctcaacgggtcgacatctccctcgacgtgaatgacctcggcgtcgtcgaacgctcggacaacctggaagataccatcgcaagctcgaacgtgggacaagaaagcgtttccgagaccggctccggtagaggcacctagtcgagttgaatcgacgggtatctcacgattagattcacagtgctcggtcaaaatttttcgaggcacatgatagacacttaccagcagtaagaccagcgatatccacgcaggtcaagaaaggaggaaccactgacttgggcttgaacacatccgtcagccaatcgaatcgagcgtcggggacagggattcgggctatcaggaaggaaggaggaatggaaatgtagataagaacatgctcgatcattaaatattttctcgccaaattgacacctactctcttcaggatcactatggaaataaacgaagaattaatggttcaaagaaagaggtgagcatgcgaagatgaatgagcgaacgatcaaacgaggcgcaaagacgtacatggtagcgtaggggaagttggcggcctttccaagatctatgttgtgcgatcaaattgaaatcagcatgggaaagctacttggaggtttgggcgtccagattttcacgcgatctttatgaacgaaccagactgggaaagcacgttgctacaaacgattgaaagacaaacagcatacagtcagtagcaggcaaatgaagtcttgatgatatgtgctgacgcccgactcacaagaaagaggattttccaacgttggggagacctaaagttgtggaggatggacagacagagcgagtgtatcagtcaagatgtctcgacaagatactcgtcgatggtgaaacgctaggtaaggtgaaccatagactcaccaacgatacccatcttcaagctgaaagacgaagaatgaatttggcaaaagacagtagtgaggcaggtacattcgtcagctttaattctgcacaatcaggccattatctccagtcaaactgaaccagaaggtgcagaacgacgactagaaaagcagaagaaaacgagcaaaagacatagatacaaggagaagaagaaaaaagatgagacgcaacttgtttccgggtcgaccgaggatcgactttttctcaggggcggcggctttcttgggaggcatctttcctttctttttaaagcaggcgagagaggtagagaacgttcggattgaactgggagtgacgtagggctgatagaatgtgaagactagtcttgtagacgagtggttcattcaaacctgaaagttgatgagcgttgagaacgaggaagaatgaccggaaggaaggctgaaggctgaaggagggaaaaaaacgagcgagtggttacaacgtgagagctgtgcgtcgtagatccgcacatgactgtggcgctcagcctcggtggctcataacagtactctgttcgaatcaatcccagaagaatccttggcttgaaagaaaggaaaaatccagcgcatacgagtgaaggagagattgagtgcacgatcaatgcatgcaccgttctcccttgatgtcacccatgacgcaaagaggaacaagcgaacatataggagcaaggatcgatagaaggctggctgcagaccaagctacctccaaatcacgtgaccccgatgctgtagcccagtctgtccagcctcccctcccttgcggcacggaatggttacgctcgccctcgcctgctcttactccgcctcgctttcgcccccagctcgtcttgtttctctcaactccctccgtttcgtttagagccgtctttctttggttctatatctccttcctttcctttcgtttccttcctttttcatcctggtacatacacacacagatacactcaatcacagctccttccagccatgcgtcttgtccttcttcttacctttttcactctcctcgcttggaacgttcaggccggtgttgtcaccatgacccttccttgtttgtgttctcctttcgtttttgattcttatcacaattggacatactcaaccaacaatgctaacgtactcatgtgggggatccgttttactctgtgacttcgcttctcgttccttcttcttcttccatcatcgccaggggatcagggagatactgtacgaactcgtcagctttctcacaacaatgaacttacagccctgctaacgacgtgtttactctgctctcaatagatcatcgtgtcgatgactacgaatgcgaacggcgtcgcacaaactgctacgtaggtatcctcgaacaggaattgacataccatactcagtgtgccgagaagcttatcatctcgttcattgctttattttcagcgtgtcaaccttgacctctggtgctgcggcagatgcgacaaccagcaagtatgtgttcttctatcatgtgttttttatttatttatgtgtttcctcaagcgatcagcacaaagagacgatgctgacgtttccatatttcaaaactctcacgaactttttctcaaaagatcaaccactgctaaaactactaccgctgccgccgctacaaaaacctcttcgaccaaggccacgacaacgggcacctcgactcagactaccacctctgcaaccatcgccaccactgttctcactgcctctggtgtcacagtaacgatcgagtccggaacaaccatggattacgcagcattctccagtattgtcgctcctagtttagaggccgcatacagcgctaccgcatccagctctggtacggttctgttctctggctgtgtctgaaagggtcgatgaacagagcccttttcttgttgatagcaaattactgacatatcttgtcctggcgtgcacatcccttgctttagctctgcgccagtctggattgtcttcgttcccagttgtcctctctgtctgtttggccgtcgtgggaggagcctttggtggtatcggactgttcatttagatatcatctctagctcttctctgttcctttcgctctttttcatctctcatcataatccgccggcggactcttctcttctttcgtatcaactcttgtcttccttttctctcgccggacgctttcaattctcctatccctttctccactgatttgcctttcataatctttctcagcaaaatgcattgcccagagtcatcaggcttgtcgaatcatagagactgttttccataagtgatctccagttctgtttcgaccactgtctcgcctactcccctcatcaaactcctcattttctattaactcacctctatgatacccattcgttctggcgcatcataactctcttgtgtttttccttctcattcgctctcccatacttcatccgatctgatacatagtatttgtcctgtgcgagccaactgtgaattcatgatgttgctatgttcttcggtttcacattagacaatcgcatctagtcagcttttgcttgaacagaactcaaataaagaatcatagaagagaagaaggaagcaagcctggatgcttggccgttggtcgttgttacgtcccccccttggcgttttgtcgcggcgacggttcatttccttatagacgccatcccatccggttgaatccttgcctccaaccgcactcgtccaccttcgaccatacaccctgctcgtttctcatccatcccttgaatatctatcttctcctctcaggtgctcttgctcagataaccaaaaagaatattaaagagtgaaagcatagccatgcgtctttctaccggtttactcacactgcttgtctcggcagcgaccatgttgcaggtcagcggacaggtcttgatcactagtacacttccgtccgtccatccttttcctcattttttccctcttctcaaacgaggttcatcgttctgaggatggatctggttgtcagatcgaaggactgatcttctgactctttgctgtgtctttctatattcttgttgggaatcatgtgtttctctcgctctctttctctctcggatcaacgttttcatccgtccgggtctgctatgcttgcttgggtcctgcccatcagctatgcgtgagtcgtttcgcttgcttaggcttacactgctccccgtgtcgatctagaatggagaaggcaaacccaggtgtgatggttgggtgggtatgttggaaaatatgttgaaaggttgactgacctaatagtgttttcgttctacccgacgtctgcttctcatggcgaatagcgatggggataccgtaagttcttgaataatttgtgcatcgtcatgtcttgctttcattcctaattgaagagaactaattcaaagcactctgatggtcggcatgcatttttaggtcgcgtactccgccactacgaacgcacttggagccacgacttgttcgttcttcaagtttctcaaacaatacctgcttcaactctatacctaatctctcacatttcctttcaaatggattcaaaccacagatgtttctatcagtaccatcaccgccacagggaccgcaacctccactactaggagctcttcctcctcggcttcgagaacgacggccgcgaccaccactgcgaccaccacggccaccactactcctgttagtacacgttcattctgggattgaatagaagaaacatcatgctcactttacttgtggattggttttggatttaatgttgtaaagagggtggttggtcaagactcgacggtggccgtcgtgtcgactacgtgcgtatagcttttccgttcgtgaaaaagatgatctcttgagaagcatcctttctgatctgtcggccttacagcttccaatatacaactaccaacgctgctggagaaaggacggtccgcacttccgtgtttgtccctgtgagtggtttcatctgagcagtgtcactataggatgtatgctccttttccttggtactgaaccgccgtttctcgctacacgatcagacctttccgcccacattggttcccgctgagccttcgtctggaactcaatatgactactcggagtacatctcccttgtaggaccctcaatctcggctgcagtcgaggcggcgagcaccggtacatctggtgctggaaaaacacagatgtctgccttgtttggagttgctggcgttgtgctcggtgggctttggacgttcatggcatgaggagccagccacggccgttgcgtgtttttgattgtgttgtgtctatatccctctttccctcctgttcccctttttgttgttttcctcttctgagtcttatttctttctatctaccctcgagcaactacatcctctcttaactttttcaatcctaccattatcgtttatatatatatacacataacctagttcgcctttccatcagtttgtttcacttgtgtcgctcattcttcttttactctcttctcactctcttcttattctttccttattcttttgagtgttgcttccaattctgttgtcgtccggagtcgtgtgcgcagactccacggataatattccccatggaccatccttgttctctcataatgttgtgcgttccattgaatacatgcttgttgtcttcggaaatgatcctggtatcatccagtgaattaaatacatgagcaaagagcaaaagaaacgacatgtccagacaaaaagataagcgaatagaatgt

SEQ ID NO: 2235 - DNA, 19943 bp, Xanthophyllomyces dendrorhous
gtccttcttctcgtcctctcttcttctttctctcatcatggcaaacaacccaccgatgccttccactcgatcggctcttccgttgtcttctctgacatccacttcttactcaacccatccgtcggtgtcgtcatccctgtcaaattcatcatcggcacagcgcccatcatcctcacctcctcattcgactcatggtgcatcatcctcgccccctctcgaggcagaaaaatcccaagtgccgataggagctactacgctcagatacctcaatccgtccatggtggctggtgcaggagcaggcttgatctctagcgtggtcacttgcccgttggacgtcgtcaaaacaagattgcaggctcaacatctcgggaaaggacaggtgggctacgagggagtctacagttcgttatccttcctcttttctcttcctgcattcgtctctgtcatctagtctatctctcgtcttctttttcgcctcgtgtcgtcaccttgagcgtatctgtctgctggagtatctttcgtgttcggcagagtcgttcgtgatctgtggaagggaaatggggaggagaacattcggtctaggccgttggggcttatgagaggagcaggtataaggactgggaatgaataggctcaccctccttttgatagactgtgggcctcctatcagcatgccttttagaaaggacgttaaaaccaccatgctctcgcagccattcctttagaaagacctcgacgtcctcttcaaactttcccaaactgcctcctttcggatgagtcaactaatatcatttcgttctctgtctctcggtttctttatccactctcggacttcaggtacatttcgaacgatcgctcgacagtctggtctcaaaggcttttaccgaggtctgggaccgacggttctcggatatctgcccacttgggccatttactttagcgtttatgatgaagtaaaaagccggctgaggcatgctaacccggatggtctgaatggagagagagtcaaaggttagtcattctggctcattctccatcgcaaacttcctcgtttatctttcttcatggttgcaagactcgattttattgagctgatcagtttttttttccttcaaaccgatgcttgattatccttgatgacgcgacgcgttgacttgcagaatcaatctggatacatatagtagcagccatgatggcaggagggaccggcacattagctaccaatccgctttgggtgatcaaaactcggttcatggttcgttctcctcactgcttcccgaatgatgtccccttatccatcacgttcgatcccttttctgatctttttcggttgatgttcaaccacatatccatcaaaggcacaatctgtcaaagacccaaatcagaaacgatacaaacacacgctggacgcaattctcaccatatataaacaagagggcatgcgtggattctatagaggattgacgcctagtctgatgggtgtgagtcatgtagcggttcatttcccgttgtacgaacaactcaaatattgggccagtgagtctttcatgttcctttgatccttctgcgagctttgagcgcaatccgaccagagtcagccgactcctggtaagcgctcgcgaataaaacaaaagaaatagcaaatatctgatttgtgcatcgattttcatcgccgtcgcttgttttctctcaaacacaggtgaacatcaaccgaacgatctagactcgacgctatctccttcagtcattctcatctgttctgcgctctcaaagattgtggctagcgtgaccacttacccgcacgaagttcttcgcacaagacttcaaatacagagaacacactccccgcccccgtcatcaacaagcgcatcagcttcaacctcacgatctcctgctgaaaacacttcgtcatccaggtcttcatttaatcaaccatatcacgtccgttctggtggtgctcttggggtcagacaaggtgatccaggcgccggatcggcttataaaggattgtggaggacaataagtcagataagaaaggagagtggttggtccggcttctatagaggattgagtatcaatctggtcaggaccgtgccggccagcgcagtgacaatgttgacgtgagtttgtttcaatcttggttgcttgtgttgatatagaaagaaagaaagaaagtaaaacattagcttaccccttgtctccttttttttaccctctcggtggtcagatatgaactcatcatgcgatacctgacgcacctgcccgacccataggactcaagtcgctccctaacatccaacttttcatctcgtttcgattgacatcctacgcctctcagatcttatcatcatctacgtctcttgcctaatctcgtgcatcattccaatactcctcttcaaacctcactagaaaaagaaccaagaaagtcgaagcgctgtctgttcttgttctcctcgccctctggcattcgttgttccataaatcttccgcttcttcctcttctgcttttgggacccctcgcatgttggcttccacggattattcaaacaatgaatgagaagatcaaggatgggaacgagagcgcctcttaaagaccaaacgtcgcctttgctcttgcgttcaattttgatttttcgcttcgctgctcgtttatattcgatattttactttcagatagattttctttttttttcttccttccttcttcagcaaaggctttcgcataccccctcgctatccttctttcgcttttctttctcgacatttcgtctcgacatccatctttccgaaactactcccgtttttctcttttaaagactacctcttacctacccatagatagataaaaggggggagaccatccgtcttcctcgataaattccttttctcttgttttcttcggcttcttgtttcttgctttgggccatgtttcttgcttctctatcatctctccctcatcttttctttttcctttcctttcatgttttgttatggatgtactgatattctgcataccatttctaagccctcagtacttcgatctgattagtctttggccatgtccgttacgtcacaagcgcgcaacagtttaagcggggaagacattaatacacactaggagaagatcgaagagccagagggatgcatacagtgtagtcaaacacatcgatagaggagaatagatcgaactgaggggagatcatcagactgactcaagatctatcaagcagagagcttgctttcccagccagtcctcgttgaatagtctcaagaacagctgatcgctattcaaaaagagaacatgtaaacgaggccggaagaacttgaagatcagctttttctctcgctgatgagcgaatgtacagagaaacgatagaaggattcgtacgttcgataaactcaggtcgtaagcttccagcttctctgtagcagcccgatggatctcgatacgttccttggtatgttgaaccatctattcaagtaaaggggttgctttcatcaatcatgacctctagattgacgtcgatcaaacagagaggaaatatgagaggagctactttctgcgcgagtgaatcgaaccgagtacttaggtctgcatcatcgatcaaaagcccatgaccggaagaagaacgacaagacagagatatgaacaaatttggccgaattttaaatccaatcgaagggtcttgagagcataccttttcctcgggtttcccattgctccgccgttagagtctcttgcgcgtacttatccttcatcttttcgtacgcctcaccgatcttgcctcccttgagcatgaccagctggaccagtaatggaagggatggatcaatttcaactccactgtggtgcctgtgtgcatgttgagcggtttcatgggtgtgtgttaggtcgaaggaacggcttgacatgcgtacagaattggttgatcgatggtcgtccgagctaaatatgggatgacctcggtatgtgttctgtgtatgtgtgtgtgcaagttcgccgaatatttgtcaagtcctgttacagtactacctcaggttaagagagaaacaaaggacgatttcaaacctcgatgtcgtcttcaaatcgaccttcagcaatgtcctcttctgtatgatcgaacttggcttttcctctaaatccgtgttgtctttcgtccagttcgacatcttcgtcgaccgatcgccctctatacgcttcttcatccgcttggtccttcttgtcttggaacatcaatagttgctcggctccaagttgcataaacatgtcgtcctcgtcatcctcatcgaatattccagccggaaggccctcgtggtctcggcgcacagcgtaaggagttttaccgaattgaacaccccctgtttcctggtgcatatatccgtcttcggaaagcgagtagtcatcctcgatgtcaggagacaattgattattaagacggcggctatcttgcgtcttgatcgcatatgaatgaggactagaccgagggtttgagataggtgtcatcggcggcggtggttggatcgcccgtcgatgagcgagacgcatactcttatgttggaaatcctctccgatcaaagggtctgttgaaaaatgtaagctcggcctgatgacgggtttggcaccttttgaaacgatcgaagacacagatgcagaggacgactgtatctgagcagactgatgaacgaccgatgcccgatcattggcaggagttgatagcgacagctcctggcgggccgtccctccttgcggcgtcaaagagattgagaaaggtttgatgttctgggtctctttttgagccacgaggcaactagaaggggatccagagtcaggaatttcgaagagcctagctcgggaagaacgtccttcaacttggtcctcggcaggtctttttcgggatgaagaagacagcatgccactgagacctttaggcgtcgaccgaaatggcctttctggcagaggtttaatagaggaagagggaggcatgaacgtggcgatcgtggttgttgttgtagtttgaaggtagattctgagttgttcccaagaatggaataagatcccttagcaagtttagaagagatcaagatatcaagatagtacttactgtgaccgagaaagatgctcgttcataggcgaatgagaacgctgatggccactctatgagataaatactgatcaaacagctgatagaagtgtcttctggacagaagctctccggtatcctgagcagataattggaatctatctcgatcaatactctttgatggtgagtagaggatgagccagaggtgtatgtcaaccgtaaacacgtatggataaagcatgaaactcggttgacaggaaatggttcatttctttctgtcagtctatttttagcattgaaagtgaaaaaaggaacgacaagccaacatttcatgactagaatacatgcacatctaaagatcgcaaagcagaaggtaaacaaagataacccgttccacttgctatggctgacagtggaagggaaggcggcgcaactatcgatagatatacacatgcgcatatacccttgcatagccctaaaggcatccgcgacccgtaacctaactgagcgactcaatgaacgcctaagcaggccgtctagctatcgatcggtcgacagaagtatcggtaaggacaaggaagtgctggaaaagatgttagacgctatatccctggccgatggatggtagaacaaggtctgcaactgtgccggcgttctgttccatggataaaacggtcaatatagaatttcacaagacagccgatgaagatctatccgtacaagtctgggatcgagcggatctcttcgggatctgttggttctgagtgaaagtgcaagcgtcccgtccaatctttgcgctcaacttctgctcgaatatcggcccaaagagaacgcccgacgcctctgatatgaacctcgccggcaaaggtatgctccaagtcggtcggcctgacccgccaaccagcttgtttgatgatagccgtcctttggtcccatggattaagggacgggccgccgtctccgtctataggtgcgctcactagcggagcaaaatacaattcaagcaccaagctggacgacggcacgcgagcgggcagaaagaaggtcggctgaggtgttctggtgtaatgaggattcgggtgatcggctggagtggagaccaaatggaaaaacgttcgatcaaaagtgatccgacggagggatccgttttgatacaacggcttgagcatagactggaacgcgtatagcttcctgagggtcaaacgatgatggacttccgatcgatcgacgtgatctatgcgtgaggtagacgtcggatacataggtccgaaccaaaggtctgttggttcgacgcatctcagcagcctagtcaagatcccctttgttgaaggcggatgggattcgatgatagaagccgtccattcggccatatctgatttttgctgagcgaactgaaggactcgaagtgaaggcaggaccgaacgaacgtcgcttagatgaggcccgagacggtgccattcgatatcagtcaccggaatatctctatccatcgacacggccagatggcggacctttcgaagggcgtcagtcttgaggtgagggatggctccctcgcggtgatcgatggaaagaaacgcgattaggtcggtcggtctccgaagaagaacggtgtgatagcaaacgggtatgaaagcatggtaccattcggacgagactagtaaagcagagacgaaatttgagggagtatatgtcaagataagagtgagcagtgggttgatggataataccttgtgtgctgcctggaacgatttgaccgaagaagagctgccgatagccttctctttgaccgcaggtttggctggaagatcgataagacgaagcatctcgaccggatgtatggtgacaacaatgctggcaacgaggatgctggcggagaaagagtgaggaagtctagacgctggcctgttagggttactgccgagtcaccagggcgctgacccggtcttggctccggggatagactggctctcgagccggcccgatgagtgatcgcagtcattgccgagagagcgaattaattatggccgagagcgagacgatcgtcattgactcgaagcgggacaggcacaagcaaggccgggcaggtacaattgaggccggacagacgtgtaaacgcgcttggctcggccctcggcccgtcacttgcagcatcactggcgcttggaagctcgatagatgattgtttacacatatctgatttgtcggtcattacttatctactctacattcggatccgtcctgtttggccggctacacgcgtgcgcttgttgacgcttacagtgtgtcgtcttttcatgtacaaaggtcgaaccttctttttaacttcctttttcttcttgactttttaccaccgaccaagaatatatctttcgatcttggtgtcttcttcatccttgcatcgagtcctctcttttgattttctatatccgccgaccaatcgacaaggccaaaacaagaacacctttggataatagacattaacactaccaccaccagcactactgccgtcaccaccgtcgctaccaatactaccaacaccaaagcttccaccttttcattcatcgcctcttatccgtggtctcgtcctcttcatatccttcgtccttcatgaagtctatgacggaagagaaaactctgtctgaaaaagactcaaacgccatatccaacccgacgaaacccagccgatggtcccgtcatactagagcggtcgacccgaagagtgctgttgtcggtggtggagaggccgcagcggctatcgcgatggacgaatccaccgctgctgtcgacccgaaaaagaaagaccagaagaaagtcagcttgttgaagctattcaggtcagagccatcttcgccatctctgttgtagccacaaacaagtctctcactcttgcctctatcgatctcaacatgttctttccttctataacgggacgtttcatccttcacaggtttgccactacaaaggaagtggtgctcaatataatcggactcatctgtgctggtgaggcttacaatcttttaattatgagcagaccgaattgagacccatcactggttgtgtttcaacttctgcttctcttgtggcctcttattaccgtttttctttttgggctcacttattacattgatctgttgaccgggtctacatagccgcggctggagccacccagcctctcatgactttaattttcggtacgctcacagattcttacgagccttctcattttgagacagaatactagttccaggcaaacccttaacggatcgatcttttgctttttgttaaatgcaggtaaactcactggatccttcgtcggattcgctaccactcttcagaaaattgcctctagccccgacgggataactcccgccctccaggctgaactctcggcagcccgtaagtagcagagtcaactcgtttaaagggttccttgagacttaaatctgatttccggcgcttcatcttctttctgtcgggagaacagagtctgttgtgaaatccgcttctgccaaagatgctttgtggcttacactgattggaatcgtgagttctattcaaacctctttgctgtgcaaatacaccatcggcactggtcctgactcttcatcggctctgtctcttgatgtatcatacagggcatgtttatcaccacctacgcatttgttcgtttatttttgacatatctatctattgtcaagcttgctcacaatcttctattcttgtgttcacagatggctatttttgtctttaccggagagcttaattcaaagagacttcgggagcgctactatcaagccgttcttcgccaggacgttgcctggtttgataccgttggagctggagaaatcgcgacgaggattcaaaccgatactcatcttgtccaagagggaacgagtgaaaaggtcccacaggccctcagctacatctctactttcttcacagggtatatttaacattcattcatgtctgttcagtgcctggcatgcttggctgacaattactttatctggtttcttggtttcagtttcatccttgcctatgctcgatcctggaggctttctttggccctaacatccatgatgccatgcatcatgctcgtcgggtgagtctatcttcctgatcaaactggctcctaagagattttacgtgtgagcttttgttgacggctaattcctactctgcgttctattcggtgttgaagagtcttcatgggaaagtttgctaccaaatacaaaaccaatcagttgacatgcgttgccgaggccggatctctggctgaagaggttatctccaccatccgaaccgctcaagctttctccacacagaagactttggcagccctgttcgacagtcacatgtacgtactatgttcaactctttgtactctatcgcatcaaatcgggtatctgatatatgcttgtcttgcgcatcttcgcttttcatgatattcggcttgttccgtagaataaaatctcgaatggatggatacaaacaggcagtcagtcacggttgcgctatcggggcaatgtgtacgttcgctttctcaacgatcacttcatctcctagacgttggagattagatcattgacagactgatcattcgttgggttttggatttatctagtctttatcatctatgctgctgtgagtggaaatcgagttggtatgtcgagtttgcgaagtgtaagaacctgatcaatcaactccttttatatcacaatagtatgcgctcgccttcgcttttggttcgttgacttctttctaaaatcagtcattgattgctgagaccaacgaggcttatcttatgtcttgtctcgtgtatctttattgtgccttcgtcaaaataataataattaggtggagttctgatcactgaaggccgagccagcgctgaaatcgttgtcaacgttttcatgtccatcttgattggatccttctctcttgtcatggttagtgctccgtattttctctggaatctggagtttaaccagcggtacatcgagtgttctaatattgctctgcatttgcaaccatgctagttgaatcctgaagtacaagctatgaacaacggtcagtcgatttgcgcactctatcttcttgatcataatcagtttatcgacatgcagctaaaatctcatctttcacttttgcagctatgggagcggctgctaagttgtacgagaccatcgatcgggtgcctgagatcgactcgctcagtgaggaggggcttcgaccagacagctgcatagggcacatttctttcgaaaacgtccagtttcattaccccagccgacctggagtccctatcttgaagggacttagtgtggttagtttcttctgtttgtgtcatcaaagaagtttttgtgatgagaaacaaataactaaggaactttcttgtgttacgtgactttaggaattcccggccggaaagacagcggcgcttgtcggaagctctggtagtggaaaatctacggtgagtcggtcataacagagttcaccggggtgtccttcggctgagttctttccctggtcgagtaatgctgacgaatatgtgaggatctgattatcacaggttgtatccctggtcgaacggttctacgatcctgtcgccggagtcgtcaaactggacgggagggacatcaagacgttgaacttgcgatggctgcgacagcaaatcgatcttgtctctcaagaacccgtcttgttcgcgacgagcgtccgtcagaatattgagtatgggttcatcggatctgcctttgagaactactcgcctgaagagaagtttgctctcgtcaaggaggctgccatcaaggccaacgccgacggtttcatctctgccttgcctgagggatacgatactatcgtcggagaacgaggaatgcttctttctggaggacagaagcagcgggtggcgatcgctcgagctatcgtatctgacccaaagattcttctcctagacgaggctacatccgctctggacacactctccgagggtattgttcaggatgccttggacaaggctgctgccggccgaacgaccatcactatcgcccaccgactgtctactgtcatcgatgccaagaagatccttgtcatgggccaaggcgagatccttgagcagggaactcataacgagcttctcgcctctgatgggtcgtatgccaagctagtccttgctcaaaagctcgcagctgcggacgaggaagaggatggtgaggctgatacaaccgggtcctctactcttgagaagggttctgcctctcctctagagaaagagcaaaacgagaaaccccttggactccagcgaagccataccggaggacagtctgtatcatctcaagtgttggctaacaagcgggaagagagaacaaggagtgtcaaaattctgccctaccgaacgattcttgctcgacttgcggtgatcaacaggggtcacaaatggttttacgtcattggattcatctgttccatcctgagtggttgtgtctatcccgcgttcggtatcttgtacggtcaggcgctcaacaacttcagtgccgactcaaacaagaagattcgcgacacctcttaccgaaccgccctctggttctttatcatggccattctatccggtattatcatcgcagctcagaactacaccttggtccatgcttcggaagggctcacaggaaaaatccgttcaatgtcgttcaaggcgatcttgcgatctgacattgcctggtttgatgaggaaaagaactcgactggtgctctcacctcttccctctctgataacgcccagaaagtcaacggacttgctggtacgacgctcggaacaattattcagtcgatcgctacaattatcagtggatgcatcattggtctgatttacggttggaagttggctcttattggaatcgcctggtgagtagctcgacaccttcgagtttttcttttgccgttgtcatatcactcatctcgatatgtttttagtattcccttgatcatctccgcgggttatatccgacttcaaatcgtcgtactcaaggacgagaagaacaaagccttgcacgagagcagtgcccaattggcttgcgagtcggcaggtgccatccgaacggtcgctagtctcaacagggaacaacaggcatgcgacgcctactcgcattctcttcttgagcctcttcaggcagccaagaagagtcttttagcttccaatgcattgtacgctgtgtcacaagccatgtctttgtgggttattgcgctcgtgttcttcattggaagtagatggatcgcagagtacgtatcaaagtgtttatacatccatcacatatctggttctcaacttggctaaaaccatgtcttcttttacacttcgaagcctttcatacacgactcagtctttcttcactacgtaagttcaaagttttgatgcaaagttgccaatttgtactgagcatttaaatattcacggccggcactgtctctagtcttatgagtgtggtattcggatgtatccaagccggaaatgtgagttttgtctacatcacgttgatatggagtctagccaccgtactgatttctttgttccttcttgttcaggttttctcttttgtgccagatatctcgcaagcccagtccgctgcctctaatttcctccacttgatcgattcccgccccgagatcgatgccgagtctacggaaggcaagatccttgatcgtgccaacgtcaaaggccacatccggttctcgaacatccacttccgataccctacccgaccaggcgttcgagtactgagagatcttgatcttgagattgagcctggaacgtattgtgcttttgttggtgcttctggttgtggaaagtcgacttctatccaactggcttgcagattctacgacccactgtgagtttttcacaatttgttttgtcaagccgcatggttcatttgtgattcgagtctgacctctgttgaatgactctagttccggagaagtcactcttgatggggtgcctctgcatgagctcaacgtcaacagtttccgatcgaacatcgctttagtgtctcaggagcctacgctatacgctggtaccatccggttcaacattcttttgggagcaaacaagcctcacgaggaggttactcaggaggagatcgaaagggcttgtgcaagcgccaatatcttggagtttatctcgacgctgcctgacggattcgacacccaggtcggaggaaagggagcccaattgagtggtggtcagaaacagcgaatcgccatcgcccgagcattaattcgaaacccaaaagtgctgcttctcgacgaagccactagtgcgcttgattctacgtctgagaaggtcgttcaagctgcgttggataatgccgcgaagggccgaactacgatcgctatcgctcatcggctgagcacgatccagaaggctgatcgaatctttttcttcaaggatggtcgagtgtctgaagcgggaactcatcaagaactcctcgctctgcagggaggctacgccgagcttgttcaaatgcagatgctctcgaaatcatcatgatcctgtagtttcgttttctttccttacctgggcacgttctatctcaatgatatgctctccctttttcttcccttttgtcacctctggtctcttggattattttttttacctcacgtttgattctgcttagactttttgttgaccagataatcagatcggcctttatattatactatcatactttcatctttctcgacgtcctgttgccagactgtattggatgattcattttttttttaaattgaatttctcattctggtttggtctacactgtcagcgcaatgagagcagacatggttatgcgagtctaccgacaatatcttttgattaagaatagtatagaattcttaagaagtaaacaaaaatgtcgaactgtgtaatattcatttgtcaatcttccgtttcgcatgcttacagaactcttcaatcctcgacacatacgtacctttacccatctcaacaaagctttctcttcaagttttccaagagccactatggttgtctccaagtacatggacgctgaagtgatttccatctttgtttcgcccgttgccgaacattctcttgtgttctgaatgaccgctactgattctgaatttaaccattgggtatctatcgtttttctccgtgtgcctggcttgattgtaaacaaaatggacgatatcatcttatcgaaaggatttagcagcacttataaaatctgaatcttcagctaccgttgagaagaaatacgcgatcgttgatgtgagagatagcgacttccgagtaagcatcctttttgccttacacgttctttctgggccatcaatgcggaatctcatcttttcgaggacatctgcatcaatccgttttcggaaacactttagggaggtaatattcctgggtgttttagacttccttcgagagaggcgaatgctgaaaagtacgcacagctagccgttgagttgaaggacaaggagcatgtcgtgtttcattgcgtcatgtcccaagttcggtgagttcccactttggcttcatctcccaactttatctatacattatttcccaaaaagacaatcacctacccctgaagaacaatgcagacaacaagaccatcagctgactgacaagatgttgtgttcgttgcctttggaattttatcagaggtccgaaggctgcaacgaggtacgccgaggcattggctaaagcctacccggaatcgaaacaagaggttcatatacttcgagaaggttttgctgggttccaaagcaaatatcgagtatgttctctttcttcttctttttcttctctttgttcattctttccttcgacatgattgagtagactcggaacgagtgatacgctagattaaactgaatgccgaactgatggatcttcgatctcaaatgtctcgtttgaatctttcagaaagacccagaattagtagaaaagttcataaaagctgcctgggattgaaacggtcgttcatgaggtcctgttttcttgggttcaggaccaaccttttccttctttctcatctctttttagattatagatagacccaagatgtatatgtactctcccctcttctttttgttggaaacggtcgcatgaatagcttgagtgctcgcgtacaatcatgtccagctttaggtacttcaaaacttgccaaatttttacttttgttgatcgaaagaccgcacagtttgatggtgtcctggtttcatttatggaagaaagaagcaacaaaaaggacaactaatgcaagatgattgaggatgcagaagatgattatgaatgggatattgacggttgtatgaacattggaatttgtgagcaaagtgtagtatgcgcaagagcacgtaagggatgtatcgatgtataaagagatatgaaacggtttttaggagataggctaaaagaccgaagtataaaaattaaatttaggtcaaagaaagaaggaagggaaggaagagatgatgggttcaaactcgaccccaaaatcccttcagaagcaagtatcgagacgcgaacatgatagctgtaccagccaacacaaaacttccggtaaagccagctacggagagatacgatccggttttcgtcagaatgctgtttgataatttcataagggaatgaaaaaaataatcaaagatgacaaagaaagacgaattgtcaataaaggttgtttgtttggacaacgagtgattgaagcgaattgaaaaaaaaaccaaagagacgtacgctccagagatgggcggtccaatcaaagcagcgagagatagacaagtggtcaacgttcccattcgacgcccaatgtcgaatgtctctccaagttgagccacaccgggactgaatagagaaacgaaggagccacagaagatccctactcataacgaagaggaaagaaaagatcaatgaaaactaattaaacactaggaaagagaaagaaagtcaggtaagaaccgaacggaccatagatgatagcgaatgcgatcaatgcgcctttcgtagtacaatacggccaggcaaacatctatgtccatcaaacaaatccaccagattaagatttatcttctcactttttctctgtactggacaaagagagctaagaaggaacaggcaaactcaccagacaaccggccagcatagaagcaggggccagcaggttgattggtccgaccttatctgcaaagaacccagggacaagtcttccgataacactcgatgcgttagagatggagatcaggtaagtcgagaaatttcctaatccttgggatcgacccatgacatctagcagtccgaggagaaaagaaaaagctgattaattaggaaaccaaaagctgatagaaacgtcgatatcctgataaacaacgacgaaagaagggacatacccaaataagatagaggagtgtagagcccaaccatgatcagccagcagcctaagacatatagactacaagacagtgttcaagttagtatctcagagtctttaccgatcgatgtaaaggggaggacttgcctgaaagcgggccgtttgaatgctgcgaaattaaatatccctccagacatgttcttaggtggtaatctaggtctcaatgtctgatcccaccgggataaacgttttgcatcagtggtagatacattcagttaaaacatagagtcagtaagatggcttccaatgaaatcgatgaaaagcaaggagacagactaacgagccaagcaaatccaatggaaaccatgatgatgaaaccacaaactctcaatgtccatttgaaaccaatcagaggaatacactgccggatcaagattgggtaagctgttcctccgatactcgatccacaggcaacgacaccgtaggccaacgatcgccgcttattgaaccagtgggataggatagcgagcgcaggtccaaacaagacaccggcggagagaccctgatagttgccagccgattatgccatgggtgccgcatattggatcggcaagaagaagaaaggtcagtttcaggcaacgaacgtgaattgcgagaataaacaggctgtgtgtagataaaatatggagagagaggaacgaacaagtaaaataccttgacagagcaaggcctgatagtattcatgcgtttctgcaatgagaaagacgctaacgacgtaaagaacacatcctatagtgaacggcacaaagtgcttcccgatgtccatcagacgacccatgatgaccgctggaaggaagatcagacagtactgtggcgacaaggttagagacgtgacgatggcaaacaagcatgcaggtcataccaagcaatgtatgcgatcagtctacttgatccggatacagcgcgatacatacatactgacactcacctgggcggaaccaacccacgcgattgctgaggatgtttggttagataggtttattgattgataatactcctgaatagtgaaagaaatttccaaaacgactggtcagaaaagactctttacttgcggtcttagcagcctgcaatagatcatggtgcaatacatcaagacatacttgaaagactccccacgagtttgtgaaaccaaaggtcgacatcgtgcacataagagctccggcgacagcgagccaggcccttagacccccatctggaaaggtcaggacttcaccatccgaacactcttcctttgagatttcaggtaagttgtcgtccagctccgtcgtatcaaattgggcctcttccggtttgcccttgacttcgggctcgatctctgcagacgagaaaccgacctcatggataggttttttgcagggatcggccagggtgtggcaagtaaccgaagaagcggtccggattggagaagaatgaaccgaggaggaagagcaagagaaagctgcaggcggatcatcggagggacggaaagacatgttgaaaaatcgtgaaggtatgctattctcttcccttctttctctcctctgtcttttcctatgatttcttcctttccctctaccttgacagacttatattctgatggtgttagtataccggaccgtggaacgacgagtgaagaaggatgctggttaagaaaatcaacttgtttagtcacaaggttcgaatttccaccgcttactgacgggcctgataggagaactccggtgacatccggccgaaaatgcatgtaatccggcggaggaaagtgatcatcggcattacccgctcgatgccatcaggtcaactagcctttcattcataagcttcatcttgagcagtcgaactttcatgtgtgtacactatttgagtaaaaaggagacagtgtttcatatggaacacgaggtgcatagagacatcaataaatcgaaacgcaagacatttctcaattgatcaagccacaggcatgcctcgggcgacttttgaaaagatctagaaacccggaaaagagatcatgccgaaagagaaagaatcagtctttgatggaagaacaaaacacttctatgactcagtcgtacctcggtgaacactgctggctcctgggcaccagaaacggcgtatttgttgtcgattaccgtaaacggcacacccgagattcccatcgtcgacgatttcagcacctcctgctgaacctctttcaacaattcatcagactctaagaatcgaagggcctaaggaaaaaaaatgtcgaacccagatgagaagagagtattagaaccgttgagggagaagagaaagccgatcggtgagcgtcacatgatacacaaaacatacctcttccgtggtctcaaagaccttggaggccacagcttcttgagcaagccaagcgtggtcttctacgtttttctcattttcaaaataaccctacagagagaatagagagaaacggccgaccaacataatactgtcaatggtgggtctacaatcattgagagaaagcaagcagatcgcatggatctctatgattgtaccttgaagattcgattgataaggtcgagctgcatatcctgtccatttttaagatatgccttactgatgagtcggtgggagctggtcgtttgactgatatctccaccatatgagcttgattgccagaatgtcagatgtcaaacatgtttgttagtgaaagccttgaggaagcaaataatgaagaaagtgaacgtatgagcaaagagaacatacaagttgattccacattccttgcctttgtccttcatcattttgatcatgccatccactcgttcggctgagccaaacttctcgatatatacacctcgcttgttctttggactctttgatgcatttggatcaagtaagaatggatggaacctatggatcacgggaaaaaagagaagaagaagcgatggttcaataacctgaggaagaaggctcaacagaaaaaaacataacaagggatgaaggaaaaagaactcaactggatagaaaagtcaacatccgggctatcggctttgactttctcgatcgcctgctcgatcttccgaaatccgctacacgacaaaaagggaagaacagagcctagagaatcagtttcttcaactgcttgatagatatatgatcgtgttgagcttacagactgatgtaaaacgattacgagaggagcatgggaagtgattagtcagagatataaatttgggcatagaccaaacagaaagatcgactgactagcagaacggacagacggctgtgtgcgttttgatagatccgaatcaagaactcaagacgacatcagcatttggccttcgtgaactgatgggtcgatcatgcagagtagaaagaagaaagaagaaagaagaaaaacgatgaataagaacaacttatgatgactaacagtctgaggtgatatctagct

SEQ ID NO: 2236 - DNA, 69455 bp, Xanthophyllomyces dendrorhous
ggttctggctgtatgaaaactagcgtgatagatagatcttgctctaaagcggagagaggtgaggcgatggaaggcaagaatgatggcgatgtttgaaaggttgttaaaaagattgtcgaggtgattgtcaagatgatttttgggatgagagtttatatactagacatcatcggtcgaatggatgagaacaccgagattagataagaactttttagctgagtcagcctccacgtcggaccaagccttcttcatacccgtcttcctacacacaactccgttgacgattcaaccttcatcatccatcctccattcttttggttctgtcatgtcgaatagctcatcctcagaatcactcaacactcaaatacttcatatcaagggttcggtcgaatgctcacatccagcttgccatcttcatgatttccttccgataaaggttcgtctgggctgctttgtattcccacgttgccaccacacaagctcgtgctgatacactatttgtcatacgtttacctcgttgaatcaaaacaaaataaagtgtcccggatgtctccttctgttctgcactcctcatcactctcccttccattcgtccacctcgggtcatccttgctcgtccccaccacccgaccgtacaccgattccttgtccgctttgccagcttccgatcagcacaaatccaggtgaggatccgaacgttcggatggatgttcatatgggcagtaaagagtgcagcgagaatatacttcagaagggaagagccgagaaagagattatcaggtcaagaaaagagaggggcgagctttgcttcaataaaggttgcaagaagacggttcagggtgggttgggcgtcaaatgcgaggttagtcttgtctttgtggtcttcttctttttttctttttctttttctttatccaaccactttccatgctcaccggttccaaattccttcccattaaatctgaagacttgtaaaagatcatattgccacccacatcgattcccttcctctcactcgtgttctactatcgtgcctcaggcagcacagaaacttccgtcaaacacccgatcgatccttggaggtccatctcgagaagccgcgctggcagccatcaagcgggctaacctatccggaaaaacaagttcgaagccttcgtctacgccgaaaccggtgattgttcaaaaaccggatccgaagccattgtcatcaaaagaaaaggacgtcaacccgaacgagcagaaaaccaaaataaagccaataacaaacccgttgagcgctacctcaaggtaaacacactaattcctctttctttcttgcattccttcgttcatcgttttgcacgcgaccggcttggaattactgttcgtctattccttgttcgatggttgtcctctgcatatgcaacaggcaaaaatcgagttgcaaccttgaatcttactggatgtttgcttctgtttcccgactcttcaccaggcatacaaaggcagaatcttcctctcgacgtcaggctctcgctaacagggctcgactaggaatcctcaacgaggaggaaaagctgatgtgggcggaaatggtcggtcaagaagagcgggaccggcgcaaatctggcggaaagtcgaaggaaaagggatgcgttgtatgctgaggggaatagatgagatgtcaatacagagctcttgtgaatgtagatgtataccctgcttgttcgcttgctttccatgtctctggtatatgtacttgcgaatatcccggctcaaccttcctggttacactcatggttacacacacgtgtccaaatcgtcatcactccgactgtcccgtccccaaaagcttcgcttggccaatgacttcttattcattcaactatctaccaactacgatctcatcaagacacaatcagtcttccacgctcgatacatacacatacacactcattcatacttacctaagctgacatggcgttcacaacgcttctcttccagtcgcttgccatggggatatcatctttcctagtcggattggtcccaatgctcctcggttcgacaaacggttaggcaggttcttgatactcgtgttcatggagtggttgaaggacaaagatattgatatcacaaatacgacctcatgtcgtttctttgtatccatcgagacatgtaggtaaacgactgaggttcttgtcggtttacggaatgggattgctggtcggcgcggcgttgagtgttgtcatcccagagtatgttatcagtctgtctcagcccggcctcgcacaagatagtatggacggaagctttgtgggctgaagctcttcattgtttacacacgtactctactgttcggttgactggctgaacgaaccttcttttcgtgcccatagaggagtatcaacaatatatgacgcaacatcgcttgtgtctgctaccgtaggagatcacgatggagatgacaccgtcgaaggtcagagtcaggtcatcggaatgtctctcttaggaggcttcatccttatgatgatgtaagctgtgaaccctgtaaccttcttcaacacccagttatgaatcgagacacctgacacctcgttttcattattgcgtttgtgtggttctggcgtgttatattcagagtcgagaaagtgtctcactctctgaccacccgatctgctcaaaactcccatgcatacacaccagtacccccgaacgtacgtcagtcgtcctcttctccactcattttacctccatcacgtccgccaacttggcaccgactttcgcaccgggcatcgaaccatgacctacaattaaatcagcaggtacccgaagatgacaggtttgatgaagaagtggatgaagccttgatgtctcaggcatcgagctcgccaagaagactatcaggtaccgctgttctaggaggacccagtttgggagggtcagggtccacaggaaacgagaaatctggtctcgtcaggctagttatgagggatcacccaaagagtttttcggcaacgcttgctttggtcattcatagtctcgctgacggagttgcgttgggagcaagcgcaaggagttctcaagccggaagtggtcttgggctcgttatttttgccgctatctttgttcacaagagtaagtgtcttcatatttcttcagcaatcctaatccacaagctcacctgaggttcctttggtgtcaatgctctttcttctccgtttcatagttccggcatccgttggattatgtacaaccctcctctccgatcacctccctcggccactcatccggacatgcattgccctcttcgcttccgccgctcctctcggagcgtttctcacctacactttagtcactcaaatttcaaaaggagaagatgacgttgcctctttgacatactggaccggagtgcttctcttaatatcaggtgggacgttcttatacgtcgctaccgtcatacaagatctcagccatggacattcccacgaaacatttcaagcagagggccaaacacagacagggacaggagcaggagatgatggaaacttatcaaatccggggacggaagagctgggctctatggcagcgcttgcgacgattgttttcggaatggtcactccccttttgttgtcacagatgagagaatgagaccaggatgtgttattcctttttctatttcgttatccctctttttcctctccaaaacaatttaaattaatttatcaccctttgggattttagatagtgcacttttttgtgatactctagtcaagtgatacattctttctaacttgaaggtcttctgtttttctaaaacatctgctcgcgatcctatacctttggccttaagcgaggtatttcttgaaccaagcaaacgttgcttccgcacttgccaactctgccttcacaccatccaatgcatgtccttcgcctttgaaaacgaggcattcaaccgcaagttccggaatccgatcttcttccaacaatgtacgattataggtcttgatttgatgggatcttgatcgtagggcgtggtaccatccctgttgtgtttatcatgtgttcacaaaaatgatcagtcctctgtgctgacgagttgtatttcctggaagaaaaaagggaaataacaggaaaaatacgagccttggtctgactaggaggaactctttgatccgagtcacccatcaagatcaaactaggcgctttgacattgtgcgcgttcccgatcggagatctcgattgaaggaatttgtactggtcgactgtaggcgtcgtctgtggtcgatcgtctttggaggagagagagaacgggagacctagctcggcgtagacccttaatttccgtttcggttccgaagttttccgttacaaggtggattgatcaattgtgaagagatgttttcggcgttagggatatcttttaagcgtataggtaaacaatgaatcgaaaataggcctcaccagtctggtatatcagatgtacccgcattctcgccaaggctgattacagggtttcggaggatcgccgcatgaaacgcgtccggatactttgaagtcagatgagcagtgaggaacctaattcagatgcgaaacgagcatgtttggttatgtattaagaggatacagaaagagtgcttgtgttgaagatcagacataccctccatgagaaccgcccatgataccgctatcctcaaaacaggaagaagttgcatcgtcagacaaaacaacgtgttggaatgaccaactagttgatggatggactcacatctttggctttgtttctccttccgcctgtgcatctcctaacatcctctcgacagcctcccaacaatctcgtatatccatctgtccacattcccccaccaacgcttgtgcccacttctctccgtagcctagactaccggtataattcaccaaataaatttcgtacccttcttggacaagcgcagctgctaaagggctgaaggccgtggtagtggttgagtgaggtcctccatgaatgctcaagagtcttattcctgaagactgagttgagttagatgaaggtcggaatctaatcgtttctactgggtgggtaagtttgataatgtccacacgggctatcatcaccaaagaacaaaatcgtaaaagtatcatacttggtcagaccatcgcacacatcattcacgagaaagaaaagatctctagatgaaagctcaccgtcactgtccagtttgaaaccaccttctacaccattcaagatctggagttctaaatcaccctcatcatcaggcgttatctgtccgaccacaacctcttgtgggtccatcagcccgctacggaccaaacacacccttgtttctgcgtcggtacctaaaaccgaccagctgttcaatccctctcttgtcaactcgacagggttggatcgaatgcctttgcctgacacgtccagtgggattgcatatacagtcgacctggaccgcttgatagacgtcaacacaataaacggctcgttcgtattcaagaacgggaaagcaggtaaagcctggacataaagacctgggaaggcgtcttttgactctggatcccatacaggaccgacaagaacatcatcatcgtcacgctcttctttttcggtcttgctaatcagagagaggttacttaagtgctgaaggtgcagggaggcgcatgagttatgagcaccaccaagtgggttggataggtacaccaaaatatctggtttgttcacttttgatcgatccaatactctaggcgatcgcgcacttcggtctgacccagagatccgggtcatatctgatagagaagcgccttcgtaggttgaagtcagagatcccgaagatggaggaggaggaacagggatggtccagatctctgctcgtctgttcgtgcaatagacgatcccgagccttcgaccgtcttccattgttccataccctgtagccagcactagctttctttctccattcatcatggccaacactggttgaccaaaggagattgtctcatccaaagaagcgctcacaaccgggacaacgttgagagatatttctgtctttggtgagatattcgctgaacagtagaagatcgtggggaatgtgttcttggcgttcagttctccccaggtgggcgtgaacttatgttgatcaaatggagacagatcggatgtttgggaaggtgagagtctatgagcggtaaagacgagagaaaggatgcctgtgtctgtttgagtttcgtcgtaatacagtcttggaggcccccaggtttctgatatgattcagtccattgaacccacgtacggtcagctaataacttggcgagcaacaagcgagagagtgcttgacaagaaaaaaagaaaaaaatagggaactaaccgtctgataggaagtcaccacagatatccgtgagaatcctctcagcattcctcctacctgtccgaacatcccaaagctccaaaaccctcctctcctttccgtctaccgtgtcgactttgaagcacgccctccagaacccatcgtccgagaatatttctatcgtccctttcggaagatcgacacttggaacgttcagccccttgctggactcgaatggcacttgtaccgtcttgacttgggtaattcgggtgttgtacacgtgggaacgtacttgagtcgttagatggagataatcgggggtgaagaattggccagacttgaacgttgggagttcagctaggagtttgtaggccgatagattaggtcgaggctcgctgtccatggttgcaaaagatgtaattcaacctttaaaaggcgtgttcgttggagaatcgttgaacgagcaggcgatggttaaaagtagaagagaagatgaaggatgttgtgcacagatgaagatccacgctggccattcttcggtcatctccgtctttccctgcctgactccgcttgacgacgatctaacctctgacgactctttcagtctcaaatgattagagtcgagtaagaactaccaagcaataaggtttacttttgacagaaaggatcgagtgaccaggagactcttggatagtcggtatattagaatgtaggaaagaagaaaagcaaaggataaaactgaatcatgaaaaagatcaggaggaacgagtgggatttgtagaacaaaaacgtgggaataaacttcgtcaaacgaatggctacaaataagggaaagaagaagttggaaaaaggttcgtttatagaatcagaggcgtttgatgctaaaaaggagaaagaatctggtgtaggccgatgcgttcgagattggcaggagagatatgaggaaattgaaagagagggaaaagcgatgatgaagtccattggtctagaaatcggttagaagaaaaaaagaacgggaaaacaaaaacggaggaaacaagggtatgtgtttacgatacatgggatgaaagagaagcaaaaagaagaacaggaaggagaggagaaagcagtcgtcaggagagagggatagaatatcaccaagggaagcaatcgaggggcatgtagccacatcttaagcgtttctcggtcgaccggtgaatcctccgagttcgacgtcctctcttgaggaataacccgcgccggtaagtttctctcgttcgttctggtcttgaagggcctgggtggctgtggccgggtcggcgatacctgtccgagtaccccaaccggtctgtaagaggaaagataacgcaatgcataagaaaagctctggatcatgccaaacgagaaatgtacagatagagacacacctcgtgtaacgtgaacacggcgtagatcttcatgatcgcgctatgaagcaggacatagaaaggaaatgacaaggatgagttcaaggtcaggtcatttagaaagaagatttgcaaaggagatcggacaacgacgtacaagtaataaccgaacagaatccaagcaggaacataaatagcgtcttgaggtcggtaccacaaatgaggaagcagcttgagacttcgagtagctgttagccaaacaatatactgaatcgtccggtatgaagagaaagtaaagagacgatcagaagatcagcgatagaaatctaaacgcgtaagaactcaagaagcttcacgaacagacacaatgatgttcctgttcaagagatgaaacccaagattgaagtccacatggtcagtcttcgaagatgacacaaaggaaaggataaggagaggaaaaaaacttaccaggctggcagatgatatcctccatcttcagtattcttagtactcttgacgatgatgacgattaccagacaaggtcccagaagcaatgtcaacggattgatgaacttgtcgatcatagtataagcgacgtaaggatgttttgtccaaatataacgctccgtgaagatcgacctgaagtctgaccgccaggtgtttctcgtccatctcaatacttgcttgaggaatcgccaattaggtttcatcgtggaaagtaattctgcttctttgcaagcctggatgtacgtgttccaaccatgggaaaccatccacctggtgaggaacttgtcgtctcccgagttcaaatggtatttccctaaccaaagatcgttggtgaacccatggagaaactctggatccttcagaatgactgttcgataagcggccgtcctaccagataaacatggtactccaccatcgatatgggtcgaagcagagatctctatgttcctaatcgtcaacctgaaagccgccagaacctcccacattgtcatcttgttacccaccggttggaccctctgggacgtcccgactccaccaacctgttggtcttcgaaacaggccaacacataaggcaacaaagttgggggccagatcgcatcgtcatctgcaaacaagatgatgtccgtcgtgcagttcctgatcccatgagacatttgcaaacgcttgttcgcaaacgggaccgttaaaaccttgattttctccggattgacctcgttcgccaaatcctgcaaaggtcctctcatagattcctcggtgatgatcaagatctctttcggatttccgacgagccaagagtgggcagcttctttgaattcttcaccagcatcgatggtgggtacaatgatagtgacgtcttcggaggcaacgtacgtcgggttttcaggtaatgggatcggagaatacgtccatgtagcgatcagtcggatcatgtaccataggtaccggtagaaactattcaaacaacgtgtcagagaatacaacgagcatgatagtataagtaaaataacatttgcaaaggtgcgaaccaatcgaaccagatcaaagtatgccaacggcacaatggagaacagaatgaaaaggaaaggaacacttacccaataacaccgaatggaacgactgaaagatgatacagacagacgaagaatccaaaattaggcgaatgaaacaaaaggttgagtaaacataagcagaaacagaagtaaatacagaagagagtaagaagaactcgagtgaaacttgcaggaaggatagaaagtaaggaggtgacttacacactggaaagtcatctgcagtcaggtacctgccaccaagaggaaaatcaacattttcaaacattcgtcagtctatccagtcatcacctcaatgacgagagaggagagagccaacagggcagcaggacttgagaagaccaaggtagactctcaaagaaacttgacatccacaacacgacgagggtgacgataaagatcatgcggaacacctgcatactgcaacagaagaaaacaagaaggaatagactcacaacatcgtttatcgactgtcggattttcagaattgtgaaagaacgtggaaaagaacaatagaagaggaagagaacaggaacgaatggatagaatagagaagaaaagacggtgggagccgaaagacagaggcagagacgaaacaataaggtcctttttggcctgcctagaagataggaccacggagcagctatgtatgagagtgagagctcggacgaggtatccttgcgatgacgaccggatcaagagtggcaagatcaggattctcttctgtgttaacgatcctctaagcgagtgcgagctacgaggatgagggtgagggtgaggatgtaggtgaaggtgaaggtgtcaaagacagaatagagtcggataggtcgaggaaaaaatcgaaaatcgaaaatcgccaaaacaagacactgcgggcgtgtgtttactcatattcatacagttatcaggcttgatcgtctacaatatgactatattacaccatccttcagaccttatgtacttcttttctccgtgttcaaacgtttctcttccgttcctctttcccaccatccttttcgaggccagtagctctccaaccacctagcgatccgttcaacggcctataaaatgtgtacaaatcatatgttttcgatccgtcagttcttgaacccatgcgcttggggaatccgcacagtaatgcactagatcaaactgacttcgtcttgttgccatagaacaccttcgacatcatcattcaataccaagctagactgatgaccggaaaagagagaaatgtttcagaaaaaaaatcagtcagaccagtcataacaatgagaggtagcatgaagcagaaaacggaaagtcgaccagctataaattagattaagaacgcacgacaggatgagcctccattcgctcagctagtgcatccatctcttcggtgaaatgaatcatgccgaactctgatgagaccttgcctattaatcaagaacggaaaaaatgggtactttgcattcagctttgtctgtctttatcgatttgcaaggggcaactgtccgggagacaacgagagaggcttaccttggctatattgatatctggccaacaatctcagacaccacgtccttacatcaatctctatcggtttatccatctccggctctgtatctgcttctgtctctgtatctgcttctgtctccatatctgcctctatctccatatctgcgctagaacgtatctctgtccgcagtttgggcgatgatgatgattgcataacggcttgaagagaaaagtcggtagacctaaaagtctttgtgaggggcatcattggttgggagtcttcgtttaagagatagcttgaagaggccaacacaaagcctggcgaaggaagtagtgccgatagacctttctctccggaggcggagatgacagccgagaggactgtcacggaaagtaggaaaaagacgctaagaattagagatttgcacacatgagcggcgggaggaaagatggaaaggggggggaggaggaggaggaaaacacactcactacagtcaccacattcgggatgatcgaaagcaatccgtttgaacatgccgactgccgatctagaggagccttcagtcctccagaatgaaccaaaacaggtgtctaatcggatgttgcagtgttcaagctcgttctcgctcattggtctagctccgttcaagctggctatagaggggtaagaggacaagagaaatagtcagcacaatcagatacacactcgatcgataaggcaaaagtaagaaggactgactgaaagttaaagtggcactctccatcttcggagatcccattttgaccaagacgtcttctacggccttcttttctaggtaattcttccttttcgctgaaagtctctcgaccggaaccacaagatctttatctggccgataggaggagagacccaaaagggaatgtatctctgcacgttctggttctgaccacagttcgttggatgaacctagtctggcgacagcccatgtccatagcatcgattctcgagctctttccacctgattcaatgtcgctaaccagactgtagataccaagggatttgattggatgagctattagaaagcatgcagaaaagggatgctaagaaaccccactcaccaggatgaagatcaccggtctttggtccgtttggatctgaggagccctgtatctctctaaatcgtctggaagaagaatttttcaagtcggcagcatagatcgttgacatctcatccatcatggctgtcgagactcctttgggaatatgtcctagaggaactctaggtcgttttccaaatcgttgggcttgatgtaggagtgaagggaaatggtttagagaaagctgagctagagcttgaaaatatggaaaagagcactcacacagcaaccagttcgacctaaggatagcagatcgttcaattacacaagcgaccggtgggaactcaacctgagtgggggtgccaagagtaggaaagaaggatcagataggggaaaagacatctgactcgtatcagcgcctttcctctccgcacccgggaaggaaaaacagacatacatcgggtgagataggttgtttgtcgagtcggaggattggtccataagctggagatacccaatccgagatagagtgctgtaaaagggtcatgatgtcagtaaacaaaaaagagtaagagcaaccgtaatattgaaggcagaagacggacactttggcctaggaagaaatcatcattaaggtatatccaatgagacgcaagcccgggaatgttggctagatgactctctatagagaaactattgaaggtgggcaaggcctgtttggtgaacgcttgtgcgccgatgatgtcgtccggatcgagagttcggtctcgaaagagttgggaatgatgatgaactttgatcgttagcccgtcgacttgaacaccaatcagtcccaaccaatacggaatctgtccgatcctgtgcccttcttcgagatcttcgcctaagccttcgacgtcccagtcgctgagaacaatgtggaatgttctgatccttttgttcatctgctcgaagaccgaacggaaggaatgttggagttcacccttgtttcggtagtgtctgagtgggggtggaccccatcctttgggtaagtcgcttatcgcgccatattttgagaattcttcatgccacatcgggtcggagctgagaaacgaggctggatgagacaagagacaagactgaagaggcaccccgaaggagaaagaaagaaggtttctcacccattaacccaggtccaaacgacatccagctcaggctgagagacgtcttctgcctcacaaggctctcctcttgcgagccaactctcgagacattcatctgataaaattggaacctggccgatagagggcgaacttgatggttgttgtggcttgaatatagcataagtttccttgttctctctgtatcaaagtcacaggcaatgtgggtgagtatgcggccaggggagcaacaaaagattagggtctcacagtagaacggtctgtagatctgattgatagctctcagtggggctgtgagagccgatgatgatctgacccagatgacggagggaccgtccgtccgaattaccagccagatggacaagcccggccgtgcagatagtaaggagaacgagagtagctagtaacttgatcagtctttgcttaggcaattgacgttggcctgactgtatatttgtctgtggcaagatcgggttgaccctgataccaaataccatggttgagatcctgaaaacgagaacgaagaaagaacgagactttcaagagaagaatcatttttcctcaataagaaagagtggagaaagaggagcgtgtgagcattcaacacattggaactgcctttgtcttcggcacgatctctcgagctttctccatttctgccgtatctataacatgatttttgagtgatcgtcgttgaacactgcgggtcgtttcaatatttgtcttggttgaatggcagtcttgttgaatgtactcagagttcagcgcattagcatacattctgctaatcagatggacgatcaaaatgtattttcccgcattatttttccgccgcagcagaaattaacatatatacgtcaccggcgcagaagttcctgcttggctttgggatcggagccgagccaggccgcgggtccgcagcaagggccggctgagttgtaagagcttggagataaaaagggataaaacaaatgaagtgaacagaggacgcatctagttagtatgttcagagtgggactttagtactagaatgagaatcagggtgagagcacagccaagagagatagcgatagtaggagtcgaacaaaacaatgcaaaatacacgtggatatgagggtcgtacgaccatatcgagttgtatagtcgggaatcagaatcacaaacttagttcatttcattgcatagccatcatcggagattgatcctggttctcactctttgtgaataacgaaagtggtttactcctggtacactatcggggcactctagatctggttgtgacacatgtggcctttgatcgtgttgagaaaccttagccttcatctatcacgaccagcagcatctttccagaatctctctttctctgctaatggtcaactcaaactttcctatttcctctccctcgcgacatgggttccaacctgagtcctcgtagtcacttaatagactctctctctctttccggccatctttcctcgttcatatatgtttcgaactaaaaaggatcatatcttctgacaaaatcaagctatccatcctgtcgacggaatcgcaagagaaaaagaccaatcttatttccttcgtctcgatcaccgctcctttgtcgtaagaggccagaaggaggttctagtagggttgacggcaaggcgcacgtgacctaaaactcgccacaatatctcaacagctgtgcatacctcacccgccatacagccccatcttctgtgtcatcatcatcgttatccattcccatcgcataactcaccgttgcttgttcttcatcaaccttaagcttcgctttcgtatacaatttacaccgaccctgttcatcgttatgttcgcaaatatctctcatgctgacaagctgtaagtaatcttgatttctcgtgtgtaaagtcctacattgcaccgcttgtcattgcttactttcgctcgaatactttctctttcaaagcgcggttttcgctctgttcgtttcccttccctcttatcatcttttgatttctcctcgatcgattccttagcattttttgctcttctactgatgaaatctgaccattcttcggacatcatgaacgacaccttaggctggacgagtatgcaacctttctgtcgcttaccttccacgcttacctttcacgcttcaaacaacctttgacttaatttttctatcacctccttctacagatactttgaatcccgcccacatcttgcgcctcaacaaccttcaacaacgtctcagtcggtcaacgtgcccataccgagtcgttcacagatatcttctgggctcacggcggttcagtctcacctgaaccgatcgtctggcccggtttcctcgtccaccacaaccagcaccacgactaccactaacggtgcttcctctccctgggcttcagcccttagtaacaaacacgttcaaggcatggtcggcaaagctcttggctcttctccttcctcgcctgctgccacgtcgagcaatgcaaaatcgccgccgcctccacctgcacaaagttcaaaaacacgggccgccggttcagcaggtctcgtccagagcaagacgtttggtcatgtcgatacgtcttctggtctaggtgcttttaagacgatgtttaaagatcctcaggctgctcgttagtctcttggccctttgctacttttacttcgtccgctctctttgtcgtctcgctgaatctgtgattggtttctaaattttgtgatgtgaacgatgtagcgaaaccttacgaaccaccagcaaggacatccccagcgagttcactccctccgccacctactagaagggtcatccagccggaaccagagccggaacaagaacctgaggcggaaagtgatcaagatggggactatgctgagggttcgtcttctcttcttcttcaaatttctttgctctttcatggctgttttcttatatctatcaactaactggcttgtgtgactggatttattcgattgattcagcgctatatgatttcgccggcaacgtatgtacctcctccttcttcctaagtttttttcttccttttcttttcaaataaaacccaagaaagaatcccaaaagagaaactcactcgaagtcttcgatcattctgctccttcctaacgtttggttcactatccaaaggaacctggagatcttcctctacaaagaaaacaggtggttctggtgctcgagaagacatcacccgattggtggaaagcaagagatgctcagacgggtcaagaggggctgattccggctgcctatgtcaaagagatctgaaagattcgatatctcgcatgtgttacatcttctcctctttactttaatttctgtgtgcgtttcttttctttcctcgtgcccttctcgcctgccctcgctttcttaggcgaacgtggacggagcgcagaacggtcgacgaggaaaataaggaggttgggtcaagcaaagcggtgcaacttctcgtctattcgttcaaagtagtaacaggggcccttgtctgtctgcatatcatgtcttgtcacgttgttcatcatcgattattcatagactattgtccgttgcccagcatccatctgcaaatgttccctgaacttctcggtagagacacatatgagaaaatgaatgctgagggagttggaatttcaatctaaagcgtacgaaaagaagaatatgaatctatcttctacaacaaaggctcggttcaagaggaaaagggggccgaagtaaataaagacaaaaataaatgaaaaaacaaaacgaccagatgaatcggaaacctcatagtcatgtatgcaacgtgaactaaacgtacatctctattcgctcgtacatagtgttatatagcatacttctcttttttgttcttttgtttttacccaataaaatttccatctgtattatacatgtaaaagagaaaaaatctaactcgatatagagacttctttgaagcaatggaaacaagtaagcctcagcatcactctaatctagtgatccaatactcgcgttcgcgttcgcgcctgtatcaataattggagtttcttctccctcctacccccttgtataccctgctccgcaagacgaacgggggttgagaaacgaagaggatgggtgaggatatgactccaggtccctctccgccttctttctttaaaaaccttggtgaaagtaaactacagataggcaggaagggagaaaagagaaagaaaaactcggcgatccaaaagtggaagaacagacaataagatgtggagtggcgtggcaaggggtccggcgggtcgagggttctttacagaactgcaagatggaagaaatacagaggccgggttttacgcaaccagcatggcttgccagccggctgcaccgtcacctactcctctaaacgttctctttgtttcattccctttggtctcctcgttttctggtctccaaacctgaccttcaatcaaaatttcttcttctcctaaagcatctctcattcgaggaggcgtgtggctccaagcgccttctgcgaatattccgctgttcgttctcgaaatcaattcaccgaggataggcggcgaagggtctggcgagatcattagcggacgtcgctgggaggagacatccagattgaacgctgccggcttaagaccaactgacttcttcgtaggcagcacgaatggatcggccggtgatgctcgggagccagccaccgtcgacgcattcttcgtgccgtgaggacaatcgtgttcacctggaaatcggaagcctatcgtgcaagagtagagcgagtaagaggtttaattagccctgttcctgggcgattgagggcaaaacaatcgacacacctggaacgggaagtggcggcggagggatcgagtggttgtaatcgatctttacgagcatctcctgggcaaactctgggtgcggatctaccgagatgacatcctgattggggggggatgaatcgagccagttggagtgaaggagatgatggtgagtcagtctgaaagatacaagaattgccaacacaagcgggggcccacgaaacgttcgccttggagcgagctgtgagcaaataaaaagaagaagacgtacgtccatctcgagtagggagattgcagcattgaaatctttttccgaagcctttgggaactttctttctagtaatgtccatgtagattcctgtgggtgcgagagaaaggcgtgagtctccagtcaggctgacggtgtctcgaggacaagggaaacaaaagatcatacggacctgaccggggctaaataacaggtgtatatgaatatgggcagccaagttttctttcatgctgagcatcgatgtgaatggaacaagtgtgttatcttcagtcgacctatcttcgccgttcatgggccttcaggtaggagtaggcttggatggtagttggaaggaagaaaggagaggagagctcgagggaatgggccgaaggatggatgcccaacgttcgtcactatggcgggcaacaccgggaacaatcgatagccgaggtggttacaatgcaggtggttacgattctttcttcctgttctttccctccgcttccttttcttttcaacttctccactggaaaggaagaaggatggatcagtgaatggatgtggatatgaatgtggaatgagggagcagtcgttgaaagagagagggcgcaaaggtcagagctccaaggcgagaaataatttctatccctgccggcggctcagggagataagcattttccagcctcggcggttttcatatcattcgaaattgctcactcctccccgatatttaccgtgaacgactcattttatacactctattcgatacattctctacagctcggatggatctcttaggcagcaccaatgaccacaatcattccttctttgcctagagagatttgccagccgtcgtttacaagcgacctcgctacggccggacggagaacacttcgtccgtgggccgaatggcttcctcggccggtgacgatcgaaaagtgagaggttgagcctgaagatgggaggagcagggagcagttagcccgatggttcggattcaaggccacgattaataatgaaagtagcgaaacttactcaagccagacgtccaccagacttggacacgttcgtgaaccacccggagagcttgataagccgtgagaccgtgaagatctatccaggtcggcgttactctgagaaataaaaaaccgataggacatcgagctagttagtttgataagagaaaagacaaagacactggagaaactcctaccgattagacatggcgagcttggctcgggcaacgtccagagcaagtcgccgggagacatcgtaataacgcctagcctgctccacatagtgacccgcgacttcccctcctctatttgatttgcttccactggtgaatagtcttgacgcttgcattaaagcctttgatggtgtgtggatgtaaagagtttaaatagagtatcaaaggaaacaagatggatcgatgatcagacatgagagaatcaaagaaaggcacatgacgtccccacttacctctttgcgtttctccaaagcttcaagttccttcctctttagagtttcataatctcctacgaatcctaatccaacatccgtttggttcatagccggcttggcctcaacagactggaacccaccagcagccacttgatcaagttttccaataggagcagccaatacgcttgccgcagtggtcctggtcctctgcgctcttgccttcgtaccctttgcaatcggcgatggcaaaggaaaggccgaaggactctctcctattacggccgtcgccctcgttggggagttcgatctcgatccgggggcagagcgaggcaacggtgaacttggccgactactcgaccagggcgcgctcccatttttcttcgaagcagtagatgcgaccaacggaaacgtcaacacgatcggcgccgtcggtgtcgatcctgttggttttgacttttgaacagcaggcttcgaaagaaccggctttgatttcttaatactcggtggtttggatactgcgggtgattcggaagcagctaccacgcttggtaatacctctatctgcttcctatccttgaccttctcctgttcctctcttgtttcactgcttgaccgccctcgagactgaggaggcttgtcgagagagactttaacgatagacctttgcttggaaccttccaggatcgtccacatgtccaccgcgcgttcgaaatctcccaaacagacctgccacaccttctcgattgccggccggttctggattccgtcttcaacatttttcccaatgtcatccgacgaaaacaagacgtccatgagaaactcaatccctggatattccatcggctcgagttcgcttagtattcgatcgattgagccgaggagtgcgctacgagctgtatcgtatgacggatcatgaagatacgaaacaaagaacgcaggagtcgcctgagggaaaggtgatagaagagacgacatcgtctgactcgtggtcgaaaagtcatcccatctgttgagaagcaccattttcttctttccgccaggttcagtccgaacggcggaagactttggtcgagtgattggcgaagcaagtggtacgactgtggccttcttttgttttgtcaagtctcctcgcgttgaacccaccaccgtcgttgccttggcctttttgttgactttcttcttgctaacaatagtaaagtcagaagcaaacgcgtccgcaaacatgggtgtcgagggtctcgacgttcccatcatccaactctcatctctttcttcttgcgtcatgaaatcccatgtagagactggcgcgttgtccatctcatactctagtccaagttcaagctcgcgctctaggtcgagctcgcgttcgagttcaagatcgagttcaccccaactaccgcgttcttcggcttcacggatagcttcgagcgacaataggttttctacaacttgtgacagatcatcggttggattttctgctagtgcttctgccaagtactcttctgagctatgtttctcgtagattggagtaagaacgaagtgtcatcaagcaaatagagcaagaaagacagaaactttacctagagggaaaccaagctttcaacaaccctaaaggcgtgttgtccttagggcttgcgctcgtgcgctccgagctttcatcagactttgtagatccgtctaggctccaaccgtccacgtcattcaccagctcgtctattccatactttcgagctgaatttcctgcgtccgattccgcgtccggatcgagatttgagtcggaagagagaatggtatctgaggctagcgcctgtagggtttctctaactggcaataaggacgtagggtctgtgtggtcgtgatcgtatgagatagttgctatcaactgatgaatgacagagcaagatctgtacgtcagtcatcatgccttcgaccaggaagagagtaggaacaacaagcgaaacaaacgaactgtaggtgatagaggcgggtgaaactcatcctgcacaaacctcaatgagccgtcaagcgttggatgtttagaccgatcacagaagatggatcgctaaattgaagccaagaagcgacagctgacgagagaaaggatggacgtacaataagagcctggacggtagggctgaaggacatggaagtcttggaatacctttgggtctgaagagcaatcagtcgtgaaaaagggtcgtcttgctatatcttatacgtatatgaaccaattgtttcggctaagagcagcgaccgagcaggacacgaagattaaatgatgatcgtaagaaagaagcgggtaaaaaaggatggatcgatcggatcgagaggcggaaagaaccaacggctgacgacagtgaggacgaggagcttgaaggtgagcgtcatcgtttttttctgtttcacacgcgtaaccctaaacacgtggctttccatcaagtgtacaaagacaatcgttctatctcgttctctactttgtgtttctacaaaaagcatgttcatctctctttgtgtttcccatctcttccggcatccaccataacgcccacagcccaaccggctttcaccatctttttcagcccggccagccagccaagcgcgaacaagctgaaacataacactgcgttcagaacgacgtaaagatctggtttatcgatcggtggtggaagtaggtattctgccaaatggagggccaatatagatggatatgtcgtcttccgttgaggtttcaaaatgaggttcatcagtacacacagacgcgtctctcaactgaatggggagaggtttcgcttaaaaagatgctcaccatagagatgaatttgaggagcggtcgtggagatttgtacattcttcggtcgaaactacccataagatagttccagaacgcggtcaacagaacgtattgaaggatctgaccatcacgtttcaaaagcggccacatgctagtatcggacaaggaacaaatgaacagaagcaagagtcagccccttcgagtatttcccaagcgagaacaagacgtgaagggcaacgaggaagctacctaaagacagcgacattgttccagaagacaccccagtctaatgctcctccatcggtctcttcatccgtcatccacatccaaacccccaagagcgggataagaactgtcttctcatgaacctggaaggaaaacaaaaagaacgagagcgctccgtgtccggcaagaagaggaatgaatgctctgaggtccgtgcctggtggtgaagtgtgggcgaggtagaggaagtgaacggttgaagggagaagcgcgagtgaggtgagaatgagcgagagaggagggaggaaagattcgggaagaatcgaacgccatttgataaacgtatttgtggcgcactagcgtacgcgagagaaaaaaagggtcaaccttgggttcgacacaaaacagtctgggaatgcaagacaccaagacaaggaaggacaccaagacatacccagaagttggctactttgtcttcaaaaatccctcgggcaaatggaaagacccgatgagcgacttgagcaaggtccatgtgtgggtaggcaaacggaccgaggatgacggcaaaggaaagcgtagtaacaacggccagatttacaaagagacgcaacctacacagcattccaccatcaaaagtagatgtcttgagcttcatcaagacaaaacaaacttcactagatttagaaggagaaaaagaagaaaatgtaaacacgcacccttggctgcctcctaagtgccagcatttaccaacaagccagatgcccacagctggagcccaatagagcgccatctgtttgaaacacagactacaaacgaacactacgcaagccaaactatctctgccggctcggagaaggacaaaagtccaaagggcaaggccgagcatgacagtgttgtattgaaagtggccgtgatcgaccaggattaatgggggcaagaggagcagaactagtagcaccagttgcttttgaatattaaaaaggagaaatgaggaaagaaagaggtatgtgagaagcaagcgacacatatcacatatatcaggacacgactcaccttagatcgcctgctgcctgaggacctttttgttccgtagatccaagcggccagggccgtccaccagacagcgatctcccagccaacaacagacgctcgcatgaacgccttgagaccttctgtttcggctcctcgtgagctttcaagcgcgaaccacgtcggatcaattgcttgaccaataaggccagtgagaaaggagtggtaggccgtcagaggaggatagtccagtccccaatatgggagatcatagtaataccattcagaccggggtagatggagcgtaatttccatccaatgacgctgagcttcaaaatcgccgtgcattggaggtgatccttcgcctttggtttgaaaagagaggaattttttcaatcagaagggaacacggtcagcctgcaaacgtccggacgcgagcaaggggagaaaagagagaaaaagaacacaagcgcacggaccgctgtagccacccaaggcgacgagaaatctgatgagcgcggcggtgaagaaaatagagtacggaacccagtccgatagagcagctctggacatccagttgatccatcgtttggctggtgtctctggagaggaaggcgaaatgaaggagcgtgaatttgttgaggatcctgctgtcgatgaggcgtacgagcgagatgatcgtgagcgggtcgagcggaaggaggacgtagtagatctcggtcggacatcggaagaataagagtgatccgagctgagcacaaagggagaaaagagcttggaagatgtttagttgacggcggaagcatgtgtgtaccgcaaggatgaaagactataggggagcagaggaaccaaatatgtatgccgggcatggactattactgaccgtgctttggaggtccttcgagaagtaggagatgtaggaaagagaaggtttttctctcctcccgactgaacggtcatgctatatatgtgtgtgccggtatatgcttggtatcgaaggcagtccgtatgtatgttggccagagtaaaaggagatgatgaaaatgatgatgtggatggggagaacaacacagaaaccatccaggccggcaaaacatgctgaaattctctgcgttctttccatccttcttgcttctcttttctttccagctctctatattatggcttgaatgatctggtgagattgcatacatgttgatctctcgcttttctcatcatatcaacatcgcaaaagggagcgcgaagaaaaaaggttggcctgactaaagctcaaatacaaccggactcaactagaatagaagggttttctaataagatctcaagccggccaagtcctaaacacgtgtgatgatcgttcgactcatgcttccttcatcccatcgttcgtctttcggcattgacgacgaccacgacgacgaccacgacggtcaatcactcccaaggcttttcatctatccatttaattctcgctccctatgggcgactcagcaagtcccattagaagggagtttcctgcgatcaaatcaaacaccacttcggtcaatcagcaagttcccggttcggccacaacaaatcctccttcagcctttgggttctcacaactcgatcatccttcttacgcagccgctgtaggcaaccaggccaatcctttcaccgagacaacacctcacagacgatcagcatccagacagcctagcactgtgtacacacaaccttcaatgtcggactctgctcatcattctcagcagcagcagcagcaacaacagcacaatattcaacagacccgtcagcgatcgtcttctagatctcgacccctgccaggaagctcgggcccattgggactaccttctttcagacgggttctcaaactcactaccgatgatgatgatgacacttcgaacggagatgacgacgaactacatgttccggatagaggagagaagctcgtccgaagacgaatgaaggaacgaagacagctcttgtcatactctggtcaggccgctgccggatcaatcaccccaggactcaattcgagttcaaatcaagttgatggggccagtccaacgatgccatcttttgtcctaggatccaagaagcaagctagaggtagggatttctcccgtggtcagactccagggatcaactctagaaaggacgatggtggatacttcgctggattcgaccagccttcgttcctcgatcggccgtcttcgactagaccgacaagtcctttgctttctattcctccccgaatgccttctactcggcctcgtgccgaatcacttcgatctgctcgaggcaaaagcgtctcggtcgaaggctccgaacgaggaagcattcgccgacaggcaccacctgatgaccccgataacgaggatggagaatatggagatgagctgggagaactcgcctcatctggaatcctaccggtcagagacatcgacggggatagcggagatgaagacctgcttgatgatggacaagatcaggttgaagaccacaatcccgaagatgatgaaggtgaagacgacgatgccgatgacgacggtgaggtcgagctcacactcagggatagacaggatgtaagtggtcaaaaccagtttctgaaattgcttgatgacatcgtcgttgtactgattctcatctcttgtgtcttcttcacctgactttcctgctgactcattcttccttaggctatcaatatcgagcatccttttggattgcctatctggaaacctgcgctctatcggaagtctcgaacggtcacccgacaggccgaaactgccctgcacgccattccctccgctgctgcccaaaggcatctccttccgggaaacattgcttggacagtgctcttcggatggtggctctcccttgtctgttttatcggagctgggctgatctggctgtctgaaggtggtggaggtaggtttagcgcgctcgtttgggggttgggttggtacatcttttggccgttcggaaagtacgtcgagggcgaaggaaaaatcggagcagatgatgaaggtgatgaggaggaagttgagaatgatgaagaaggtatggaggttgaggttgatggtagaaatggggttcccaacggaagaggtgtacccgggagcgagagtgaacgttcagactcctcaagaacgattaaagcgtttggcactggccataccaccgatgatgaatctgatgacgctgaaagcgctcggtccctcaatcctatccctcggcccattgctcacgaaacggatgcccttcttggagaaactacccagcacaacggatcaacgttcccatcagatgtaaacacggttacccatgcgaagagcgcctacggatcgatctcgccgtcaggtcgttacaagttaccagactcttccctttcagccgactttatcaacggaaccgaaacagtgttgacgtttggtcaccgactcggacaaatcacctactggctcgtattttgtcttatcatcgcccccttacttgccttggtctgtgtcctctgttggggttttgtattctccataccgatggcaaaacttctctgggctcttcttgagttcttgtatagccgaccattggagcttgggttcaaaccggcacccaaaattcctgtagtagatccagagatagccgcagccgccaccgaagcaaacggaaactccgccattgatggctctgctcttggatcctggaagaaacgggccagacttcgaccaggtcaggtcgctcccaccggagggcctcggtcgactgtcctattgtgtacctacaaagcggtcggcacccagtactacaagtacaccattggtggtgtcaatattctatttgtcaacctcgtccccctcgtattttttgttattgccgacgcgttcgtgttgcttcctttaacggagaagcaaaacatgggtcccttcttgaatttcctcgcggcccgagaggtaatctttcttcttgcaatctcgtccgttattccactttcgtacttcatcggcatggccgtcgcctcgatctcagcccaatcctctatcggtatgggagccgtaatcaacgcgactttcggatccatcattgagcttatcctgtactcaatagcgctcgttcaagggaaaggtcggctggtagagggttcgatcgtcggtagtctcttggcgggtgtgttgcttatgccgggtgtcagtatgtgcgcgggagcgtttaagcgaaaagagcagaagttcaacgcgaagagtgcaggggtgacgagcacgatgttgatcatggcaatcgtcggcacgttaatccctactgtgttttaccaagcctttggaacagtatgtcaacctccttttctgtctgtctgtctcatcctacttcttgttttgccaacttgtcttgttattggggtatatgtttttattctattttaaatatttaggtcgaacttagttgcacggggtgctcggacgatcagatttctcgtatagatcccttcccgttaaaaacaccgaacaaaaatgcttggggttgccagagctgtcgatatgtccatccggacccggccaaggatgctttctatcaggaaaatgtcaaaaatctgatgttcatctgcgctggactccttctattcgtacgtcgtatctttctctcttaaattgctttgtgaagtcactagtttgggtcaagacgtattcaacaaagtcatacatttctgggggaaaaaaaaagtcatatctggttggcctatggttttctctcaaaacccacgcttcccaaatttggcagaaccctcaacaactcctccaagcagaagcgacggctgctcactactctgggccggcttcggtgcaccctgcctatcgagcctcggtccataataggttgactcctgctgctatagctaacgctgctgctgccgtcgataacaataacgccatcggtggcaaggatgttcttcctactaccatgcccgtcaactcatcctctgctggttcagtcaagggacagagctccacaaccgcgacccaaggtctgacaaccggtcgtccgggattctctcatccagaatcaaagacgactaacaagccttatggattctctggtccggcgagatcagtctcaccatcacccgtccatttggctcattcgacccaaccacgtgggcctagccacgggtatggctaccagtctcaagggatagggcaaggactgtcaggtagtgtccattcgattggttcaatgagtggctctcttactccctttgtcgaagggatcgtcatcggttcacgtgcgtcaggcgaagataagaacgggtcagacaacacaggaggaattcctccgatggaacttccctcgtctcttgcgtcggacgaggtgttcaccagagcagtcacagccgctaccgtcaccgcgttgagacaccaacagcagattgtgaatgcggctgctgctgccgctgctgccaaccgacctcgacctatttcccatcacacaggtatacatggatctgcccaaggaggaggtccgggtgggccaggaacagcggaggagtcacacgagggaggaggaggacacgaaggcccatcttggagtaggacgacgagtgcaagtgtcctgttatcctgcacccttttgtatgctataatcgccggttcgtttctcttcgcttctctctatttagatcacgaacatagaggttaacttgagctcttttttcttctctctcggctttggttgtcgtgttcgtcagaaattttggtggacgtggtggatgtggtgttggaaggatccggattggacgaaaagttccttggaattaccctatttacactcgtaccgaatgtgacagagttcatgaatgcgatttcattcgctcttggcggtaatattgctctatcgtgcgtctctttgtgttgcggattcaaggcttctgctctttctgttgaaactgatgcgatcttggaaaattaaatttgtctgtttgtagaatggagatcggttcggcatatgctctacaagtctgcttgcttcaaatcccggcgatggtcgctttctcggctttctacgaccctaaacagatgggcgagtttgtcgatacattcacgtatgtcatcatttcctttctccaagaaaaacagagagaatgtttcattgagcgtactttcttcttgtctctttacaaccttgataccttttcaggttgattttccctcaatacgattgtatttgcatcatcgtacgttccttattactatagttgtgatagttaatcatgcctgacgaatctcttggtgaaacctcacagttctcgatctttttactgacttacacgtacatcgaggcccggtcaaattaccatcgagggtctattttgatcttggtgtaggtttttcttatcatccccatcaatccgttcacttgttctctttccgttccaaaattcacacctttttcgactgatttaacagatatctcgccttgctatctggattctactacgctccacatcaggatgtcgacaacacctcgtgggctacggtgttcagtgccggcgatgtcacacgaccgatgtttaggctttctcgaacggaagatatactcgcccgtttccgaggactctgggcttgagatgggattttggcatacatgattatccctagcatcttacctatctctcggtgtcaactatcttttgtaataatatcgtccacactgtagcttttctccaattgacccattcgccataaattaattttccacatagagcaacacacgccgtttcctttccatcgttctttcgtctcttgtgtttatcatctttcttctttattctgcctttttattcttctttcctccttggtctggctatgtctcgcttggttgtctaccatgtttcacacgtccacattttcggacatcgattatacagtccaccgaggtgacgtcagctgtggacaaagccgttcgggctcggccgggcgcagaacgccggcgggagggattgtacttaagatcgaatttctctccttcttctcctcttcctcctcttcacttgtatatctatcgaacgcttaagttgaaataacagcagcaagagacatgttcaaacccgttcatttactcgttcttgtccacggtaagattcgagaatttttttcagcaagggagtccgttcgaagaaggttgctcataaatcgaatcgtcttacgctcactctttaggactttggggaaatggtcggtctccttctttctaatctaatctttcttcctcttgaagaagtaaagatgaaagtgaaaatcactaatgtgcgatggatgtttgatgttaaaagggtcccatctgggatcgatgaaagaagaaatcatagcttcatacgaggaaactcataaagaatcgccaacagagcttgttcttctcttgcctcagagcaatgagggtgatcttacgtacgttgcaataaagtttgaagctgtggacccggttcgatctttggatcgctcgatcagcttgaattgcaaggaattccttcttaatgactcgactttgtgggcctgcctgcttcattcgatgattgacctggcaatctgtttctagatatgacgggatcgacatttgcgcaagtaggatgatagaagaggttgatgctgagattgaccggctagaaaatatcgagggaaaggaggtttcctcattctcaatagtcgggtactctttaggaggtttggttgctcgatatatgatagggtgtgtcttgatatctttccttcatattcattctcatccctacccgcgtgcttatcttaggagagacttcaaacaacacaggctcctagaatcccgtccggaacgatttttcgagaagcgaaagccaatgaatttcgcgacgttcgctaccccgtggattggaatgcctcgctaccggggcgtagtaaacaaattcacaagcgcgatcgggagtaaattgttatccagaaccggtgctcaactatattgtggtatgtcactcttcctctctatggtgttgtaaagagtaaaataggtcgatcttttggtcttatgtgcatcttattgcgtttcattctttgtgactagtcgacaaagagaagttggtatatcgattgggtaaaaaaggtataccgtttccgatcataatatgatggtatagccgtgaggctaattttctcatatacctgggttccttgtaggcgacgtgttttatagggctctcgagcgatttgaacgaatagatgttgtgagtgttcttcttttgcctgcatatagcgatcaagtttgttgatgaatttaagagattttcaggtagccaacgcggtattcgataaagtaagactttacccattcaggtggttggccctgtttctaaagtgtttgatcattaatattctcgaacaatcgcagactgtaccatatccaacaggagcaatctctgccgaagatccatttgacgaatatgatacaaacggtctggaaatgtatgtttcgttctcacgaagaaaagttaaacccggcccaaagcaactcctgacttcgtttaaccttctccgatcgactggttctacaattgattatatacaatagagagatggaatctgaccgacccgtcatcaaaagctttcgctttccatcaacctcgagactttcctctggatcctcctctgaagaatcttttgacagcccttcaccgactcccccgcctccaccggttccgaagagaacgcacaaaagaaactctttgccaccgtggttcagattcagatttcctctgaacatactattctttgtatcgttgccgctccttgtaccggtcttcgtatgcgttgtcctaggacacttcatcaaatccgggcgtcagtccagtcgtcgtgagttctccttctcaatattcagtgcttttcgtcacgtggtccgaacgtgttggctgacttccgatatcatttctccacattcgttccttttcgtatctgacataggtctcaagaatcaaacgactctaggagtatgggatcgactgcgatcgatcgagaaagcagtagagcatgatctatcgcttggcgtggacgaggccatgagttatgaactagagtcgagtgtgcccgtctcaaaattcatgcttgaacacgggcacaaaaaacagtcattaattctgacggaggaacagttggataatattcgctcgcttaataaacttccaaaattgaagaaggtaagatcgtgttttgtcaatttccgaccatgacaaacagagctgatattgaaggatcttttaccttgattaaataaacggaaatatagcatctggtcttcttcccggatgcattcaacagccatgcgatgatcattagtcgagatcctaaaaagttccctgaccacggtcgagtgagtcttcctctccagtctgttgtatccgatgttgcgcccagaaatctgattcatctgcttggctgtatatgtggcttgcgcggtccacatagggtcgaatcgtgataaggtcttgggctgatttactcgttatctagcatctgcaaggaatgccatagtatagaagtcattgatgttggtcttttcttatttgatgtatcactatgaataatgcaatgtgtttcaaaaatagagacttgcgccggtcaaagccgaacatcgacatcttcatatcatctgatctcatgaatacatggcatgttgctcagccatctcctttccctccgatcagatcttttccccgctgattctttatctctacagagccatgtcttctagccttccgaacgcccaggtttggacaaacttctctggagatgattaccacaaagcaagactaccatatccaattgagcttcttcaacagatcgtcaggtttcacaaatcaacctcgactcaaggagggaggtcgactgtcgctgtcgatctagggtgtggaccaggtaagtaaaagtcttttttcatcttgtttcagtacttctagtagaggagtgttggtttgttcatcgtcgacatcatcacattttcgacttgataggcacagtcactgttcctctcgctgccgagtttgacaaggtctatggggttgacatcgctgcaaagatgtatctctccgctccgaccgtgccgaacgtgcaagtatgtagccccctccttttgattcctttctatacgtagtctgtgccgaatgaagatatcagaacgattaatgacgagaataatctggctcaatatagtaccaaacggcctcggcatcgtcgctccccttcctggaggatggatcagttgacctcgtcacggctgggacatcagctcattggtttgaccatccagcgtggtggaaagagatgagcagaatcgttcgccctggtgagattttcttttcttcttcgccaaattcttccatatactctacctttcatgctggtagcttggccctgatatcttcttacgtcatggcgcctttggtgatgataagggggaactgtggccgtgtggacattcggtccatgtttcgtatccagtaggtctactctttctctttctttccgatcttcaattccttcagcttgcgcttatatatgcgtgcttactctaggtccctatatttcactccctgtagacccagatcaggacgagacttatccaccggcattagagaaccttttgaaggtcacccagcgctacgccggtcctcttcagccatatcgaacgaccggtaacaagttgacgtacgagctatacgataccctacccggcccgtcgtccgctagtgatttatcgattgaaccccggtggactgaggaagcgtccagaaagaaatggggctgggagagcgaagaagcgtacgtatcgaatgagaagggttaccgatggaatgtcatccagaataaggaaggtctattaggtgagaaaggggagcagacaacagatgaggacaaagctatcgaaaggacgctgaaaagtcggttgacgttgaatcaggtgaatatatctctggttacacttgcctctccttaccgttccttctgttcaagctccgaatcatcttggtctgaatttgctccggcctccatcagctcgcaactttcttcgcttcagtttctcccatcatagcatatcgagctaatctccaacctgatgaaccagactggatcgacgagcagttccgccaaatctatagggaaggagcctcgctcactcctgatggttcagaatggaatggcgagacggtcattggcatcagaagagttttgagcgttgtggtttggaagaagaaggattgattgtacaagacatcgaacgtggaagataaaattaaatgtctatttttttctttggtaggcgtgagatcaacgatacagacggtgcatatataatgagatcatcatgaactcaatcaagagaacaaaacgaaaagacatatttaggccgaaggcactccatccaccgagatcggctccaccgctcttactcttcgctgttgtaggtatgcctcaatcttttcctttaactcagtatctacagttgaaagggaacgaccagaacattagactacaaaagtcgtcaagccgatgatcaggaaatcgaaactgaaggacatactagggatacaatcttccaatttgagcggtacccgattgaatggatcagtcggatcagatagaagatgagccttgatggtcgatcgatcgatggttgttttagaggacggcaaaatgacaggatccctcatgagcgtgtacataagagggtctagattttggaacatcattatacaaaaattatttatatattagctttgagcaaacacttcaaggttatttttgaaaattacataccaaggaactcgtccgggagctgaccagagaaatatcaggtgagcatgtctgcttagagaaaaggttgaacaagatgtaggaagcactcacatcatcaccctcctcttcagcttcgatcttcgctttagtttcctccaccttctggcacaataaaactatttgttggatctcaccaggcgttttgattgcccggttttgtaagattccagctaggcgctcgaacaactctttacgataacttctaccctctctcgcgacagcctcaacaaagcgctgctctactcccaagttcctgaagatatctgtcaagtccccaaggagtgctttcggatcgaatcgatactttttcctgtccttcaccttaagatcctgcatcttgcttccgacgaggtttgccagattgaaacacagcatagcggctaatcggtcgacgatctctggtttgaggaaaggctctcggacggtacctgtccattcttgtagaacattgatatttcgttttcctccgtccgtagaccaaccagcttgattttctgccgacttgagcttcacctccttgtcttgtcgctcggtgtcggacaacgagttccaggtggctgtatcggccatctcggtctcgattgcggagatctcggccaagttagtcagactttcttcgaggaggaaagtacagtcgttcatatgcatgttggcaaagatgacgaaacggtcctcgttggcactaaaagagaaagacacaacgcgaacgggtaaggatacaaacataagagcaagcaaagatagaaaaatcacccacatcgaatccttgaggaatgaatctcgatggataggatttttgaagaggtatcgaaggacagagatacagtttcgtctcatcgagaatctgataatagaagaggaagaggttggcgtcgttcgagaatgaaacttcagcaacatggaacacatacttgtcgtagaactgttgatggccaccagtagcctccatgtctgatgaagagagggacagagtagagaaatatgttagatctcctcctctcgtttctgagactctcatatctcgataggtccagagaggaactgaccaatatagtactgaatcaggctgggcacgagctgttccacagctaatggatggtacatcaaagccggaccgaggacaccttctcggtagtagccccaagcttgacaacccatagccaagaactggatttgaaatcgtatcatcagtcatagaaaatgatccgacggataaatagtaaggggaaagcttacttcaactagcttagccttgacaaagggattcttgacatattttccactcaagaaagtgatgatgaatgttatgagtttggtttgatcggtactatcgaacacttgaggttggtggctgaatgggtaccatgagtcgacaatatcacttagagacgaagcatattggaaagagtctcggatcaaaagacacacctcatcaaaaatacatggtagtcggccatatcttctaaaatgaattcaggtagcattcggaatgccatcggagcctcatcgggtaaaggtaaactatcgttttcgaggacaaaatcggattcttgaattagttgttatacatctctttggtattctactcaaagatgcgtccacagagcgatgggaaaacgcacgtgatcatttccttgggataaatatgagtcggatcgacgagccgaacaaaccaggtcatcacaaagctttggaacatcatcaccctcgaaacaaaatctttatcgagaagctgaacatcataggcggtgacgaaagatcgagtcgtggctatgtccgtctagatcagggtgcaacagaaaacaaccattgagaaaatataaattacgagaggtaatgagctctgctgaccttgagcttcttgatcatggcctcgccctgcgcttcggctggtgtctgaggaccaaggattcaaatttaataaataaaaataaaaataaaaataaaaaaagcccgccgttgtcagtcgtttgtaagcatgtcgtattgtatcgaaacacgacacgactcacccctctccatgtcgaatctgtctcgactctttttagctccttttctaactccccgaccttcttctctaagtcacctcgactgttgatcgtcttacctaaaccgacatgttggattccacacgctaggaaaaacacatccgagatgaagttcactggtgttgttgaagaataggtagatggatcggcggcgaagtactcgtctgcttcagccttcgtggctcggatcttagtttcttcagagatgttgatcctagaagactttcggtaatagtctgggtcgactttgtccagctaagatggatccaggcagagagttacattcttagaaaacaacatctctgcgacatcctagattagaagaattgcgattgtgacttactttggagtaggccacgtccatgaccggttcgaaaaaccttaacaacaaaacttgcaaattcgtcatgaacccatccgatgaaacggttgttcggttgacctgattgcaggtcaagtcattacaagtgtcaaaatattgattgaatatggttgtttaatattcctgttggagaagatggtatgcgaagatcgactgaccctcataccagaccgtttctcattctgcctcacagcatttgcaaagaactctaccactttttctcgggcggcaggtcccgatcgaatgatgttgttatagatcgaaaacagagtatcctgagcgaccacatcaggatacatgaatatcaagatgtaagccattaataatccttcagcatatcgaccagtgattgtgacacacctgaagtgagaaaagggtagctcgcaatgtgttttgcgcactctcattaatctctgactgcttgtcgttctccagcttgaaaaagtgcgttttggctacatccggctgtgttttcggtcagccagtcaagaaatgaatacgagtcaaggacaatcactctatcaaaatcgtgactgtatcgatatcatgagcgttttaacaaaataagaaaggcttacaaattctcgagggaagacactgagcctagtgagtgggccaagaagagacataaactcaatttgaggggctgaggcagtttccaatagccagattggcaaggtgggtaactgaaagtatcacattgtcagtagatgatgcatttgtcctcacgttgtcagctcaaccgccttaacgtgacatttctcggagaacttactaaggcagccaactctttgacctcagcgatcttcttcacgcaagccaaacatctcctccacccttcgccatcgagatcctggttgtcttccttctttccgttccagtaggcctgcagaaggaaactcagcgcaggggaaagcagagaggtgacaaattcatttccgtcggcaaatttgatggagagctcgagaagaagctgagggaactgtaagttttctaagtgctttgaggggattgggtgggtgggagaaggggacagggtagacaagaaagcaggaagaaactcgatcacgcccagcggtttactggatgaatagatggatggagacgtttaacgagtgagcagagcatcttgggaagtatcaaccagagtaaacacgctcactctgagggctgtgggaacattccggggtccttcaaagactctcccatgtatccaagtatagaatcattcacttctgatgccgctttagtccaacctgagctctcctccggtttgtacccctgttgatcatatgatgccaagtcggataacgatgaggtctctgtaggtcgatacgttaattcgagtgcgatcaaaatctgagacatacttgtcgttcagcaccaagcttgacctgtcctagtcgcttccaacatcctacaaggtactcgaaaatagtttccttctccggtatatttgcgagaacctgaagctcgtccacgtcgtctctgttgtacggagaccaaattagtatgagaagcaggggtacgatttctcggttatttgatcactcatcagacgtatgatcgagcgatcaaaggactcacgtcatcgagttaggatcaagagagagtctagcaatcaggatcctgtctgccagagaaggattggatcgtccatgagattgccctgtcaaatagataaaagggctgacctatcagatccaactcgtactaggagaagccatgcaccacataaggacaagagggatacacctaccttcagacgagagttcttcggaaagttccttaagccagcaaatggtccaatcgaccgcctctgctcgatctctctggagttacgcgccaagagagattgcatgccgatgagtcgtagactagacgattgttatatttataatcagagcaagacttacatctaaggtgattccaaaaatccactcgactgtgtccgattgccactgctcgaacgactttgtgggcacgggcttgacagcttgccttggagccggagcggggggatgtggaggtctcgtctttgcgacaggcgctggtttcgttgccggcgggacaggccgagcagcaggagtagggtctggagctgcttttgatgtagcagtgggcgtagagatagatctatcagttgatgaggcagaagtcgggcggactgttggtgtaggtgttgtagtagaagttccagatgacggtgtgtttgctggagatgaggtagcaggagaagccccgagtcgttcgagacgcttcaaccgaatctatagagaaacaagcaaataagttaattggcaagtttcaacgaacggaacaaccggtatacactcactctagtagcttcgtcgatatcggacgggtctgccatcttgtctgttgtagatggaaagataatccagatgatgagaaatcgaattccttctttgaactctctttgcttacaaccgctgttagggttaagcgttaaagctagggtagatccaagatttgggtcagtaccgaaatgtgcagtgcaacaaccacacgatcacggatgtcgctctcgttcaaacagatcaacatccttcgagctgccaggctcatccgaagctctgggtctggaccatcagcatacccatcggcctgcttcgtttgtctgaagaggtctcagtcttcctctccgttttctaaagcgctgatcgtcgaactcggtcagtttccatctcaactcgtgtttcgtacttttggtcgtatcagtagaactgataacactggcttctttcttcttctttttcttcgtccatagaaccgaagcgcacgtctgtgcccaatagcaaggacggttcgatatccgatgaatcttcatctggcctttcctctcctcctccggtgcctccctccaaaccgcctcctccgcgcataagccactagtctgtcctcacccgtttctttgttacatgtgattgatagacatactgaccatctccaactcatcatgatcctctttacagctcaacaacatcgactgtttcgaccttgtgtaaaagcctgattgtctcctcgaaagatgctcgggcaggagctggttttcttactgggtttgtcaaaaatccgtaccctctggagctcaagtatgaggaatacccagatggcgggccaagtccacaggagtgggcgctgatacaagaattcatgcaagagcaagatgaagaaaggttcgtcgtctcctcatccatctcgcttcagctactctttcaattctcttcgtcctgatatctggaacctggcacatggtagatccttacatgccaatcctccggcaatcctgatcgattcgcccaaatcttcagatccccattcacggaactcaaagctcagaacgttcactctcccaacgattgtgaactggaccacccggcaggtgttctatggaccatacatatacagccaagtcgaacagatgatcaaagatatgcagatcgaacagactgagaggtttgctgctgaaggtaagatacccgcctatccgatcaacctagcctttctctctctttttccttgaccagccaactgacattctcagacctcgcttaatcacatgctttgctgttgtccatctttggtttgcacaaaaagcaaaatacgatgcctaccttcgatcccagggacggcgtcctccgtctagaaagaaacccgagaccgaccgaatcaagtggtgggaggttggactactcgccataggtagctacgtagcacttgattggttctatcaggtttggatggtcaaagatgaatgaccaggaggatgacagcggtggtcagataggaaatagataaatttggaaggcgaaactgatggaatgagatgtgattgaacatcgtctgttctatcgtctttgtattatggcctgttgtacgtttgctatcataatcaattgtttcatcttgaaagacttccttcgaagcgcgcatgtcatcagagaactttatgaagagtgcaagggagatcggatcggacaaacaagagacaacttctcctttctgatgcaaagagaacaaaaaaaaagacacgatatgtacgaaggaagtggtggttgaacgatcaaaagggtagcaagtatagactgtgaaggaaaaaagcgatgatgaagggcgtttcagaaatgaaaagagtaagagatgctcggaggtgcaaatacaagtcgacgaaatagtttcgtgaaggaagatggatattaaacaaacacgagactgggaacacaaagaaaaagacaaacaaaaatgaacaacggttgcccgggtgatttaatacagtgaatgatatatcaagaatgattggtttgaggaagagagaaaggaaagaatgttgacaacaaggtcatgtaagaggtcgttttagacagaaccggatatggattgagcgtgaggaaaatatgcttgcaacacgttggaagatattgctggatggtgaaatattgaatgtgaggaaggtgaaaagacaaatggacaaaataacaagatataggtaaagaatcaatgcaaaagtcaaagcaaaaagcgaataaaacggaccaccaaatcgatgccatcctctgtgtccctttacttgccaatcaatctttttccagttctatccgatcgagcgatctctctggcggcctcgatcgcctccatcatcctggccgcagcgatctttctactttcttcccgcccaataccactcttatccatcccatcgagctcaaacaggtcctccaccccatcgagcgccacctgtttaaattctaagacgcacgtcagaggaaccgacctgactgcgatctgagcaaggaactcgaccggtacttcctcccaaccggtaattgttaacttttggagcgctcggctgaatactggaatcggaagcggttgaccaggagccaatcgcacgaccgatcgaagatctatatcaagttcttccagtcgaacgcaataggtcgcgagatatcgaagggagagtatagtaagtcgaggagaaaaatatcgaccggttcgatcgcttagtccatcagcgagagcaggcgttcgaagggtcaactttcgaaggttcttccaggatctcgcgagtactcggacttgttgatcgtccagggcagactcgaactcaacctcttcaagcgactggagtgaagaaaggatcatggctccgaccggcttctcattcaacaccatcgcggcctttgtaatcaacggatttgccggaacaggacaggaaatgacgagctttctcagtacacccttgtttggactggaggctatcgctcggaggagatccgatgcgtgtctaacggatgagaggaaatatgatcagtacaggaagtcaacaagctatgcgcaaacacagtggaccaaataggaagacgaaccgagcttccagagaccaagtgctgggcatgtggagcacaaactctgtcaaatgctggtaatgaacaaagaccgaagtctgaatccagacgagtgtcgtcggatctgctaatcgaggcatgcttgccatagcagcgattgaagggagaacgtatatgtgtcgagtggaccggtgtgcggtggatgaattaaggatgtcgagttgatgggcacacttagtcgctgatagattgaaccacatttcagggaacttgacctgttgaagaagacagggattagtacaaccagactttggccttataaagagcagatagagagaagaaaagtgcagtattcaccgaataaacaaattcttccttgtaaaatgcatgggggctcagtcgatgtagaactacgctcctcaggttcacaaaaggtagcatgagcgggtacttccttcgtaagatcataacatccaccgcttggccctgtttgatgacctcagtgatatgtaccgaggtgatcgacgtggtgtatcgaagcaacctgtgatggtacgctagatccaagctcggactcatttcgggctgtgagtgaagcatagagcggatacgtcagattcaggtagcagcctgttctttactagaatccgaacaaacaacataccacaacgattgcattcttgcgcctgagcgctttgttgtccatatcccatttgaagataaatgagcaatcctcgaaccggacctcgcgccagagtacggatgcaccaacttcaaagaagaatcgagaaactgctaggcacgatgcgagcgaggccggagatattatatcgagttcgagaaagatcaaccgaagtagctctgggatcttcaatggtgttttgttcgctcggataggtaggctttacggatagaaagataataggtcagattccgggtgttgatcaccccctacaagagcgacaccaacgacgtacaatggttcttgaactccacctaggctggtgacgatgattccccctgttttcccctctgttttcgtcctcgtccttgcccttgcccttgccttgtcttcgactgcgctggatgtgagggcaatggtggtaaccaacctttcagggctcgatgacggcgacgttcctgtccgcctcttttccagatcaaactctatcggacctgacggagcaatcgaccttctgatgacttgttgtttttgtgttggagccgaaggaagggcggtgtaagaagatgagggaattgtatttgatcgattacgagttcgagtcagggtccgagtacgcgtccttgttcgggaatgatttgtcgagtaaagatcaatgtccttcatcgtggatgatggtgaagtggtagaagaagaggaaagggcgtaggaggttctttggtcaatgacgtctgtattggagatggtggtagtagtagtagtagtagtattagaggcagtagtgccatttgaacaggattccatgatggcaaaagacggggaagacgatccagacggttggcattctagggcagaaggaagcttggttgatgtagcttgaagaagaagagaggatatgctgtccatatttgtggtgactgtatcctgaaggggtggtaaggagcaacggcggtccagtagatagagatcaataatgctttagaggagcgatacagggacgaagaagggagttcacagttcggagaaatgagagagaagaggtgtagggattttggttggctgctttctcggaaagaatgttcttgtcctcagggtcggtgagagaaggttaaggtaagggtgtgactagactcgttgggaagaatctaggcgactgaagtgggccaagagaagggagagacaaaagaaaagaggaaccaaaaacaaaacagaatgcaaatgcggggtaaggagatatagagagagaaagaaggagaagggcaattataagaccttaagaaatcgagggcaaaaggtccttccagttttatagctgcgaaaaaagaaacaaaaagggagagaaaaaggctccaaacacaatcgggacgatttaaccggaaggttagtcagtatcaaccgggaaaagacaaaaaaagaaaccgaccaccgacgacgaccaccgcctgcggatggcatgaaacagatcaagtcttcgaaagagtgaggagagtgagaaggacatcgccgctgtattatctattagccgttcgcgtgggccatgggattagtctctctgtttgctctttcgttctttcgcttaatgaattgatcgctctgacgaaaagctccggagaaacatcaccaagtcaatatgtgcgcgggaagggtaaaatatgataacaaattgaaggggtcaaagaagggtgatcgaaaatagtcgtgaaagcagaaagacaacagagaagggagaccaaacgttgatccctccacttctcgattctcgtccatatcacctttcaaattcgccgactcgccgctggtggtttgatccgggttctccgtctaaatagcattttcgcttccctgtatcgaaggtgcatcatcggttccaatcgccaagggaaagcataggaccgggcgtctcggatccacatagccggccatagacggacatatcaccgagcggagatttcggggactgatcgaggggaaacttactgaagaaaacagagttcatcgaaacagcaggtgtcggacatatcaacgtcacaagagaaatcaaatcgatcaaatgcccgactacggatccattcattgaaggtgtaactcctttacaagcgaatcggtatacttctcaggagcattcaagagatcgagaggcttccatagaacgatgatgaaacaaagaaataaattcttaaccctgttactttcaacgggaagagaagcataatcatagatgcgtggagaaacaaaaggttggacagccttttccattgaaattgactgaaagatgagacctttggctatagactgtgccggtcactctgtcatccctgccgtttttctgtgtttgttttgagggcagagaaaaaactgaaaagttaggggctgcatgactctcatgatcgaaaataacgctttggctctattgcctttgacgttctcatttcatgcggcccccttcggtgacgttccaacgaatcgagtgactttcttttccaatccgcttccatttgttctcgctcgatctgctcttttgtttttcgacggacttaatggctggcttgctttcttcctgagaacgattgttgctgcggaagcggaattaaagcaaatcttgtctttcgacccacatgggggacagactacagcttctatacctcaggcatcttacccgcctttgtattcatccttgtcccttcctttgccggttccgaaccgcttttgtttgactttcttgccctctctttttcgggttgatcccacatgtaggctcgatcactcaatttcacttctacacaacaaattagatatcagaacatcaacaaagcctacggagctgacactacatatctatcgatggacggcaagatggatacagaattccctttgacgagaaaatacagttcggtaattgtttctatctctatctacgatcgttctctaagaaaacaccaagctgaattcacattagtttacatccctcgacctcgtcatttaatctcaatgtactgctgacttacaatcgtctttgttcactccgttttgttctcaccggcagcttcggcagcctctttggccttcttctcggccaactccgctcgggtcaatccctctcccccaaaagactctgctcaagtaggagtaacagagataccaattcaaacattcgagggtgcgtacgtgtcagaaccagactcagtttctatgaaataggacataatgatacaactccgactcactaggaagagaggcaacgataggagagctggcgagtcctgatccggtcacaggagcatattgtggttgctaatttcgataagaagggaacagatcagttcagctgtcaaggaatgaaagcatgtgggcatccagatcagctgtaaactagatatacacccacgtcagacatgtttgtttagtatatatatgtgggtctccgtgtatggatgtgtgcgtgtgcgtatgtgtgtgtatatgtaagatgtagaaagtgagatgaagtacgcaagaccaagtggcgatggatggattccttttaagcacataatagatggcgagtcaaccactgctcgataagggttcgcatatacgtctgacgtcagaaacctccgtgaacgcatagactgcggagcctggctatcccgctcttgctcctcatcttttgctcatcttccatctctttttcccacacgaccccgttcactatcctaaaagagaccaccacatcatactatccatccatctcgttagaaaaaaaatcaatctttacatcaaaaatgtctcctacctatactatccaggtatgttctgtggtctatgcattctattcgagaagaatcagtagccagttccagttcagatcttttgtggagatccccatcgctgattctcaatcctaaatccaactgtcgctttttttccctccacggtcccttcctttctactcgcattcttaggttaccggaatcagtcccgagtctacacagaccaagcttgaccagttcttctcgttctgtggccggtgcgttcacagaatctggtgtgattgccctgggattgatcgaatttgggatactaattctattatcttgtgcaaacccttttttcttttctggtgctgtcctactttctcttggggtttctcaatattcgctgcagaatctctaatattactttaacccctgggcatgacggaactcagtctgctaccattcaattcgaaaagggtatgctctgttctttcatttcgttcaaaaaaaaaagaaaaagacaagatattttcctttctagtctgcatacctgcatcgcctccttgaagttcacctacttacgccttttatgaccttttcttttgttagaatcggccgctaagactgctcttcttttgaacgagggaactttggacggagctcatctgcacgtttccagtgagtcttccttcttttcctgttcccaaataaaaggtggatcattaagaccgatttattactcttttttgtgtaggcggatctctctcctcatcctcttcagccagcggggatgataacaacatcagccaggaagacaagcccaaggtgcgtcgttccatagttctgtgtcaaccccgaaaacgatctgattatattatttgatttgaaatcaggctggcatcatcgccgagtaccttgcccatggttacgtgctcagtgaccagattgttgagcgggctatcgaagccggttcgttcaaacttgctgttcttgccttacaggaactttgacgctaagatgctgcgtttgcgttatatagataagaagcagggtatctccaacaggttcctttccttcatcaaggatcttgattccaaggccggcgctaaagttgtcggacccgagcagaccatgtaggtttaatcatgtttgttaagttcgcgtcgacccaaatgactaacctttgttgtgttcatgtctttctctttcagctctgctaaagcccacgaggtgatcgaccccattgtcgctcaggtcattggtcgaaccaaggaggttgaccagcagcgaggaatctcaaccaaggctggagactactattctaaggcgctcagcacgcctatcggacagaaagtttaccagttctacaccgagacatctaagcaggtcgtcgatgttcacaccgaggctcgacgaattgccgatgtatgttttcttactttttcggtatgttatctgacatacgagagagaacaagtcgctaatcgctcatctttttgcctactgtctcttctttccttctttccgtacctggttgaaattggtctcgttatattggtttaggaaaagaagaacgctaccactgccgctccttctgctacgcctgagacttcctctaccgaagtcccctcgtcatccacgcttcctcctgccttggccaccgccgagactcctgttggacctcagtagcctgatccaattgggtatcaccaggctgtttcgttcatctcttgtgcctcttcatctgtctttctcgattgtcttctaacgcctctgctagcctaatgatgttcttcgtttcttgcactttgctagtactttagatatcatcttctttgtatcttttctcttcccgctccatctttttcttctattatttagctgttttactttcccttatgcccttttccttttctttttttcctggtggcgaacgatcctcatgatcttgttgcctgagatgccgatcagcatgtcaaagaagaatagtatccaattttgatgggacatgaatgatggtgaaatgcccgtttgagcatcgattcgccttttgctcagtttgctaaccgtcgataccatctcgaggcaccaactggaggatagatctcctagcgttgagcatgtgtgtactttcaaagtaacttactgataaactgcccaaagaggtatcaagagaaacagatgaaggcatatgagtactggataaagtcagtaaaagagccatctagcaagatacttgacagaactaggcagctgaaaagttcgccatcgcacgggattctccagctgtacctcaagaagggagtaagccgtcagagtgaatatgtaccacagctgtaaacgttacaaatgtacattgataaaagcaaaaagagagaccaggtgtgacgggagagaactaccgacggccgatcaacccaatgatcattcattaccagtcaaggagtatctagctgcaatagcttgctgggcacgtcagatctagttaagaacagaacagggacgaaggcagtcctgtacataacaggaagaaaacgatgtgaactgaatgaacataacgttgtctggcttgtaactgtcttatcggccggcaagtggttacagcatgcgtcatcagagtaaccatctttaagaccagccatatgctcttctacctcatgtccctcatgggaaacagggataagaaggtagcagcattccatcaatcttttttgtttgcacattcattgcctttaccaactgggtagagatctttctctccctcctgctgtctctcaacacttagaatacgcatacagtcctccaagaggattcctccctgtgacctccaatgcccatatttccgatgtccgatcatagtacaaagcccatcaagcctaatcgcgtttctccgaactcgatgccagttgattgtgagaaaccaagccaccccctcttctggcttgttcttgcttcatcctctcttgtcgtcgagttggataccgaatgatctgacaaaataacatttcgctctgtttctttcttcacagtatccgttgaaggaactcaacgaatgggagagagctcccatcctcagttgtaccatgctgccgtcacggtcgagtcgctcgatgccgaaggccttgggacgatcgatccggagacctccgaagaattggtaaccacactctctctctgtgaacatcgagatcgatccagatccctctcgggtgcttgttagttcgcacgatgctcatcaattatgtgtgtcttgacttgatgccttcatgatcacacagctctacacatttgatccaacccatgatcacactcatgggaaatcggtgctacccaaagctgctgccattctcccgaggactgatgaggtgcctgcgctaactatgccaaaccgagatgaatcagtagcttatgcaaaaagtcgagaagacagtcgacttgggaaacggtggtggaaacgacctagtccttactggtttgtatactttttcttcttctaaatatattgtaacaggacgccaggtcaatttggaacaagaaagatgtatagtggatctgacattggcctaattgatttattatcaggctgctcgtcattcaacttggaagtgccttatctatgggtatgggcatagcgcccaagacagagatcttcaatcatctcgcttggtgagtttgtgactctatattctttagatatatactcctggaatggcttagagacaagtttctgaacacacgttcctctcctgccttgcttctgcacagcatcgtccactatccatacgcctcagactttccaaccaccccacctgttcaatccaaccctgtgattccgagtccaccgatgccttctccctcccaaccagatgaagttgtctcctcgtcttttgaccagactagcttcgctctcacacgtatctccatacgaggtctgtttgactttagcatcgatccaaaggaaaacaccaaaggtggattaggatcggagggtcaacccgaacggtcggttgatcctttgttatgtagaaaaagcccggtcgtccaggcgtaagttcctctcttctgtttcgatattgtctcttcctcatgctgaatcttggtttgttctgtaattcatatagtgccgctgcgaaatttactacttgtgcgttgacttgcctagaattaaaactcaacttacctgtacaacattaagatagatcatcttctctgcgccttttcttttcttttcaagccatgagcatcttccaaggtgtattggctgctcttactacagggtggtggggtagattgtctgacaaatggggaagaactcgaatcctttcgattgcgatggtagggattattttcaagtgggtcattttttgatgtttgtcctttgttccgaaaatacaatggattcactgactccgaatacgaccttgctacagtgatattgtgtttatcgtgacggctaggtatcctacatccgttccgggtggctatcgattcttgttcattgtgagcacatgcttggcttcgtgatttgattgatccttacaaaaataaacttactctcatctctatcgctttcaaactcaagggtcctatctttgacggtcttctcggaggaatgcccacgctgtctgcgacgaatcaagcctatgttgctgactgtactcccgatggaacccgagctcaaatcttctcccgtttagtaggcgtgatgatggtcgggtttgctcttggtccgattgtcggcgctgccatcatccgctactcttcagacgttctttcggtgttctacgtcgcttgtgcgctccacatcttcactctcttcatcgttttgttcatccttccggaatcgctgtctaccggagcgaaagattcactggccaagatggctcgggttcgagaacatgaaattcaaaaccaggaagaactcgaacgtagatgggaggaggaagaagaagaggatgatgttctcgcagggaacagcggatggagtcgattgagcggtgttgttcaaactcgggcggctaaacggtcaagaggagtaattcggcgattagtcaaacgagtgtttggtttcctaagtccattggcaatctttttacctgtagtggatgagaatgatccaaaggggaggaagaactggaatttgacatttgtggcgatgggtctctcatttttgatgtttatgatggtttgtcctttccttcttcatcttgtttgagtgattgagcagacgatcagttattgagatgatggacctactttatttaatccccgtttacagggcgttctgagtgtcaagttccagtacacccagcttatgtttggatggggaccagccgaacttagtccactcttaactgtcataggctccttgagaggggccaacttgttgattttccttcctcgtaagtggttgcattttaatatatcaatcaattcggttttgatcagaaagcgacgccttaaataattctcccttgattaatcgctactctacgattagtgactgtccgatatttcaaaccaaaacataacggaaagcgtccggaacaattttcactgtctgataagatctcagactctcgcttcgatctaaaactcatccaagtctctctcatgctcgacatcatcgcctattttggtatcatcctgttctctggcccaagattctttatcgcatccaccatgttgtctactctaggcgggggcgctggacccgcccttaactctctcgctctttccttgctccctagctctcggatcgcaggtaggttgtttggagcgacaagtgtattgtcggctatagtgagcaccgtagcagcacctttgctgtttggaatcacgtatgcatatactactagagtcttccccaaagccatctttgtcctctccgccactaccctttcacttgcgctcttttgtacgttttgtggattattttccagtcttggttggtcttataaactgtgcttacggagcaacgttatgtttgtttttaagctctctctatgattcggctagacagaccattacctcctctagaggatgctccaactgagcctctcttggcagaaccgcgcgaagaagagcgaggtcgaccaaggacgccaaagtctgttaacggtagaagcgatattagtctgagcacgcagtgaccagtcaggtagttgtcgtttcctttcttgaagctgtaatcggaaatgttctgtctttgaggttttttttgtacatagtttacgtttctcttcaattcatcaacgggttgtctctgagttgtattaattacacttatgtctggttcatttacgttaacgattttctcaccttatctatcctttatccttttatctgactaattcacatcaatgtactttttctttgttctgaacttcttctcgctccctgatatatgtcatgctgtttgtttctgatatctaacggtttcaagacttaaagatctcgctctgtcatggttcattgttgatattcactgggaattggcgaccggcggcgttacgcgaaaccttcgatcacacaagctctccctgtttggccctatctgatctctaaccatctacattctcatcaactcaatcagtccagatcgcctatcgcccagataggaacaaagatgtcttcggcggcttcatccctgtcaaggtcaaagatagcgagaagatcgacttcttcgtatgtgaaaccggcagtgacgatgcatgaacctattgttagtttgactcctttttgatctcacttccaaacttggtcgagcaccttctcccttttgtttcgctcaagattcaacggaagctagatctatgtgaacccagagcctttggatataattttgcttattgagtctgttttctgtgagtaatcacaggtccaactgagtttttggctacatgatgataaagattggccacaccgagtcgtgctgaacccgaagagtttccctatggctaagcatggggatgtcatcaaagtaacgttcatcgaaaaagaacataccggcatacgaaccgatgatgaggatagtgggagtgctcctcatggtgtatccggttctggtctaggatctgggtccggagctggacaaggaaggaaagcagaagatttcttattcaagttcgacgcagaagcattcgatacgttgaagaacaagggtgtacagaatttgaatgtacgtcgtgaccacactcgatggtgtcttctgtcaatctttgtatctgtgttcaaaaactcaagtgaaaaagctgattagatcttccttgtggctttcagatctcgatacataagacaccttgtcagatttttggactgaatccaaatagcgggactatcagactagagatcgtaagaacttcaactctgctccttcgtctatatacgctatctctgacgtttgttcaaacctctccccgtattttttaactgcttaggttgacccagcaaccagaactgcagattatgtgcgtccttttcaaaaccagttgtgtgatcgagaggttgctcagagctgaatagtcggatttctattttgatcaggtcgagatcctattcaaggatcaatacattggaagatccgacatgtggcgtgtaggagtgagcttggaagattcatgtattcacgtaggacagaaggtttgtgtcctacttgagagaatacaacgtcacatgtttcccgacgataacaatcgctgacattgaaggttgatgtctgtgttttcagatctcatttatgggctgcatcaaggccgagatcaaaaacatctatatcaatcagcgcaaggtcaggaaatagacttatcatatccagcttgaaacattgagacgtattgctcatatgactataactctttacgttttcatcgaaagatttcatcaagcttcatgtccgcccgaacgaagagtgagtgccaaatcatttagactcaagacaagacaactgttaatcactcgagttactgtggacagcaatatacaggtcagcttcagctcgatgtgtactattcttacagttgtgtaaggagatgtacgaatttgatgaggatggagaaagatattatgagaagatcatggttcgtctcttaatcttctggttccatcgagtttccttgaagtgatgattcgcgcatatcaggtcgttctgtctgacgagtactcctcatttttatatcatctttgatctgtccttccaaccaatacacggtttgatcagcatgggtttcttccggaactattcgctcgatggcaagcattaaaaaccaaccacgtagtcagcatcattcttttctccagggtctactatgactctgacgagtgagttctccctagacctctattgtgtaactatcctcaaactacttcaaacccgggtttcttaccagatagacatctttgtctgtaggaaagagcttatcgatgcacccataggatacgatccggactctggatggtacaaagactttgtacgtcccttctgcctgcttccttcatatcaatcttgctttcttagattatgagttcgatgttcaatgcatttcttcggcattcatgaaaacagtacaaagtctgtgtggacatcgaatccaatctgaacactcgagcagtgattacccagctcaagacggagcttgcaagtttccaaaaagaagtcttgctagatcatcatcataaggaggggcagaaagcgttgattttgggtagtctgtcttatgtacgcataccatcatctccacatcttgccgcgagtataagcgaacaggaagtaggttagacagggaacgaacaggcttactggatgatatcgtgtcatctcgttctctcatttggaacctccaacaggctttccagggaaatgtattagaagctttgaatttggccttaaatccatatgataggcatcgagtcgatcgtgatctaactcgaacgtgagccacgacttggattttcgcatgacttttttcttctttcttctgactagagacaatgttcgtttcgatgtctcaatcttcagaggcttggccataatgatcataactccaggtaagcgcttgtctttctggcggttttgatatacatatgcaagttctcttatcaggtttttcacaaatgtaggaactggatacttcaaggtcgacaaagagtcagtttggagcttatctatctatcaacgttctagaactcaagactgattgccctaataattatgcaacttaagtttgctccgactgacttccgatagatgcaacgatcatggattgggtattgagcttagtatgtctctgattcttacatggactagtatatgttttatcatctgttaatcatcttcattcttgtctttagtctgcctcaacaagatgcctctgcatagcgttcctctattcagtttcaaaaccgcaagtgccaaggatccgacagaagagttcagaagtgcattaggtagctggtgggatcctacaggaacaatcaagccacctgtgggcatgagagatcctttgttctcagatggaccggccactggaggagtcgagcacgtacaattttaccactcagttcacttctggatttatgcctgctattggagcaaaagtagtgacaaggttagccgagttccatgatgtctcatcggattcaatatcacataaccaagactctgacacttgagtttgttatgccgtcctttgagcgaacagctttatcgaccagactcgtttatacctcgagtcaagatggctcaagttcagaatttgggtgtgttgaatcatggtgcgtgtttgctgtttccattgtagatttgttctgtcaataacatctgtgattttctggatcggtcattcagatctcactcctattgtgcttcccttcttggacgatgaactgcatctcaacgactctcatgtctcaaatacatccagtgtttcggatgaccgggtcaagcaacagcagtttgacgagaacatctttggggattcgaaacgccggatcccgaataggcctgctaatagaagtcatcattcagcgtccagccgtctacaatatcatcgttctgcatcggtacatagttatccaaaccaagaaatccctgatgaattttctcatcgatctgcctcgcctcaatcctccatgttcggttttgggggttcatccttcaaatcccagtcccttttgcagaacgccttcagtcatgaacgtgccagacttctttcagcaaatggtcttccttctgccaatcctctgtctcacaatctccgtccttcgagaaaccaacgagatctttctcctagcccgagatcagaggatcctccggctttaccaacttttgccaagcgacagcttcctgcccagaacacatcggcgttatctgcttcgctcgtacctcctaatccgatcccttcacgaatgacaaatacatccagaacgtcatcatcaggatcggtggcctcagcggtaaccgtcaaacctcaattcaaagacaccgctaaagacctgttgaagcagttgtcaaaagacgaagacgaaactcatgaacctggaccagctgtggaagcaccagtggtgacgaaaaaaccatcaaagccgaattttgtctcaatgatcggttctcgcttcttctatccatttgtctcttctaccccttctacacctgcctcaaaagcccctgcttcgtcgtctgtatcaagtactacaccatcagcgtctcgtccagcctcacctgctccttcatccacatctcatcggtcgtcttcaaaaccgagcaccgtaccagtagtcgacactaaaccaatgtcttccttatctaagcagaccaaagggatcaagccaattccttcgacgccggaggtcaatcgatccgagtcaaacccaatgattgtcattccacaagcaattcctcgcgcaacgccctccaattcggtccatcccactcctcgaaattcctataatgcacgaatgatggaggcgcctgctcactgtgctcatggtagtaacgctaattttgatcaaccacaaagacaaaatacgacgcgctccactcttcggccgtcagccagtagtaagccaaatggatctgttgtcaaacactggattacattggatgagaacagaagatggcagcatgtcgtaccaggaggagtctatacccatcaaatcaaatggaaatcgatggttgtggtaagcacatagcttcatgtcaatatctacccatgactctgagaagatatctaagtcataaggtctttctcttggatcatcatcacagccggcctgtttgcccattacagccacagacctaccaagcgatgaatttttagaggagaattttgttgagtactctgcaaatgtgcgcgtttttttctccttttttctcgactgctctcaaaatttagcaggtagacatgactgattgactttgctttttctacagtacccgatggagtacaaagatgaaagtcctttcatcaagcccaaggatgggaagatcacgatggagatggttgtgagagagatggcaatgcagcggtgagctccacttgtgtgaaacgctatgtggttgtcaatcgacccaactgagatatctagttccttatcacagtctcgcacaagggtttcaagctgtggtagcatcttctgattccgttcctgaaattcctctgccagagccaagtttgatcagggatgacagacacgtccatcgaaaacataggactgatattctccaaactgaaaccatccgtaaaaatcgcacgactatccctcttcctggaggagcgtctgaagctcttcgatcaaagacatctattttcctttcctggtccaacaccatccataggttggatatgaatgaagaatctcaatccatcacagttcgtcggtacgtgtttttctgttacgttcgcattccgatgagtaatatggtaattaatcgtggtggatactcaatggacaaaccatacgtcgacatcagatatacccgaaaacccacgtactccatagcacccaaagaatatgaggctatggtatggacgcaggggtcgtcgggcttccagaaagtccaggcgtcattccactatccagtatgtcattctcgatgtatagatttgatcacaccttcctaaaaattgatcgttgacgtgttcgacctataggcagcaagactagcttcgttcaattggagtaaactggatgagaacatcataggaaacgcgattggacccgctgatataattcatggtatcacgttatggcgaacgcgttatatcctcatcccttccgagaaccgacctagccctattgtgctcactgggaccaactcacttggagaaacgttgagcttagatgaggtatgttcaaaatcatcttgatgggcattatataccaactgatcactttgtacaaacttctcttggatggcagatttatgttgagggggctcaacagcttgtcgctttgttcgcaaaagctcgatggcaccctagtgatgaaaaccctgaaaactttaagaccatcgaacttcttcaaacaacgctagatccctcaagtgagttttttggtcgtcaagaggacgcggcctgttctgacttgcaaactgtattcttttgtttctagcgtgttggttggaccaagtgttattgaaggaccttcggagtcggcaatctaaagcagcccctcaacggaataaactgttgattagcaagatgacgttgcctcagctgatgaagtttgtttcagatccaaaaaccggcattcctttgaaggacttgttctggaactttgatgtttatgtaaggaaaactgatctgtatgagttaagccatctcttgactatcactgaagtagcattttcttcaattttaatcgacagcctgacgctttctcgggcgagcaattagtaaattggctttgtgaaaacttcagagatcttaccactagagagcgagcaactgtttggggctccaagttgttcgatgaaggatttgtcgctcatatccataacaagcacaaatttatcgacggtatgtggagactcgataattcactcagtatatctgaccactcgcaccaaaaagacattcttgttaatctgataattatcatttttttcacaacaggaaactatatctaccaacttcatcctcctgatggtcctcctcctaaaccgatccgaagttggttccggtctaaatcatccagcagctctgccacagctccttccacgcctacgggatcgctcaaagagcgaaagcctctcgagatgcaatctgatatcgtcattaaccttgatcctcaaggtcgaagcgatcgagccgagacggcttacttgcattatgatgtggctcataactataagatcgggtatcactttgaaatttcttgggttggatccaccgcgcaattcatcgaagaaatgcggcagagctggtcccaaaagatcgccaagtatggacttcgtttggttgaatcaccgatagagcagatcagctcgatttccgtcagaaatgcttttagatcttgtcacaagatcaaattggctttgaagccaccaacggaagaagaatttaaccccaaccttccgttcgaccgccggccgacgtgctattactttgagtgcgcgcttctcaccgatttgggattcatcttggacgttggtcttgtttttttgattgcattatatgtattgaatcttttactaaattcagtgctgaaccttgattttgaactggctgtatttatctcaaaaaggctgagtctgataagcactttgtcaagaactccgtcaatctgcattatcaccgaaaagcggcttatgattactcgcagtcagttgatacttttacgtgaccgaagcacatcgtctcactctgtctcacaccatggctcttctctcgaatctaattctctcttcttctttttttcaggttcgtccataaatcgggactcgcatttgtacaagtactggatgatagtgagggcttcttatggcttgaaaacagtacgtttttatctttaatcgctacccaatccctccttctgttttttttttaattcaatgtatgttctctcaatagtgctaacgagaactttttgttttcctaaaccctatttgcgggttcggtcactcttctgcccgggtagaaatgtttactgagacgacgaaagaagctaagagcgcgggccgaagtacccgggaacgagcggccgagcttctggctcatatcgagaggatatgttcttccccagaggttttgcaggttcattatgatacagcgaggaaagctagggagattgagcttcgatatgttggctgttgattctgagatttcattgaaaagcgccggagggatttccaaacgactgatcttttgtctcagatcgattcgtgttatcaaagcttttgtctttattctcggatcagaattaggggaaagcaagaaaagaaacaagaacaagaccaagaccaagaccaagacgtggagaacatagtagaagtgtatatcccaaattcccaatctctccgaagaaagcaaagaaggaatacataaaaagaagaaaatgacaaagagagaaaccagggtgaagaaactaggaaagaaagagaaaagtacatgtctagagaagaagagggaatcaacaaaaaagatgtgggagaggcttgtctttcagaggttgataagatgaacagaggagatacaaaaagcggcggaagttgatagatagcgaaaaaagaaaggggggggaggttaaagaggagaaggagatattacaatggaatgtgagactataatgatagaagaggtcaaccaaacattgaacgagaaaggatcaagatataggaacaggggaataaagatcaaggttgggtaaagcagaagtaagagaaagaaagagaaaaaaagtcctatttggtttagacgagagggaaaagagaactaaaatggatcatctatttgtagtccgagctgagaccttctttgatttctttctgggtgatagcctcatctttctcttcctctctgatcatcgccatttgagcacaagaaaaagagaatgaaaaattatgagcgattaaagtaaaaagaggcaagggaaggaaaaagtgagggagaagaaagagggatacgaactgtctccattttttactcctctccaccgctcgtttccaacctttccactttcgttccctctgatcctctggcagctttggttcaaactttcccatcgccctcgcattcaccttccggagcgtctctggtttcgaaatgtcccatccaaatagaccgatggcgcttcctgcgagaagagctgatcctagagcggtcgatctgaggcgggtggacagtcaaaaggaagtcagatactatattagtgaccgtcgagaaagggcgacgttatcaaacaaaaagggaaaggaaaggaaaaaaaactgactctctcatcactggacgttcaatattgaaccctccgatatcggcctggatctgcatcgcatgatcactgttggtcactcctccgtcgacccgaagcttcttcaacggcgtatcagaatcggcccgcatggcttctaagatagctcgggtctgatggtaacggatgagaaaattaaagcagaaaacatgagaagatttcctcagagtcagcgtttgtgaatcagaatgaatgtcagttttgatggacgaaagggacgaaacctgataagcgatagcctctaaagtggctcggacgatgtgcgccttggtcgtataactcgagatcccgatcaacaaccctccggcctcagtatcccaataaggagcgagcagaccagcgaaagcggtgacaaagtagacacctccggtatccgagacttgagatacgagatcatccacgtcagaagatttatgaatcagatgcatctgatctcgcagcctgtacggaaagaaaaggcagtaggataaaagaggcttcagagatgtagggttaattgagaacagacaagaaaagaaaaactaaccatttgatggaagctccagcaacagctacacttccttcaagtgcatacaccggtttcgagtttggtccggcttggaatgcgacctgggatccattttaaagacgcagtaggtcgagaatatcatgaaattttgtcagtcactctcttccataatcatttatgaacagaaaattaagttaaatgaagataaatggaactgaattaaaactgtcattgaacgcacagtacttataagaccatgtttacttcgaataggctcatctcccgtctgtttgaagcaattaaaaaaaaagaaagagaagaagggaaaatcttcaacaagttgccccaagaagaagagagagatccgacaggagggaaacgtacgttaaatagaacgaatgctcccgttccataagtcgcctttgcctctccgaccgccaaacacttttgtcctacgagcgcggcttgttggtctcccacaattcccgctatcggcacaccctcgagcggaccttcgaagattgttccgtagacttctgaagatgatctgatttctggaagcatgctttccttcagcccaaagaatgccaagagcgagggtgaccaggagatcgtttgtaacgtggtgaggagcgtccgacaggcgttcgagacatcctggatgtgtaaaccgttctcgattcctcctgtcagattctgtatgtcggaatggtcacaaccatagaggatagaacgagacatgtcggagatggatccgagggagcaggcaaaaatttagtcaaacgagtctagatgtcggtgggtgagaagaacaaactcccaagacgtacatagacgagccaactgtcgactgttccaaagcacagtttgtcttcctcatgagcctttttaatcgatggatgagcatcgatcatccatcgtagcttgacggcagaaaagtaggttgatagtgggagacccgtgctggatgatgccgacacacatgcatacaaacaagggtgtcagacgcgagtctttctgatgtctgccggaagtgattcacttacagctctttgattccctgggtgcccttcagaaactttttctttctgccttccccaccgctaccgccgccgcctttatcatcgtcgacctctatgagaccttcgagcttcaactcgagatctgacccgatgatttcgatgccgacatcatccaacagccgttggtatcggtgaatctctgaggccgtcctcgagtcatcccatacgatggcgttgcacatgggggatccggtctccttgttccacagcaaggtggtttctcgttggtttgtgataccgagcgccttgacggactctcggtcatagccgaggtcttccatctcttccaccgcgccttctatgcagtcgtatacggattcaaggaggtctatcggatcgtgttcgtgccatctgaagggaaccaaataagacacgagtcggggcgggtcataaaagaggagggtggggaaggtttgggaggaggaactataggtaagtctcgggtgaagaaagaaaagaaaaagaatagtctgaactagatgacataccctggctctgggtagtgttgagtgaattcgacttgatagctagatacaatattggcaaattggtcgactatagattgtgccaagggtcagagagaagaggatatagagagagggagagggagaaagaaaaagaggaacagggcgtgagattaagtgttatgttgtgaatctatggataaactgatcggacagaacgggaccgacatatgatgaatcttgtggaggttgttccaacgtcgagagctctgcgatgaatgtcgaccattggcagagcagagcagaacggaagaggagagaaggggaggtaagaaaacaaggtgaaaaagagtcggccgtgacgtcaggatgagccagaggagaactgattggacaaaggtacaaatcatagaccgaagggtctccactgatgtagaatcaaggaaggagacatacccgatgaactctgctttgtctgtttgatcgatgaagtcggggagagaacggaagcgaggtcgaacggacaaaggaccagagccgagattgaaccggagagatggttggattcggtaccaaaccgagtggagtgacgacgaaagacgagggtttagcgagaaagaaagacaagtagaagaacgcgatttctgtcagcacaacctcaggtgtgaccatgtatgccctgctcgtccagaaaagagcagagagcaaagagaacgaagagaacgaaaagagaccatggctcgagagtggacggacgagaaaaggagaattttaaaaataaaggaagagaaaaaaaggccactaacgactgggactggccggacgactaggcaacctgctgggtggtaaactctgagcggggctagcaggaccgttctgacttgctgagactgaggacaacggattcatagtatctggacaggactggggaatgtgtttatggctgatggttgatgagttgatggtcgttggagatggcaaggagaccaagattgagcagcacccagaacgtcggcggggcgtgaacccggtccgctttcgtgccggagcggggcccgtggttacgggcagggccttagccgggtatggctcggtggttacggggtggttatacaatggttatgatgtggttatgatgcggtcaaggataaccatgaatggttatggatggttatgaaacgctcgtcaagtggctacgaggttatgacatgcacagcgtgtgtggcttcgctggcgtagcctttcaccgctcagactcacgtgtcagtcacactctcggccaattctctgcttactaagcaaccctcggtgctctcaaccttcctctgctctctcttctctactcgctcggttcatcccatccgttgaccgtccgagaaagatgatccttccagatatcctcgcaaacactcaccatcagccgacagtcaacccactgacggtaatcacctcatcctcgcactctatctcgctccttccgctgatcgcagagtatgtctctctggcttcggtcgaccggaagacgatccttgtctcggcgttgtacgatcctaggaaactcggcttcaaccctggggtcccagggttggtaaacatcgatctgtcgagtttcattcccggtttcatggacgaacaggatgaggagcgtggcaggggtggctttcaggatgttcttcagaaaatcgagctcgctgtagatagtcgtacgtggtttacttttcgttgccttttctttctgtttctctttttcttgtaatgtgttcgatccttgctttcaagctgatctctgacggggatgaacgttttttgtgtttgtttgtttgtttttcctcatctcgtctgctctgtgctgctacagtcgggcgctcgccggtcaccatcattattgattcgccagccaccttggcgagcaactttggctcgaccccgctcttcctcgtcttggtccagcgtctgctctcatcattgaccaagattggtacagtcctttcagttttctgttttgtctgactcgcagttggttatcagtaagactgaaggatcatttctctctttttttatgtttatttgtttgcctattcattcatccgtccaaccaaccattgatcgaacccctcgcattcagaggcatcccagttgatcttaccgctacctccttcgtcgagcctgttggctcctttatcgagcacgacgttgtatccgacgctgaatttgctcacccttcatcctcccccgctcttcccgttcatctcccagacgtaccatctcctgcccccaccgagcgaccggtcttcttcgtcgtcgtcgtcgtcatcgatccagccggcctcaaagttcttcaacattctttcctctctcacagatcgtcaccaggcggacgatccgtcgtgcttgccaccggacggctcgtccggctggtcccagggattcgtggtcgagctgctgatcagaagccggaaaggtcggaacggggtcggacggtacgtcgaagggatccgtcgggtggacgggccgtctgtgggctcttctggactgtcgaaagcacgagcgcggtcgatgcgcgctgtcggatggaagacgatcgagggactcgatgtccttctctcccggggtgaggccgaccttggtgggtctgatccgtcggcgacggcgggggcggaaacgaaacaaagcttgccgacgtcgtcgttcaacctcggactgacggactcgcagaaacagtccagatcgacggtcccgatcccttatgcgcacgaaggcgaacgatctgatgatgacgacgacgaaggggcggatccggccgagtcgactgggaccggaacgggaggcatcttctacgagccggacgaaggggacgacatggatgaggacgatccggatgaggacctagagttctgagtagagcggagtgggagagaaaggtcggggaccgaaagaacgagaacgcacagatagatcgacctaaactagatgtcggcaagaaattaaaatcgatggatatatcatgcgtatctttatgtgtgtgtgtgtgtgtgtgtgtatatattacgtccgtccatcttcagtcgaagtcttctttctgcaacagatggattgaagagaattatgaacgagaaccgaattcttagcgcgtagaaaatcgacgaataaataattaaatatataaatttggatggagatatttgacccaaccctagcaagaaataacaatctcgctctacagataaagcccgggcgggagaccatcctagattgaatccttctctatctctatctagcagactcaggataatctagcctttggggggtttcattccgcacgatgtttgtccctcgttctgttaagcgttcggtgagatccaagcctgcaattgggtctgcttcgtcctttccagcagaagcggcggcggtaacagcaccggtaacggcaccagcaccagcaccatcaacacgcacgaccgaacgcgtcgaacccggaccgaacggagaatacgacgagatagcaagcgtgatggaatgggtgttgagtgatggttgtctacagatcgatccgaacgggatgggtttcgccaaatggatcgatcgtcatcgtggttgtttgtccctcctcctcttcttctttttgttccttttgttttcctctacttttattctatgctgctttccttctatctgtttattcgtcttgtttgaggagaaactttgacaggagggaacaagaaccaacaagctgatatccatctcttcacacttgtcaaaaaccacctctgctgggcggggcggccaagaaaagatctaccgatcaaccagatcctctctgacccgtcgttcggacatctgtccgtcccccaaccggtgaacccacacgcgctctcgctcagccttcgacaccgagggatcctccacggccggctgaacctggtcgagccaaaagtgtttgggagcgcgaagagcaggaaggataccgagggtgggctttgggtcggcagggtggattacgagcacgatgcgttcaggcggaaactcgattcatgggatgcactttccaaagagatgtcggatgaactcgagctctatgtcgttcgtcccgatttctttattttccttcctctttctcttccttgatttgtctttcttctttttttcttctttctttctctcttttttaatttcgtttcaaagagacaaactggtggctaaatggttgcggggtttgtgtatttttcttttcattctatactttttttaaatttattaaaaaaaaaaaaaaaaggaa

SEQ ID NO: 2237 - DNA, 401 bp, Xanthophyllomyces dendrorhous
aaaaaaaaaaaaaaggaaaacatcccacctagccaaaagacatacgttcagatcctctcgttcgtcaacacgctgttcggtccatcgtgtattggtgaaggggaaccgttccgggtggcgtctctgtcgtttcctttgaaagcgaggggctatgcgtttgtgtgtctgccgtcgggacaagaccgggaccgggtgttggatgcatggtcttgggagggggcgcgcgagcgggcgcctgggaaagggaagggcacggaaagatcgggcgagggaccgatcgagggtctgcagaaagaagctaggttggccgggctgagatgtctgcctaggtgagtgtctctggctttgatgtgtgtgtgtgtgtgtgtgtgtgtgtgtgtgtgtgtgtgtgtgtgtgtgtg

SEQ ID NO: 2238 - DNA, 3110 bp, Xanthophyllomyces dendrorhous
tgtgtgtgtgtgtgtgtgatttaacttgccaatgttgacggcgcgtgtttgtgtatatttgggggggttctacatctctgtgatggcataatagaaccgagtacaaccgattggagaaggaatatagggcataccttgataccagaaagcacgcggagagcatggagagaagagcacggaaggacgttggcacagaccaggccgtcgaatatgagtcggcgtctggggatcctgattccggtggtggtggtggtggtggtgttggcgagaaagcgccggagcgagggctagagactcggttggattatccagaaggctgcctgttgtttgtcagacgattggatccggatacgtcaaagacgacgatcaaggatctgtttggggccattctgagagagtccagtaagcaaggggaagaggagggggatgggatggcaaagggtaagggtaaggatgaggttgggtatgttgattggatcaaaggcggggattcggttcgtggtcgatttcttttgtttctttctttgtcgtcgtcgtcgtaacgaggcccccgtttcagaacaaaagaaatggaaacaaaagaagaagaaaaaaacaacaacaactaaactcaccttttgctatcgctgtaacagtgtcatattcgagttgcccatccatcggtatccgagcggataacaagctttctctctagccgaccggtctttcatctgccgctttccacgagtttaaacctggctgatggtctagctttaccgagtgcaacgacggtgcctccattgtctgggtcggggccgatcgaggtcgagatcgtgggcggggaacgggaacgaatctactggatggggaacgtaaaggagagcgtccgtgctgaggccgtccgggcggtgcatggttcgggtctgtccgacggggggagtgagggaagaaagagaaagcagcctgagcgggtcgatggtgggagcggtcgagggaagaagccaaagtgagtgagtgtgagtgagtgtgagtgagtgtgagtgtgagtgagtgtgagtgtgagtgtgagtatgtatatcaaagaaccatagatttgctattatagtgtgtgagagtgagattgagagcgagagagagagagaatgaacgctagggagagagcagagtgagtagagagaagattaggcactagggaatagagagagagaagagaggagaggactgtagactagagaagagactagagaagagactagagaagagactagagaagagactagagaagagactacagactacagagacagttcatacagtagagagaagagagagagagagagagagagaagagaacacacaggcaccacacacaggcaccacacacaggcaccacacacaggcaccacacacaggcaccacacacaggcaccacacacaggcaccacacacaggcacacactcacaggcaccacacacaggcacacactcacactcacagtcgatatatagactccaaacactacacagattataagagagagggagagaaagagagagattgagatcaaagagactagggaaagactgcgcacgggagaggagaggagaggagagagagataggctggagagactatagagagagatagacacacacacacagagcagagggaagagaaggatcatccctcaggcacacacgttaggcacactcgttaggcagcactcaggaacacacgctagccacaggcacccaagccagacacagaaatagaatccccccccaaaaaggcagcagagatcgcgatcaaacactcgaaacagaaacacaatccgggcaccaaggcgtaatagttcaaccctctcgccacacggccacggacaccgacgcgggaacgatcacgatcatgatcacgcccgactgcgcacaggcacccccatccacccacaccccttggcgatgacgtcgatcgtctgaagcgttcgtcgaggtggacggccaaagaagaaaaaacaaacaaaaaacaaacacacgacgtcatcggtttcaaccgagcccaacggtttgtgccttcagccgagcgcagcagatctctctttaaagtgcgtgcctgtgccctttttttctttcccccttctctccctctctcttctcttctcttttcttccctcatcaatccccagaccttttccatccacccacttgctcatccatccatccatccatccatccatccatctccacactcacatacacacacacacacactcacaatgcaacaccacagccatcaccaacacgacaattcagacgcacagacaatgacctcggtctcgagatcccacaaggccggtagtaccatcagcagatcccagtctctggtcagtctttctttcctaggcgttctcatgatccgtcctgttttctcctatcagcctttttatacctcttttccttctctcgtcatcaaccccgctcttatccacacccactgaccgaatggccttggtctcttctctctctctctctctatgtgttcacacaatcccgtcgccttcttcgtccccctcccacagatcaagaagaacaccgcgttggctgatttcaagccttcagatcttctcatcgagcgattcaccgcttggaaacggttcgtatctcagccccaccttctttcgcgttctctcttgcccgccacccctggtctgacgtgtttgatttacccggtctggcctttcttggtatccgtcgcctcgcgtatccttcgtctaccctcaggatcacaaagatgcttatcggtatgctctcttcatcttttctcttcccgcccccttccgtttcctcttctctttctcccatctctcacaccttatctctctctccctctcctttctttccctctctctgtctccctctcctcttctcctcacagcctactttgagggaatcgccgacatcgagaacaacaccgctaaagagttgaccaagctcggagccgtcatccaagttcccttccaggccggaaaccagtttttgggagaggacggtatccaggtttgtcttgtcttgattctttttcccttctcccttgcccacttgctatcaacacgtccatagattgacccatattt

SEQ ID NO: 2239 - DNA, 416 bp, Xanthophyllomyces dendrorhous
ctccaggacgtcttctactctgttcgagacaagacccgagtgatcgccgactcgcacgcctcgctcgcaaagacggtcgagggttcgatcgtccagcacctccaaaagctccgagcagagatcaaggctcacatcaagaacgtccagaacgataccggccgactcgccgccaccgtcgccaaggagcgagagctctcgacgaagcacatctctgacctcgccagagccatcaccatgctcaagaatactcccatgaacgtcgttcctaaggatgacccctacgcccagaacactgtggtcctcaagcagttgcagaagcaggttagtacaatcatctccatttcctccgcccacgatttccccctctgtttcttcactttcaatttcgcttacttccaaccctttcccctttcccc

SEQ ID NO: 2240 - DNA, 21062 bp, Xanthophyllomyces dendrorhous
aaagtcgatcatcatcatgcagcagaactctgctcactttgaggagggtatcgtccgatcgattcagtccgcctggtcgacgttcgacgagtggcagggccgaatgtccgtctctgtccaagagacctggaagcacctcggcgtcgccatggcccagatggagcccgacagagagtggatcgcgttcgccgccaggagcgaccacctgttggacccagagaccccgctccgaaacccggaccacatcgattaccccggaaaggacgacccctcggtcgccccggtccacgtcggtctcctcgagcgaaaaaagcggttcacaaagacctacaaagagtcctactacgtcctcacccccgccggatacctccacgaatactcctcctccgactcttactctcacaccacccccgtcttctcgctcttcctcccggcctgcacgctcggtcccccctcgacctcgaacgcgtcccgatcccacaagttccacatcgaaggcaagcggtcggccgctcctacccaatccgccggtggtcacattccgttcaagattcccggccagaacgagaccgcctacacctttaggagcaggtcccatgatgagatgatggagtggtggaacgatctccgcatgctcgtcgcccggtacctcgtcgcttccgagcagatggagaggagtggcccggtcgccgccgccgtccgatccgtcggttaccgatcagaggaggaagagtccgaggacggaggctcctccgtcgaggacgaggaagagtacgaggagaaccactcggtccacgagacctcggcccaggtggtcgagactgaccaacacccggtctccctccaccaggccccccagtacgcccaggccgagtcttcccacacccacacccacgccgagacctccctcgcccaggccacgagcggactcgagattggtacgaacggatacccgatcgagaagaagccccagccggatgtccacaactctaccgcgctcggccagcccatcacctcgaccggagactaccgaacggagaccatcaccaccacccaccaccccgtgtcgaccggtgaggagtcttccatcatccagcccgccggtaccaccactaccaccaccaccacttcaggcgatcacatcgacaacaccgatgccgtctcccagaagggtcttctcggccgattcgccgagggtatgggtttgagccgatgattccatcgtttctttttaatccctctctctctctcgcttgtctgcttttttgatttcatgtctgcaccggtcgtctcaatcttgatcaaccgtcttgttcgttcgtcctttggatctgctcttcttgttctcttgtcttgttctcgacatctcccttataatcatgaaccaacctctctacctacatagttaattaattctgtagtcctttcttgatctctatcgtggtctcgaacgcttgtttcgtttatctgttcgtttcctctttccctttgtcttgctctatagtttataatcagtatggattctcttctttgatcgttcccgtctcgagaggcgacgcaaacaagaaaaacaaagaaaaccctacgccaaacctgtctgattgaaagctgatcgttcgctttcagctttagggggttggctttcgttttttaaactgacgatgatgatgatgatgatcttcccaaccccgcagacgtcaagaggattgatcagaggtgatgtccctattccccgggaggaggtgttggattagcaaaagcaaaagcgaagcgaaacgaccaacaggactgatatagaggcgcgacgatcattaagattatatagcaggagtccgaggaaagcaacccaaccgaaccggaccggaccgcaatgatgatgatgatgatgataagaaaacaagtagagggcaacgtgaaactagttacacaagggatcccggcaaacaggagcaagataggaccgtatggttccagaagaccaagcgagccagtatgatcctttgaaacaagattaaaaaaataatattaaagaataaagacaatataacgcaaaacctgaaaacacggaaactatatgatactatatgtcccagaaagcagcgctgagaggcagaacgagaaaaaaaagtggagagcagaaggggaggaagaagaaaagaaagaaagaaagaaagaaagaaagaaagaaaaagctggtacgtactcgacccaagatggtccatctaaactatgtccgtccgagtctatgatacctatcgagtgtccttgtgagaacatgaaaccgagttgaatgaaaccgacatgagaagagtacgtgtctacacatatgtgtccgtgtgtatggaaaagtgagagcgaaaagtgtgacgagagagataggtgtgtggtttgatcgttgcacgaagaacgaagaataggaaccaacaggcctgatcgagggagcatcaagttttatttatttatttattttattttaataatcaatattttgttaacacaacatcacttcccactcccatcctctcgatgaggctccgaagtgaacatagccgatagcggggatcgaccgaggatcgtccctatcgacgatctattctgagaggaaagcctcgaatttgtgtttcgatgtgacgggggattcgatacgtctttgttgatgtcgttgccggcggtatcatcagaggagagtgtcgaagaggaagaagaagaagaagaagaagaaggaagagacgtgaaagtgggagaagaaagttcagagttccagatcaagggcgagccggaagatgaaccggttggttcacatctactctgtcgagcttcccgtcgagtcctcaagatctctgacgccgcatccgaagccgacacctttttcgcaccggcgctcaaatctccattcaaagccgaaaggtttcttgcgctcatccctgcgcttgcacccggccccgttcgttcctttgacgacggccgggtcccagaaccatcgtcctgtattctccatcgtccactagcctgtgagattcccgggccggtgtcggaatagagatctccaacgtcggtcatcgtcggcgctgacgttccatcgattcccatctcgacatcatccgcatcttcgaatcctcctcccaatagcgaagatgaccctcgtttcagcaccgatagtctgatggtctctaccggaccgtctgcaccgggactgacgacgccggtggcaccggtaccttctccgccattgccgccaccgttctcaacctcggtgtagagcggcgcggctgttgaaaagtaagagcccacactgcgttcactctgataagacaccgttcgcttcttggattcggtatggatgaatgccgcatccggcgaggtcagtgcaggcgtatagtggacttcggaggacgatgatccatctggcggaagccgattgaatttcatctcgcgtctcaagcgacgtttcataacaaagaaaagccatgcgaatctaagtttgaacgacaaaacacttcatgttagaggtcttgatcgtcctgctgctaaagatggtgcgctcctcgcttttgtatatcctgatctattcaaataatgtaagatcacacttacattgccaaacccaagcagacgacacagccaacggcgaggcctacgatcccagccgtgttcaacgccctatcagaatcttgtggttttgtcgatcccgtagccgaatgagccccacttgtcgtgcccgaacctggggcaatctcctgttcgagtacacggacacgttgaaactcttcaacggcgctagacatgttcgccgtcaatgaataaagagagagctgaggcatttgccatgcccccgtttgagtataggaaggaccagacaggacggtatctgatggagaaaaagattcttgttttcaatgagcggctccagtaggcttgcagcgacgaggtatcgcacttacagacattccgcataaaggcagcaccgaggacacttttcaagttttcaccaaagtcagcattctgaatgtatgtcaaacgaagcaaagaaaaaaaaggacaaccttttggacttacatgtctccctttccggctaacgcagcaggtgttatatactgtaaatttccctggaaagagaagacgccgccaataaaaccagccaacattttgagcgcctgtctttcaaattgagaaccgatttgcggaacaaaaaaacagctcactatgcaggtctggtgagtcgagtctcctgaggtatatcctgatagatctactacggatacgaggaggcaacgatgagagcgcaagtgagtagacagtccaagggaaaagctccaaaaaatggaagggttcgtacacggatgaattggaaaggtgccgatggtggatagggtgattgtcatttggattgctgtagtgcatggtatatagtctgtggggttcgatagtgatcaatcgtcagaacagaccacacttcatgacaggaaggcaaagggaacgaacaatttccatccgatgccggctgttgaccttgactaccatagatagcatctagcagatctcggttgcttgtgtatatgttttgtgctccagagtcctaaaaagaagtaaatggttcactcgtcagtcgagtcaattttgtcgatcggcctctgataggttccgacaactggcggattcagagttaggaaagaaagggagtgaatggtatgctcaccaggatagcaaccggccaagcgttgcctggtaatctactttgccccatagctatcttaacctctttccccgagacaccatctatcacagaaattgaacgaacaggaactctccagaataacggctgacctgttggtccttcgattattgaactccatgtcatagaaccctgacatgacgcgtcacatatcgacggaaggtgagatctgacgcccaactgggagggaatccttggatccgacggccgagctagggatagtgagatgaaggaggttgtgtttgaatttgttggatctttggaaccatcgaacagccctcgggaagaaaggtcttctgattgttgacgacgacgacggcggcggcgccggctcgaagggtataaccagtagtcttgtgatgggtcggtgacggggaaaggaggaatctcaatattggacaacggacctaggttccagggagattggcttaaggtgtttgcgatctgatagtgtattgtcatttcaatttgttcattcaagaaacacaaatataaggggtttcaatacttgtttcgacctaaatggagaatgacaaggatcttggccggcttacgatcgaatttccaggtagagataggcccatgactccagaatacgctccgtttctcatatcctggtttacgacatcgtaggcggcggctgattaatattcatcaagaagaagaacatacaatccaatgcggtcagacaggatgaagacaaaaagtaatgtaaagagctaagcattttcgtaccgaatgctggttgtatcaacgtaaaaacaatcgtgtttaatatcacgaatggcttcaggtagaacaagggaaacacttgaagaatggctgaccttgtcgaggaaccttcctaccggcgaactccatctggtcccaaaacacgcgtcccttgatcgttccgctaacatagtcaatcgagaaatccgtatcctaaacggcagagggtatacgaaaaaagagttgtatacatatgacgcgaacaaagtcctacagatatcaacgtaatgaacaacgcaagagtaacagaggacgacgaacagcatccatagatgtggaggagctcgaaggattatacaagtgcacgttttgacagcttgaacttgtacaactcgaggaagccaaccactagacaatcatgaagaaaagatttgtgaaagagaactcagtctatgtaaacattctcgagagtattgagtgatcccaagagaagcgtcagagacaagaacgcactagatcagatgaaccagtgtcgacctggaccatataactggttcctcctatgctcacaggcaacgtgtagtaactagatttgcgtcggagagacaagacagcgaggacaacaggaccaacatgagacatgacattgttttcagaaaagtagcagatgttgtgagctcaggcataccgccagccgaggcatttaaagaagtgtcaaaaaagaaagaagaacgaaaacataactgacacgcccgtactagtgcttgttaatgtcaagtccaaaaccacaggtttgttccagtcggatacgtctgctctcggtgagaccgagtctctctgtgttaaatgtctcgaaggaagaggggaaggaatattattgagaagcatggacgggtgggaggtggttggcatgtcgatatgccggtctgtcaaatcatctggttgttgcccaggaagtgatcggtgcgagttcctctttcttctgatcttacctttggtgctgtctgttgatcaattttccacggtttgtctctctgtcttctttctaattctttccctttttctctaccttctctatgttttctttcacatttgcttcttattctttctattcttcgttgaactcgcgatcgcgaaggagatagacagatcaggtgagactgtactggttctgatgagtgaccgatggtacagatttccgaccttgtaagacctcgagtcgaggaaggggtttccctccgaacaagccgatgctggtgccgacgccaaggccaagttccccggtccccgataatccgggttagtgccggtttgtcacatttagtcgatcttcgaagatgtacagtcccattcgtccatccatttatatatatcggacgcaacgattgttacatgttacatatgtgtatgccaattaagttttcatcatcggtagatgaacatgcatagagcacacagaaatacaactttgttcacagccacgacatgaagaatgaaaaataagaaatagacaacctcgaattgaacacagatgaagatgattctctggagagtcgggacgacaatcaagtccagtacttgaccttgattccagcaacatcagtctggaagttgactccacctttggcggtgtttccacttgaaatcgtttgttggtatcgttcctgctggtttcgcgaaaagatatgtttctgtcgttcggctattaagaacaatacatgaacaacacgattaatctgtgaagtcacagctctttgaactatcagccataaaatgatgttatggccactcaccaacccaagctgtaggaggttgacgcggaaaacgatagaaatgctcagaaacacaaatcataaacaagttgatagaacgcacatctgcctgaaaacagcaagaaaaggcttacttttgacggtaatgggggtttccttctctccctgctgcgcaactctgtcatataccccttccgcactcaataccgggcttttctccacaacctcgaccaagacatcgttattaggtctgacgaaatacaaaacacctaatcgatcgaaagatgcttggtcaggcggaggagaaaccactcggtggacgctcgacttgagatactctccactgaggatctgcagggtgtcggcgatgttgacagtgatcttgaagcaataattcgagcgacaacatcatatgtcaggtttcatttatctcaagaaacagaaagcctcggcttgtagaaattgactcacagacccagggagaggcttgacccattgccattcgttgtctccgccgagtacttgtagagcagccacaggctgcctgaaaagaagggtgacggatcccaaatcgctaaaatatgcactcgtcgtattcatcagtcgattgaataaaaacaacgacgattttgaaaacgaaaactcacgtatgaccgccagagtatagcccattggctttcgcgttctcttcggacgaccgggctttgtatttcatgtatctcaagtctgtacaactcaaaagtttcggcgtctatcattagatattgctaatcttgatcaaagaagtagaaaaaaacagaaatgacgaacgatcttcagaattctggtcatagcggtgtcgcttgacaaagtattcttgatcctgtcgtggcagaagagaacaatatgttttttcaaacgatgcacttcataagactcagatagaacgatgaaccagtatgatcacttacctcgagctcgagaacgatggcgaagatgaccaacagcttctctatgatttgagtgtggattctctacaaaaaacgaaacggccgaattctatcctagcgaatatacaacggaacaaatgatggtagaaattcacctttccgaaatcgaccacactatcccagttatctctgataggctgagggtggtttttatgccaatccttgaattgctccgtgaacttgggaatgttgtaaacctcaacattgcttcgcctctggaatccattagcgccggccctgttttcccgtcgaacaaacagatttctttagtcccagttggcttatgtaaagatgaaggagtcaaaacttcttactggttcttgaaatgaggaagttcagggccctgtagatcccgaacaagaagaaaacacgatagttaagtttgacggtctttccatcacgagggtaatcatactgtctttgggggtctctcacagtgtacccattatatcctgttgaaaaataataagatgtgggatgagatcaaaacttcgagaaggtggttgtttgtaagtgctgagcagaataagggttcttacctccattcgcatgatctgctgcaaactttgctttttcctcgaacggaaggtcgaatacctgtttgcccaaggcaaattggttgtcgacttcctcctgagcgaacccgaagtttacgatatagaaaaagccctgttttaaatgatgagagtgtatgcgatcgcatcaatatcttgctgcattgctgactgatcggaaagaaaaaaagaaatgatgcttacaacgttgtgaaccgcatcattgagctgtttggcaagagcttctttgcctcccggttgatcgaaagtcgataggtcaagagaaaccagatcggcccaattgactggcaatcaaaagcaacgcaagacatcgaatcagacgggctttcagcagcacgccagtcaaggaagagaaagattaaacataccattctccttggtctcgggcaaggtagagtacggatgctctttggtaccgtaaatctgactgggttgaacgtttgcagtagtttcggacatgttgaacgggactgagttgtagaatatatgggtagagaagatatggattgagaaacagacgacaagtatcgtacgatgcttatatactctcttacaacgctgacaaagaaccaacataaatggtgatcgctagcatgttcgttgatgtccgacgaaatccaaagctagacaaaagcataggagttgtccgatgagattgaagatggtttttccgagtcgatctgaccaaatccccgagcgagattgcgttttgtgtttttatctatcgctcatgcccgacagataagataagaagatgtcgtccgtcggaatttaccactagtcttcgccttctattcacctttacctgaccatggtcgatgatgactttgactgctcaagcacgtcagcaagtaaaaaaactatgtcggcatttttcttccgggccttgaacaacgttttccgtctgaagtttatcggttaaagaaggagatgtcaatggacggatcccgatgattgactcatccgtcagtttggtattgacatatgaaagataattagccggaaatagatggcttgcttggtcagaaatcgacaccataatggaccaaactagagtcttacgaattcaaagtcatctgtgcttcaagggtctttgtatgtctagaacattatgtataagatggaagataaaaacttggtcgattttgacatgatgagttggatttgtcgctactttcaatcttttctcactcactatcctcgagcgactttgcatcatggcgccactatcaaagaaaactgattctttcgtcagatcaccatcggccgagtctcaagtatccaacgccttggataataaggagaaagccgtagtgggtaaagccaatgtcaccaccgttgagatccaaccgcacgactcgacaaagaaaccgtcttggattggatctctctgggacacgtatgatctggaaccggaggaaagacggctgttgaccaaagtggatgcatctatcttggtttttgcctcggtgagcagctcaccctattctttgctttgattttcactcagctgcgctgatcacaaataatctcggtcgatatgaacagcttggatactttctcaagaacttagatcaaacgaacgtcaacactgcgttcctcagtggaatgaaagaagaattgaacatgaatgcgaatcagctcgttacggcaacatctgtatggaccgccgggtatgtactcaatatccctctcttgtcctgattgtcatcgataagaatcctgatacaagtttctgttctaagatatgttatcggacaaatacccattcagttgatccttactagagtctcgcctagatgggttattcccgcggttcgtcatactctgatgatatatatagtcgtgtattaatcatgcttacgaccgcataatgataattctccgcctcagctggaactaggatggggtgtagccactctcgcgctctactcaatcaagaacatgtctgctctttacggacttcggtttctagtcggtttgacagaaagcggtttctatcctgccatccatctcttcctcggctcatggtccgttatacttctcgacctcatagtcttggtgccactgttcagtagctgacactgaaccttcagggttttggaacgatactcatatcaaacataggtatacgcctcgagagttagctaaacgaacatccatattttatgtctctggagcactgggaacgatgttctccggatttcttcagacggctgcctacgaaggactaaatggagttcatggtcttgcgggctggagatggtgagctttcagaattttgatatatgtcggacctttcttctgtcgctgatttatgattttttgacggtaaggctattcatcattgatgcgatcatcaccattcctatcgcactccttgggtaggtgcttctactgcttcatcctccaattgatcataaatttattgaaggacccttcctcgaacttgcgctttagatttgttttcctccctggacttccgtggaatacgaaagccaacttctggctcacacaatcggtatgctgtccttctttccaattctaaaaattcacttcccgaatctgatataacttgtacatattcaggatatcgatcttgctaatgcaagactagacaaaataaagagacgaggcgctcagccgtggagtaaatgtcgagtacgggaatttcatttcattttcttctttgtcttttcttcatatgattataggaagttatcgatctgacaaatcttgggtgctgttttaggtcaaaaaactgttcagcacatggcatatttacctcttgcctccgatgtacatgctatacaacaacgctattgcccaggtccgttgccaactttctctctctttgcctacaatgaagcgcgctcatccatccttatatcgtgaatcttgttctacatagacccccatgggatattggctcaagagcttcaacaacacaacgaacccacctgttcccgggcgaacgtattctgtctcgcagatcaatttgttacctcttccaggaacagcgatatttgttgttctcgcttgtttctatgcgtggacttcagacggaccgttgggtggtaggaggtggccttggatgctgttcggctcagtggttaacgtgagacatctcttcacttttttccttttcttctatcaatgcaaaggtcttgtccgaaatctgacgctgagagttatgtcgataatgtatggcaaataatagatcatcgtcaacactgtcttggtttctacacctttgtacaagaacctggcagccagatttttctggtactatcttcttccagccgctgtacgttctgccatttgtcgcctgcatcctattcaaagcaaacatcatcgcagcaattcacgtacttgagaacaaaccaacacttacaatttgttttcaacgtcccgctctgaacgtcgaacatttgcgcattgacactagggctcgataggcgcactctgcatgaactggattactgaaatcacaggccaagacgttagtccacctgtctatgagattcggcttgtcttgaaatggtttcatgctgatactttcttctcttttgatctcatttgaatgactgattggtctggtccagtttgagttcagagcaatcaccgtagtatgtctttatcacctatacccataccgccgctctgcttgctgatttgcctttccaatcgctccattttgtaaaggccacggcaaatgatatggcgtatcttgtccaagctattgtgcgcatatctgcttctgtttcctcgattccaggactgacggttccgatgacaaatactaaacccaaattctctttcatcttgtcctctctctcaggcccccaactttatatggaagacagttgatttcccaaaagctagaaaaggccatatctggagtatctcgctctcttcaatcattcgtgagttttgaagctcttgtttccacctttgagtgctcaaaggaataactttgaacccccaacagctaatgtgttgaacctttacgtttttttaaaagttctgtggatcatgatggtgtactatctcgataagcgagaccgtagatcccagctggcatccagctcatctgggtcattctctgaattcgacaacattaaggaagattcttcggacagtgataaaagtctagaggctttagacatcccggctgagccattgagtctacacacgactcgacgggagaggctcgatcactcaatcagttaaattcctccctttgtctgtatatcttctttctgttgaatattcttcgtttttctcttgattatagaacatagtaatattgttgtgataatcatcttcctgttttcacctgattagagtatgaacttttattttcttgtaaagaaaatcaaaaaatcacgcaatactgattgtgtacattgtcgaatggaagaaggagaaccaaggagcaagatattaagatctcatgaaaatgaagcgaacagaaaaaaaaagcatctttagtagaaactaaacgtctaatgaaaaattaggaagttataggcgaggggaaagtgatcatgaaaggtcgtgtagaacagattatgaatgtatggaggttgagcaaggttaccctatagtacaggaaccgcgatagatcaagaaattatatgagcaaagcagagcagaggaattatagagcaacaacaatacccaaaacgacaacaaccattgatccagagagcaagaagatactcatcactggtaatcgagtcgcaggaaacttattctgaatgagcagattttgaaccctgaagtatcgagcgacgcctgtcgggattgcataaaacaaagacagtcaggacgtttgcagaagagaaaggagatctgaaagaaaccaagctaaaagggcaatatacctatcaccagagtgagaaaaccgatgctgtagggttcatgtagatgtgggagcagatgagtgagaaccggagtgtcaagcgactatattgaagagtagattagacatgaacatacgcgacaagaattcctcctaacggtcgggcataccgcctgttagattgactctgagctatagccagaaggatgttctgataaatctgttcgatcgtctcgtactgctcaagcgtagaggagtctgaagtttcaatcttaggcattggtaacacatctgttgtgagcggcgaagcgagtgagaatagctgtgtcaacgctatatcagaaaagtatagatacacatccagtcagtccatgtgtttggtgaagcaaccgaagatcaaggccaaagaaatgccaaagccaagaacgaaccaacacccatcgaacagaaggcaagactcgttcggagccaagctaagaacgtgcgttccgacgcaaggtgatctcttgcaaccgatccagtgttttctaattcgagagcagcaactccggatttgtgccagaggtcgacccagaatgattcacgcggaggagaatttcgattatgtgaggtttcatcgacggcagtattagcggcattggtgaccgtactggggggcatgaggagacaactggtgtcttggctagtgttgttcgatggaaatctatacgtattgaatgttgtataaccagcagcggcggaggacgaggaggcttcagcaacagtccatggcagcatggtagatgtacttagatatgatagacaagatgcacataccgggtgatgtcgagcagagcgcacgctcagaagattatgataagttcttggaagttggaaaaaaaagaaggagcatcaaaaagatcgtcatcactcgccatcaacatcaacattgtcaacagcatcttcgactcccctatccgcgtcacacccacccatcgctagtcctcttctgtacataatggccgaaacggtagaccagttggccaacactctagctcaatcatatattcatcgttcagacaaatcttgtcgctttctcatcggtgtcgccggtattccaggttcaggtaagtcaaccctggccccgcacttggtatcaaagataaatgaaattatctcctcgaccggatcatcaaaaagatgtagaggcatcggtatggacggttggcatcattcgagacagacgttatcctcttttgaggttggtttcttccatatttttgtaggcctgtgtgaaacgttgatctaaatctcgtcatcttcttggccctccttcctataaggacccggaagaagcgtttcgtcgtagagtgagttcttcactggcgcgcgcatgccatctttcttcatggtttgtttgttcttgatataacgaccatgctcatcagtcctcctattgtgtttgctatagggagcccactttacgtttgacgcaccagcctactatcaattcatccagtcccttcgttcacccactcatgccgatcaggcgattccgtttcctacgttctcccattcgttgaaggacccttctccttctgaacaacctatcgaaccttcagatgaccttgtgtatgcgcctcttcccgtattttgacctgctgtcttttttctttcatcatgtgtgctcaactaacctcaacgccttttattttgttttacatcatctgatgcttacctacaatgaaagcctgatcgagggtctatacgttctattagatatctctccatggtcggaagcagccgcgttactagatgcgaaaatatggattgaagcggatcatacgttgacgagggaacgactcatcagacgacatatcgagacgggcgtcgagcagaccgcatcggccgctcagaatagaggtttgtgttcctcagtcttctcactgtcccctctcttcatctacgcattgctgactattaaataaaataaccaaacaacacaccgatccacttgtacgatctagtcgatggatcagatatgctcaacgcacagtttattcaagatcgtctcatcaagacagatgtcacagtcgttcatgtgaagtccgaagggtttgatggagaaggagtcgaacgaaacgtatgttttcaactggacgcttcatagtcgttctatgatctccatggacgaatttcttttatttcgccttggatctacggaacgaagagtataacaatgacagtagaatagaaggagtggatatattggtcgaagacgggagagcggaggggtaaagaaacgatggatatcacaacaaagcttgagaagctggaaagctgccctcagatcaacctgatgaggcaaataaggaagaaaagtaaagtgaaataaacgagaaaatgaaggatagactagccctagttactcaacctagccagagcctcctgatttacggaccccaataaactctgaataaccccaccggccgcgctgactctcgtcaactcctccttcacatagaccttctcatcgaccgtgcaccaacccactggattttccttcttcgcttcggaagagcctagcctggcgaaagaagcttggaatcctcctccagattcatcgttctcaatcaaccccaagtcatcctctcctcctggggcgcttggatttgggccaccggtggaagtcaagtcttgaggaaggaagagaagggcaagtagagagttcatggtggtaggccacgctttaaccagaggttcgctgaccatggtctcggatccggtcaacagtctagccaggccgatggagacaacttttcgatccttgacagagaatttctgaacttgaggaagaacaacaccctgaagaattcctccaaagattctgtgagagggaaaaaacaaatgatgggaagaccgtctccgataatggtcagatcagacattcaagtcaaagcagaacaggaaaataagactcacccaggctggacagtttcgtactgagcaatcatgaaatctggagatagatcgtctttcttgatggcaaagcagaaggcgaaaaagtagacaaaagagtatacaaacgtcggtgtttttgatgattgtagtcgagtggagagtaggacaaggatggttcgaatatagggctggagggcagatctaaaaattcatgaaaggcatgaataaccaaaacgaattagaataaaataacccatcagcttctaccaacaccttgggcagcgttccaagacatgaagaaaacggagaaaagacgtacatcggcaagcactcaaacaaagcctgcagtaaagcaaatccatgaacgtcgttgatgtttgaactgatcaacttttgaaacactcccaacaagctctgaacttgtccgttcgccacaactgtcgaggcacccctacgaagcagcgctttccacatccttacaagtgccggaacgtttccccgttgttcccatagtgctgcggtgagaagaggaccaaggaggttctgatacgcttcggggagagagtctgctggatggagctccagaagttgggagagaatctggaacacgtaaggtacgaattctggggagaaagagagaagcagtttcaaattcagtagctgtttgaatgaaaacccgcaagaaatcattcaaggttgatttttttacgaaccgacaacatcattctgaaggatagccataatgggaccaaacaattcggcctcaaactgcgctactgaagcaggcgtgctttctgccacaaatctatcaatacccatttttatccacccaaagacatgtcagtaagtttcgctggacgaggtttagcaaatttatgtgaaaagacccttgaagactgaccggatcaaagccgagacagactcgaagcagtactggttgaacttaggattactcgggttcttgctgatctccgcaatgactcctaccaaatgctggagcacaacaacgaataccggagtcagggactgccgagccgtcaggatgacccgcatgacaccttgaaggcgaaagatcaaagatcgtcgaaagtgggagaagattgatcagtttgatgtgctcatgtgcagacaacatcgagctagactcacatcgcatcaagtagtcgttctccgccatcttctccggggtaacccctctctcgatattagtgaataatgcggtcaagatgttctgtgcaaatggacggacgtccgcctgagagaacaaagcctgtccattaactctgatgaagaggattctctcgattgtcgtggccgcgtaggtgtagaccacgtagtttgacgaagagagatgttggattaaaatgggaagcaccgagactagctgatcttttgtaagctgtcaaaattgattaattcaatggaaaacacataatcaacatctgcggatatcatctcgatacgaccaagaagatgatttcttaacaaacctggtttcggaaagtgtggaggaatttgatagcatccacgagaaggaatacgttcccgtcggcagtttgcaggtcctggaacacgttttgagagaagaactggacgacatcgaccaacacgttggtcgaagtaactccatgttgaacagtcgctcctctagaggcaattgaagtcaaaagataaattgccgtgtccttgctcttccaatttcctacaggattttgagcgtattgctggagatacgcgtcaatgtacctcttaacgatggtcgtcacctggctttcaaattgctccatcaatgcccgggtgaagtccgtagcggcttgacgtcgagtgtcactctctacgtcattcaaaacagaggagcttacgaaaacattaacgaaagaaacttataccataagtgatatagaaggagaaacctacctgtggacggctctagatcggttcgaatgtactccatgggatcgtcttcaaaagtctcttcctcatgtgctgcagacaatcaatcatgagaatagaaccaaagcaacgacaaccaaagatttttaatatcgtcgtgaaaagaattgaaagataggaagaagaaaaaaagaaaccaagaagaacatacttctcaagctcatattgggcagcacaattttctccaggaacgcctcgagggtaccatcctgctcgaatagcgatcgtttgtcgcccatcttgacaacaacgcccaggaagccgagtgctctacagacgagaacatcctgcttggtggactctgccctggagacgggtccaccaaggaactcccagacggactgaacgaacggggcgagaagagtagagttgaaggcatccgagtatttcatggtgaagagttcaaggattgaacaaatctgggatcggatcctatctagcggcgaaggtgaggtatcgtcctcctgtgataaagaaaatgatcgaaatcgagatgagagtttttcaaatcatttagttaaggcaaacaatgtagtaaagaaagaagacaatgaaacatacatcgccttccaactcgggctgctcccatcgtaagtacttgccaagaagcccaatctctccggtagcaggatttccgaagaacaagccgagattgtcctcgaaaaactcgggaagatcctgggcgttaagatcatgaaatagctgtagaagaagaagtaaggtctgcgcaagctggggaagtgtggctgtgggaggtaaagacgaaggagggagggatagaagctcatccgttcgctgtagggacggggaaaaagtttgaagttgagtgctttagtgagtgacatctgttgattatagactgtatgcgctagaagtctgaccttgaaaagttcaaagtatggaacgcagaactggttcaagaccacaagaatctcagagtaaagcctgtcggaagcgaattgagacttccatctagataacaacaacaattgaaacatatcaatttatcaatgaatagtcagtagagatgaacgatgtatagcgtaccgcttgaagatggagtgcgctgtctgaaggactccaatgttgatggagaagttgtctggcgagatggacgaaacaagttgctgtgagagcgcagtcaagacgaaagagaaaggccacgatgttcagagctgctatggtaaaacgaatacgagacaatctgaaacgaaagaagaaaggacggtgcaacatacagcaaccaagccctcccactgatctgggaaatcggattctgcgattgcagctacggcttctccaaccttcaaatcatcatcgtgttagctggtatcaccaagtaaagacataatacacagcaaacacggctcacctgggcttgcagacggttgagttgaggagtggaaagggagatcatgacgggaacgagctgctctttgattatttgacgatcagagagtgaaggcacaagaggcgtaacttcctgtagaaaggagattaatgttcgactcgtatctataagtatacgagaacaacatcatataaagtcatgattcgcaagaaaccatacttacctcgacccaagtcttcttgatggcgttcttgaagtagatcccagctgccagcctgatctccatcggagcctcgccagcacctctgacgatggagagcacggagagcaggaagccgggaagaggctcgttctgggcgagctgtctctctgcgccccttcttgtctgaggatccgaagagagcgactgtgagagcaacggcaagagagtgactgtgtccatgtgtgtatgagagttgtctgtaaagaagaaacgaaagtatttggaagaaaagtgttttgatggtggaggtcaaaaagcaaaaagaaataaaaaaattaaatagaaaaatcaaaaatcaaaaaatgttggttcatctcagagcgcgttcgacaacttctatccagccccatcaacctcgatcgcgccaacaccggtagaccatgctcacaaatacattctcactccctcagagctctggttggcttcccaactggatgctctttgtttctactctggcccttttcaataccgttcagaactatgtgagcccgacactctccaaaagggtctatgcagcaaagccagaccaagtttctcctctcgccaacagactgttcggcacctggacattggccagcgcgtgtattagattatacgccgcatacaatattaacaacaaagagtaagcccgtttgaacacatggtcgaagatttgcgttcaagtgaaagaaatcattcggatgggcagaaagatggcaacttacactcaatccccctcgatggttgtgcaatctactccttccggcagattatacaatcttgcgttcatatcttacctgatcgccttctttcactttcaatctgagcttttaatatacaagacctgcgtggtaggcaaagggtggatcccttcagccgttgtatccagtaagtatattcatagcatttccctgatagtatgtatctgcca

SEQ ID NO: 2241 - DNA, 2951 bp, Xanthophyllomyces dendrorhous
tctgccagtcgtggtctcatcttcttatgtattcttccagcggtatctctcgtctggatgaccctccaaagagacttctatcttggagcttgagatgcctattcctgtccaatgccatgttctcagatgtatggagactatatttctcagacttactgagacgagtcttgacgacatattctaatcttcttcgtgtgctgttatcgaacccgtcgtgatttttgtacttgctgatggatgacatctgttcaaagaaaacagcctgcttgtcgagctaaccatccggcttcggaatgaaagccagtgtttagattgatctgttctgcctaaagtccacgatgctgacaactctcgaaggaacgcgttccctgtatatttcggagctgatcgataagaaactggccataacaaaggaacgtgttcctcttcatcaaccagaacaacttggataccttcatcctacaaccactaccttctttccctttccctttctcttcacctcgacctttgctctccccttcttttgtatcttctctctcaatctcgcccgtgtcacccgcctccactccctttactccggatctgttggtatatagttagtcacaagatcacgcgagagttcttcgacccctcttttcctatcgtagaacctgcgtgacatatatttcgacaagcgacacgaaagcaaacaaaacaaacaaaattaatgggattattcagttgtctttctcccgaagcatttgacgtcccttgctctgacacgctgaccaaccagacgccttcacaacctcggaccaaaatcaagaaagcaagaggtcttcggaaagaggataataatagccattccgtaagttggctcatctttgctctgaaccacacagccagcgaaataataactatccgttatatttcttccaactttaggaaacatgcgctcacaaagtggctccaggaagaatttctccgatcggaccggttgttcttcctccttgccacgctctctcttcaacttcgctacaaactccaaatgatgctccctcaagaaaatctcaaatcggttctcttttttcgttgtcgccgtccccttcaccatcttcgctgtctttgtcgcgatcgtcctgctcgccgagaccagtggttgttcacctgtcaatgattggaagagagtgcgaatgggaaaatgaagataagcagccaaagagaccttcgagaccgcgtcttggtagatctttggtcagtcagaagtctctctgtctcttcgtctttacccattcttcttatcaggatcaaacatgacttagaaccaagacttcaaaccccatacctccagacagctcctccagcggcgccgacattagatgaaaaatacatatgcgacccagtttcagtgtctcaccagtcatcgaatcctaaaggaagaaaaagatctttgtcaactgcctcagtgagttggttgtgtccttccttttttgcatcatagttctcagtctctgactagatcttcgtatcgacaggtctcagacctttcaaacactagatatcgcgctcggaacagaaaatccgagtccaattcatctgtgaggctaagctcaagctcttctctcctctttctattcaaaccaaagcgaaacttaacatccagtttttacatctttactttttcgccaatttagtctgattgcccagacctcgatctagcaaacattgccccggcttcaagtctgaacgattcgctcattgtgtttcagatggattttgacaaaccagcaccactggtctcatctcgcccgccatcgatcacttcacccacttccaccgctattgctagaccgataaacacatcttctctcattcaaaatgacacttctcgttccagaactatttcaaccgcgtaccaatcgtacgaatacgaccatccagattttgatctcccacccctctcgacagacctcacgatcacgcccgacctagtctcgttgtcttcatttaagtctagctcatccttctatccctctcctgaatcttccccagaaattttatgggattctatggctcaaacggacacgcagcaaacatcacctgagcgaagattggcggcactagcggcgctgatagtggacgccccgactcctaggacatcgtttgaggcagaaaactctattcagtcaaagacccagtccgaacgatgtcttgctgaatcattttcggaccatttgaacacttccaatgagaaggatagcgcgcttgaacccggcttacaaagccgggagtcgtcgacaacgaaaacaatcgcgaataaaccgagagcattaatcaagaacgtgaacgggctgaaagctgaatggaggaaaaatagagaagcggctacttggggtgaagagcttacttgggaattcattaaagctgttaatgaaggtcggtagagcttcgtgtcaggtagagatgaatactatcgccttatcctctttctctcttcatgagctctatttactttgttcgcttatcttgtatatcatatgcaaatcgcaaacacatacacaccacataagttcaccttcctctctttgtctttctcttgcggtacatcgtgacacacttctctctccgttctcttgtatcatcactaagcccgtccagaatttctgtacatgtctctgttcataactcgttcttggtcccttttggctattttttcttttcgtcctcttaactcctcgtcgatcaaatacttctcctaattttgactccttgtcacaaatagccttatttccacctcgcagaaaatttggctaactcgaaaacattgtcatgatcatccagacacatgcgcgctcgctcgcccattcgctcacaacacatcctcttccggcaagagcaacacgtctcaccattggcttctccctgttccggcttcggccccattgcctctacctcccgctcccgctcctaac

SEQ ID NO: 2242 - DNA, 2814 bp, Xanthophyllomyces dendrorhous
ctctgcgttcctccaccgttacctactgctgctccatttgaaatgactttgtttgggtccgaaccactggcggatgagcctaagagaatatttttcaggtgattattatcggtcaagtctcgattctgccgctgatcgtactgctgtgctcgttgtgtctgttgttgttgttgtgaaacctgagcactcatcatctgaagatcatgttgatttgtctgggcatgcagaacagggatcggtcgatagatctcttgtcgttgctccagttgttgcgatcggtattggtgttcttgaggctggtcagcttgagaacgagcggacgacgatacagacacttgttgatttggggtccctattgggaaggatggcatagaggcagaggaggaaacttgggtcggagcataggatgcaggtatctgtatttggaattcatcagctgctatttgctccctaaattcgcttcttggttccgcattcaaggcagacgaatgaggcaaactgggatgtccttgttgccttgaggatccatgtaaaggccgtctggaactctgctcctgtttctcagaaacatgtccgttgatagcaaaagatgatgccaaaggcgattcgattgaggaagaggaatgtatgtgagaggtggaaggagactgatagccgactggttgtttgaacgatgaaggaggtgactggtgatggtaacgatcgccatggtattgttgatgaagcggatgctggtgctgatgactctgaggtgtgtggttcaaatgcaaaggaggctgaggatagggttgatacattgtttgctggtgaatgtttatcggtgaatgatgctgaacgggcgcccgctgatgaccatgactgttagagcttggataaggctggacggaatggccagtctgatcatattgaccaggaagcggatgctcagatgctggtggacggacaggtgttgccaaataagaggaaggagataggatggaagacgggtgatcaatgtcgctgtaacgattggttttgtaagtttgtgcaggcccgtggctagttatttcgttagatcctctcgaagcgtaagttggctgatgtgtttcgggctgaattaatgactgctgatggtgttgcctttgttgttgatgatgaggcaacttatgaacggacggaggactcaagaacgtctgaagcaatgacatcttgtcctttgatagattttgagcggccacgttgatgtccataccggctgttcgcatcattgagggactgtttgtcgccgactcaagtggagcaccccactgctcagtagactttttgaaccgatcctctcctagcgtaacccgaggcgcaccgtccgacgtaactgccgagtccgagaatgatgtcgatgttgatgagtaagatggcattgactgcagaggagccacccctgacgaagttgctgatggctgaaaggtagtgtgcagaggcggctggaaaacagatcgaaatgtatctgactgtggctgtttgtgattgatcaaaggggatgggtgggctggattgagcagagcaagcagagatggattcggggctcgatgtaggccattccattgttgttgtccaacagaagagatattcgattggagttgaggttgaacatgatacatagaggcagaagcggcagtgccagcgctggtcgtagaatattccaaggaagaagttgaggacgaggccgaggaatgaagagttatagaggtttcaaaatcgccaggcgcggggctggaagccagactactgagttctgatgatgttattgaaggattgatatctgaatttgcccgagcttgaggatggctcaatgtgatgttaccaaacaaattatccagcattgaaatggtttcctttcctgcttccgggatcttcggcttggagtcggctatgaaagtaggcacaggcgtgtttgttcctttcgttctctctccatcgtcgagtgtggctgactcggattcatgactatcgagaaatcgtttgaaaagctcgtccaatgcgctaatcgaatctgatttactagacgtgccaggtatttcggcctcaggtactacaggttctattaaatcgagcgggaacgttatttgctcatgcgtcgtggaagactccatcacatgagaaaccaaggagtcgctagaaagaggacatgccgggggaactaatggtgtgatatcgccgttcttgagcagattccgtggtttgttttgcttgatgaattgttgaaggaacctggaacgaattgaaccgaaaaaaagatgtacactatcagcataatcaggccgtatataccgactaggattggttttataagggaacaaaaacgtactggacaaaaggaagaatcatgtagaatttaaagttgccaactttacttgaaatagaagagcccgaaggcatattcttccttttccatccagggaggtgcttcagcttgaaccattgtatagccttttgaaacgagaattgagaagagaaaaagatggaatgacagctgtcaactggtatgaccctcattcgatgacgccgcttgaagaagacagagagcgacctacaccgatctcttttcgagtcaatgtcttaaactgataatcctgagatacgccgggcacgatgaataaggtgacgcgttgaccttggatattcgtttcgagaaaattatctttattcagtaagcgggtacagtcataaccagtctcttctaaaacctgccaacaaattgggtaaaaaaagagttcagaaaatcatgaacgttaggtatcattaaagcggagtatcagataatcgaacctctctagc

SEQ ID NO: 2243 - DNA, 8656 bp, Xanthophyllomyces dendrorhous
ctctctagcagcacaaatatgtttgggctcctcctggtttatctttcctttcggaaaagaccaggtgtttcctttccatcctttcactaacaagcactgtaaatattgatcaacaaggaggaacacaagaaaggctgaaggtcagtcgcctacggtttgctcctaacgccacctccaacagaaatgattgtcttcacatctgtcttgtacaaagacacgtaccttatcccaagtttcatttattaagatggctccacaaacaggaactctcatcttgtacctcatgaactccagaaacatgtgttcgtgctcatcgctccattcactcaacagaggacacactttgaaaaagatttcggaaaaccgtttgagggtatacgaagggagtgacggattcaactctcggttaaagtcctcatagaaccaaaaggcttgttcgacttggaagcatatacgaggaattgatgagagctcagatggaggaagattaagaataaatcggctgatataatttgaggagagtttgaacaatgaaggaacgaggcggaagtggaagaggatcgatcatatagaaggcgcgtcacacaatcggtgaatgagtcaattgatagattcaagaaattgatgcgttagcttccattctacttatcctcgttaacactagtgcgtttattctcaaaaacacacaacatctctaaaaacgaacgtagacacttacgtcgatagatcttctaggatctccaatagatcggccgtctggaaagaaaacgcggaggtggaggacgaagcagaagaaggcccaagatctggcggaatcgggctgatgacggacattgctggtcggtcaggagagcttgaatagaaccgaagggagggaggagataggaataggaggtgaacaggaaagagatgaggtcagtatgtgaacgttgggagtcttggtgtacgaaaggacagaaacggcaacaagacaatgaaatacagagtctttggaacagtggttacgatgatgactattgtaaatgtaaccattacatgtgactcagacaagatacataacttggcagaggatcagccaagaatctataagctgttgctgagaaacggatggatttgcttcaaggttgaacacaatgagtgcaaaggaggacgatgacagaaccgaacagtacattgatacaagaacatatagagcaggtgaacggaataggagtgagattgaaaagtacattgggaaagtatacaatatgattcgttcttgatatatacatagctttcgcaacagatgtacatgatttatgagatgatggttcctgtcgcaccggtggcagctccgaaccatcgacctaattcctcgtgcagctagatgtgagaagaaataccatgaaacgaaacgagtgttagaacttgacctataatatatagagtggctcagataatactgacaggattcatgctggttgcaccatacaatggagcgacttgaccgatgggccagatgacggttccttcgttgcaaagttgcgcccgccgaattcgatgagcaagtccatcaggagacgcaaatccaaagtcggctgtgtaatttgtagtgtgaaaatctcaaagtcagtggtaaatcgttataatattccttctcggggctgttgcacttacggagggtgcttccccactttcgaagattcttggtcactaaacatcagaagaggagtttgcagtcctcgcgcggttagtttgaaaatctatagtcacacaaatagtttataactcactgggactgtcgatgaatcctggacagatgatggtaactcctatgttgtgagggactgatagaaccctgagggattgaccaagatggtataggtatgcttttgaagctccataggctgcgaatgtgcaaggagcataaattgaagctgatgaagcaacgatgactgaaggttcgaagagagggccagtcagcaaaacaaaatcaaagttgtgatagcagctgtaggcaaaggtcgatttaccgatgctacccttcttgtaaggaatcatggattcccaagtcgcaagaatcagattgacacatccgctgacagaccgtttcacatatataatcagtggttgttgaatagacagtacccttgcatgacaaaatgaaattacttacgtcacgctaaaaatcacgaatgaggcaaaaataaaatcagaacgttaggatccctcacggtagttcaatcaatcaaacagggactgctaacttagtatcggaaactctgcgaacgaaatccacaccccaagaccgggtaccagcctcactccaggcttcctccatgtgtcccgcagttccgctaacctgaagtagcacatcgattccgcctctcctgacggcgatttccttgaccatcgctttggtctgttccttgtcgaacgtcgtaagatcatgtttgataatctcgtatgtcgctacccgtggaagattgtatgtgtccgtcttttctggctggcggagcaggagcacaagatggtacgcggaggaatcgtactgtttaagaagagacccaccgatctgacctgatccgccggtgatgaggacagtctgaactctgtcgggtgatggttttgggagaggagtaagtgacttaagaatagagagcggaagcatggctaaagttgtcaacaccgagaccgatgacattgacattgtggtctaatcggttgtttacaataaggaacagaatcatcgttacaacacacaaaagacgtcaatcagaagaataataagacagaaataaacgaaaacagaaaactaacgagggagagcacaaggttctcgagcaggtaaggcagtcgaggaatctggcagggaaagtagtctgcagagcgctcgaacttggaaattgagttgagcatgatcggctcgcctgtgacctttttgttttcttcggattgagacattgtttctaaatgatttcctttgacttcaaataaaggtgatagatgggatttgagacgaggatatgagaaacaaacatagtagagtagcaccaggaaatgtctgcttcttataggacgaactcgatcaaatccgattcgatctatcccctcttctacccgtattcaagtggagagctgagaaatgtcaaagggtcgatgcgatgaccagttttgcacagccctgatctctacgtcatcaattctgggccgtagacgatgatcacgtgttgtgatcaactgcatgttccaaacgtcatttgattgttcttgctgaagggaagtgggaaaactatctgttgcaacgggcttgcggatgagtctgctattcatgctcaagaagctcaatcatatttgagtagtaatcctataggtttatccataatataattctctatctgatgggctgtggtattctgttgcaaggtacgacacatgtgtaggtgtagtggcttctgtgttttcaatatgagagaacaatagcagggagcggagcaagatgcggaatgtcaccggtaaagaggcaatgtatcatgtcagcaacttcgtaccaaacactcacgtaactgaaagtcgatttgggtttgaacgatctttgaagtgcaaacattagtcaaaattaaatgctatttatatttatcaagttctctacatgtctgaattcaccagtgtatctgctatagatggagagcaaaagcataatacatctgggtttatagcttgctttgatcggaatagaaatgatgaagaaaggacgtagcatggaagatgatgtacgtaaacaagaagtcaaagtaagccattgtgaggtatgcaatctcatctgagataagataaacatgtcatcacaaaagaagttcactggaaattcaaaatatctgtcctctttccatcatttctccgttcagagagtggttcttcgaacgatcgcttacaaaagtagaagttaagtgtatatggtctttgttcgatactacttcgtctgatcttctctttgtcatagtaagtatcctaaaaaaaagccatctatgtgccattcatccaaaccgctttgattgtatcttgtccaacctgatggcatctgttccatcagctcctctattgaaccatgccgttcgttgctcagttcgttgattttaactccaatgaaagttcttcctgcctctttgatttgacttaagagggtcttttcatacctattctggccttggttcatttgattttactggctctcctaaccaacacgttcgtattcttctaccactcacaaatcattctttccagctcccatcattccctcaaaacgtacaattgaccaacgtccttgaacacgtttctccctcgttgagctccacgtttctactcttgtcaaatctcatcttgttcttctgtatctcctggtttctcgtgatatctacagctaagtctacttctcttttgcatagcttccaattctcctatatgtccaatcaatctttgttatctcaacctagttctttttatccctcgagggtctcttacacttttgatagaactgattctcgaaccatgtagtattcatatttaccttgcgatgaggttgttgaccatatattgttatttgcgcctagaaacataaaactattgaaaagtagggcacataacattttgagtagtttttattgctttgtctctgggatatccaatcgatcgatccatccatctacttttcaaactgccgcttttcttgctatcttggctgcctcccgcttcttcttgagagcggcgtgtcgggccttcagacttgccactcggtcaaacgcgtcatctctggaaaaaccaagacataatgatatatatttttagcatcctgattagtatgaatagggcttgaaaataatcaaaaatttcagcaagctggaaggttgtcttactgtgctcgctcctcttcctcaagtctggattaaagaatcgatggataaagagtaaataatgcatgggcttaggacacaaaagaacgcatatcggagcgataattgtggatcttgagaaagttaaaggacgcacctaagtaaaatctcttccttctcttcttgctcctttctcctcctgatagctcctgcgtcttctactacctcctcctctactgtctcctcaatcctgactggctctgcctcatacgtagtcttcaccataccattgtctgttgtctcttctgtatccttcttatttacagcagcagtagttgcaggaactgaagatattgaagctaaaaaatcgtccagctcggcatctacactagaaggagccgcagaagctgtgacgacgggagcggaggtgggatcttcggaggagacttcttccggaggaggcgtaacttccaatttaggtgccttggacggatcagcgaagaacccagggggtagcacagaggtggaggatgctgtcgagcttgattcgggtggtgttagaagtttagattgggtagactctgtcttgcgtttcttctctgacgactgtactactgtcgcggtcgctgctggccgtttcttctctaaacgctttctttcatcttctttctgtcgagcgacagatgtccgatgttgtttggaagcaatatgtccagcccactgagtgactgccatgttacaaaaaatgtatgtatagatcaaagtattagacaggcgtttcacgaacagagaatacgaccagatgacgatacctttcattgcacaaagtatacatcgaatctcgccggctgcattatatgacttgatgttgagagagcatacaaggtttattagcataccaagccaacgcaataaacactgaaccacgagtacgcacagcgtttggatcagtcaccctcggagcggtggaagctttcttagctcggagaagagatctcgcgtcggacattataagatatcagagtcttgatgacaagaggcgacagttttggttgtgtgagatctgaatgatagaagttcaatgattcgctggtgatcaaatagatgaatggatcgacgaatgggtgaaaggattgaacataaacagaaacgaatgtgttcataaccttttaattctctagaactgtgcgaggtcacagctaattgatagacttcctttccaatcgtcattcatcatcccattttcttctcgtactcttcatcatttgagtctagtctcagagaaaacaaagtcttacgatgaacacaaaactaacagggagtaacaaatctaaatgtgagtggcgtttcatattgtgtttcctgaccagaaacctatcttcatggcccttcatctctttggaagagcccttagatgtacatgttttcaaacgataccagtttatctccatgatttttcaatcaaagatttttcttcagaaggttcctttcatccttcattcgatacagagatatcacttgtgagagatttctgaagcagatggctatgagcagacagagctctatcggagatgtcccgattgcaacgtatttccatgattttcttctcaatacatccattcttcagttttcgacaaccaacgaagcgaagatggactccgatcaatctcaaattaacattgatttgtgactaccatacgcttgtctctgttccttcgtctccaggcttccatcggataacgatgctgggtgatggtggtgtaggcaagaccgcattagcagtccaatttaccagtgccgaattcgtacaagtccgttcttttcagctttgtatagatttatctatcaattgaggcgttgaccttttcatcaacttggttctctcaggattatgatccagtacgatatcttatcccagcgacctgtgttgtagcatgcgcttttctgatgccagccatcgaatgtgtctttggtaaaacaacctaatagactattgaagactcgtaccgcaaaaacctcgtaattgaaggagagcaacacgttatagaaattttcgacaccgcaggacaaggtctgtcttcctctgtctcctttctgttttgctttttgagctgttcaaaacgaacacaataatttcgtcctaaacatgtgttcgatttgatatctctgggtcgtgtggctcagaggagtacagcgctcttcgttctcagtggatcaaagagggtgaagctgtgatattggtctactcgatagcatctgcaatctgtaggtctcgactaaattgaatttcaatgccggatttattggattgtttctgacggtctcatcatcattaaacgatggaaactggacacaccttgaagcgttcaatcggatacccgaattttttcaatcggtggttgacttgaaacgtcagataggagagaacagcccgccaatgattcttattggaaacaaatgtgaccgagggtctgacggcagagaagtctcatttgcaaatggggtagaaatggctgagttactagggatcgaagatttctacgaggttcgtttttgacttttccctgtatagctttgaactaagtagaaagttggacaacaaggcatctttaatttgacatcgggaaatcaaatctgattagctctcggccatgacccgaacggacatagaggagagcttccagaagcttatcgccaaactcatggatctcaagacaggagtttcaggtgaacagaccagcgctgcattgcacgaggtagggactaacgagttgggtggtatgtctactggttcaatgagaaaaccacgtaagatgaagagttgtgtagtcatgtgaaggaagaggttgtagagtaggttgaacttttaatcttgtctttctcttgaatcccatactctctatcccttcgcactatcctttctttcagtcggcctcctacttttccactttttattttgtacatgacgcctgataatgacctgactgaattctcaccctatgacctatcttccattctatttcattgtatcactctcgtctggttacagtctttgaggctttcccgacacttgtcgcaagtccttagcatggtatcaataaatcaatgatttgttatgatttcttcgtgtcaaaaaggatgttgagtttcactctctgtttcttagcctctttgtctgtttgtctgctcatgtccctctcagaatagtgtctttaatacccaatattttctgtgcttgtcctcagactaggcggaacagagatgtccatgcgtcccgcaacatcacgcaactgggtctttacgaggaggaaaagcccataatatcagagagtatgacaaatgaccttacaaagaagaagcaaaagaaaggaaaaaggaagactcgaatgagaataagattttccatcggacaagatcaaacaggtaagagtacaaataatgtcatatgtcagaagaaaaatacaaccatcacctgatacgttatacagaaggtgaaactgagaaaagactgaaaggatgatttattcgaagattatatatgtacgaaatctagtgagtgaatcgactacaaagatgaaaagaaaaggaaagaagcaaaagaaggaaaaaacgagagctccgatatcagattatcatactccgtagggactgatcgaaagagggaaagagcagacgtgagatttgactgaatgcataacctttgagttgagaaaaggaaagaaaagagaaaacgaactctggataatcttccgcgatgacgaccgtgttcccctcgccgtcctcacctc

SEQ ID NO: 2244 - DNA, 67091 bp, Xanthophyllomyces dendrorhous
cccctcgccgtcctcacctctgttaggtttgtgagcgccttcgtctctgtaggacctcgtgccaggtaccgagcggtctctcctcttcgtgcccaccattgaagtcaaattatccgtcttcagccttggcggaacaaagtatttctggacgcccgttcggggaggcgcccgggatggatgtaaaggtggggtgggcggttgggcttggtacgtagggaaacgaggtggcacgtgatttggatgtggattcagcaatgaagcaagtgacatgatgttccccgggtttgctgcgctcctaggcgtaggcggagcgcttggtcgaattggtcgaagctgtcaatcatacgagggatgaatcttgagttatggtgcgtaagcgaagagatagccacacagtcaaggcactcacgttggctaactcagggactccaaggtggtagctcgcgtcttcgataaactctaggaaagctcgctcaaatcggtcgaacggatatcgggcttgcaatccgtgaagatgatccaaaagactaggtgtttgattatcgatggtcaagaactgaataaaacgggtggcgtgaccaaacaaggcttgttcatcagcgaaatataaacttttgatatacaagtgcggagagacacatacttcggatcttctttcatccatttccctctcaaattcttctctgcgcttcccaccgctcccagggtttcttcctccaaataatatccaggcagcctcggcgaggccggctccttttccagtcacaccaccggatcctactccaagaactaggtcgaccccctcgccaccgagccagccatgatgaaggaacccttcgaggcaaacttgagtgagaagcgaagcgagcagcgcataccacgtcctcgacggccgagctgcgcctgctctggacgctctgaccggagaagattctctggagatctgtcgagaaggtggaatcgagggcggcaatcggaaggaaggtgctttcgtttgatggaatgggttggtactggaagaaagagacgctctgtgagtgccagatcgagaggatgaaccagcggtgagagaggacaatcttcgagtaggtcggccaccctgtctctcgtcgtctgattcacaagacgaagagtatgacgaagacgcctcctccacaacggaaccttccgaatcactctcgagccagtcgttttggatggttctcgcccgggcaagtcggtttctcatcagatgaaccttttgctccaccgcggtctgtccgatactttttgaaagcgctgcgctgaccagaataaactgcttgagcaggtagagtagctttccactagccaaagcgcgtccaagatcagtgctctcctcaagctgaaaccattttcgctcggccggcgccaacccagatgagaccggtcgatcgaccagtgtcgggaaggatgattccaaggcgagggtcgagagtctgaccgacggaatggatccccacgatggatccctagaaactccatcttgatacaacgccttcgaccgaccgaccgctttttttgcttttggtccaaccgtagatggaagatccggggcatgggcagaagaggtagaggtagaagatgatgaagacggttgactacctgcaaaagcccagggcccttctggtccggcagctctaggaacttgatcccagattgatccaggaggatagacgtgagtcctggatgaggaggaggcgatagcagaggcggtctcagcagagacaaaggcggctgggttgatatatgcaggattagtaaccgaaaaatctggtcggaaacccgtcttttgagagtttgttctgcagaatgacgaggcggaggaaagaaggggagaggatatgttatacagcaggtcaattgcatattcttgagaaggtgtcaccgcatgagtggactgtttgccagaagacaggggttcgcttgggccattgctgttctgagagagcacatcgaggagctccgatagtgacagccgaattcgaattgcttcaggaagcggttggacgtcctggggcgggggcgaataactgtcttcatcccagtcactctcgtcctcgctttcatcctcgtaagaacgtgaagatttgtactttgccaacatgctgtccaaaaaaaaaaaaaagacagccgcaaattgataaagcgtgagtaaattaggaagcagaaatactgataaagagcaggtcgaaatggacgccaacgatgagaactagagaaccgaaagcactcacgtagagagcagtcgttcaattccttcggccttgaccttgagagcgtggagctgactgagcgaagcctcgttgaggattggaccttgtccacttagtgaactcccaaaggcagctttgtgaactttcttgctgtccgagagcttccggccagacacgccatacccgagaacctccggcgtaccgaggagttgcttcctcttaggattgactgggagagacgagctcagggtagacaggccaagttctgtttgaagttgagccgacctggcttgaagttgaagggaaagcatatggtcgatcgccaaggtcttgctggactgactggccagttgaagtcgagcgaccgacgtaagagatgggtgttggtagggctcattttgaggtagcatatggcgaaaggatattcagtgtttgttcccaggagtgacagaggagactgtcttgcccaagagcgggtgttgatgagctgggtatgggtaagaaaagaggatcgagaaggacaaaggactcggtggggtgttttcgacgaatgaaggtgagaagaagattagaccgaacaaaagtgagtgagggtgtgagtgagggtcagaggatggatggtccaatgaactgttagaccggtagaagatgggaggtaaaaaagcaggtacccggttggccccgaactccgatgaaacccgaagaataaatgaaaaccgccggtgtcttccgaagaaatctgactcgggggtcgaaggcctgatcataaatgaaaacagctgtgtaatccgtgttgtatgtgcctgtttgtatacttattaacatgtttcattacaaaatctgtagtcagagcttgggagatgcaggatcattcggagtaatagtctgtaaccacagatcgtaaacttctacgtgttctcctgttcgttccttgttctctctttcttacttgacagcttcccccggaagccatcagggaccagatagatgagcctatagcatatccatcatagtgtcttctttccgtgtccgctaacactttctacaaatcttctcaaccactgatcttctttctcttctcttttccagcttcttctcctttcactcactcttcctctgatactcaccgcttcctctggcttcgcgcactcacccagactaatcgaaaactgaccatgtctccggaaggcttcctggtgactgtaagaatcccgctctttgcaaagtgtctatcattgtgcttgaaaactgaaggtttgcatggatatatgcgcttatattgtagaagagatggaggaagagacaaccgacctgtgagctccgtctgtctcctccgatcaacagaacatacttgaatatcattgacgttctttgtctcttaatctgaaagtatcgttgcccgctcatgtatctcgtcttcttaagctgtcagacatgtcgaaccggttgtgaccctctcggcagccttattctttatcattcttacaggcagcatcactccactccacgcccacccagcatcgaagtacctcctcatctcttcttgcgcgttcgctatcgccatcatgtcaggtgcaaactggtactgcggccgatccttcagattcaataccctgtaggaaggaatctggctcatgtctattgacgcttgatgtatcatgtcaactatcgataccgttcgcaggtcatactctccagccaacgaccgtgcatgactttctagaatcacttcattcgacaccaaagaagccgaaaaaaggaaagaagagaaaagagcatatgcccaggcagaatggctcgcaacatgtatcaacgctgcctcctttgatctttgaagatggaatctgcacgtaaacccattgattttttttgcacatatactcgtcttcacttctgaacctgtctacatcaggacagcatcgattaatttacatctctttattgtctcagtcctgttttgaaatttcggcctagaccccatccgccaagcatcagattcaaagctcgacatcgacctgcgctcagcgcacccattgctgctatccctacatcatcttcagaagacaagctctcattcgatctgtcaaactttaaacaattgtcgagctggaaagagaagattgacgtcaagtcttcttcgattcaggaatctcggaagaaagaactgcaactgccggattgccagaagaaaccgaaaggaacctcacggccatcaaacaaaaggcgcgctaccattcagaaacccacttcgaagactttgaaacaactagagttgatgggtagtgacgatcggtttgttcttgcatcattattcttgaccgctttgatgaagggatgtccttctaagtttgagctctcgtcttcgagcgagacttcacctttcttctctcagcttccctccatatgaacccaagtctgatcctcagcaatggctatcacattcctcaaacatcgatcatatcaaagtaaaacctgtatctgcgtttaccactattcatcaagctactcgatttctttctcctcttgcggaacttccggtcgaatgcagtccggtcgagtccgaacctatcacttcgtcccctccgagattggatccgcctacaaggctagtgtcggtggccgattccatcgtatgttctccaaaattttctcgatccaggatatcgaggccgagaaacaccaagattagggcaaacgatgtgaaaaagactgtcaatcaggacctacgtattttgaatttgaggaatatcagcatggacgaaaatgaggtcgaattgagaacaccagttcagtcgagccttcgcccaaggcgacttgatctacaggaactttcgactcgaccatcaatcgacccacccgatggatgggagaaagaaccagacaggcagctccgtttactttcatccactccacattgcgcgtctgcatcaaacacagtgacctttcctcgcctgtactctcgaccaagaaagagaccatccttctcggctgaggagattctagaaagacttcttccagtagcatcccaggtatcaaattcatcctggcttgagaaagagactgccgctcatgtagttcgcagcaagctaccttcttcttcctcttcttcttctccggcatggagagatagacaggacgctcagtcgtatggttgcggacaacagaagtgtcctgcttcgtctgtagttcgcaggaccaagagcattctacggcaccggtctacattaattttcgactcggccggaaacagcacccttcgcccagaaaaattgagaagaagaatgacagtcatgtttgacgatcatcagactgtctttggatcatcgtcttcagacccccagacaatcaaaagaaaactatctcacattatccttccaccatcatcgatccctgtctcaaccccagttcctgacgcatttttcggctcaagtcctgtgaaaatcaagaatagaaaaccaataaggagactgtctgatcttccgcgctcttttaatacagcatcctcttatttgccgggttgcctagaacctggtccaggtgtctcgacgacaacttcagtgtcgaatcttgataaatgcaccgttgatcgacttgcagtcagaatgtgattgccgctgagttgatagttacgatgtaagacccggtgtgcattgagtgtttctctctcatgattttacccttcctcccttcatccaagatcgttttttaaggtatattcttgataggtatatgatgtgagggtgtatatacagtataaggagaataaataaatgcacattcagagcggaatatgaacaaattactataagctcaatacatcgcctgagtggttgaagtggcggcaagtaaccctcacctccctacttcttccggattccgatctcctcccccatccctgttttcgacaataaccgagtgttcagtcggattcgcaagtacaaatctctcgacaggtaaaacaatcccttctctagccatcgaatacacccaatcaggcgagacgacaggtgtaccccatttgttggccatcttaactttctcgcctgttatctcacttggattgcatactaagtgtgtcgttcgtttgtgaaacgtcagatctgatgtacctcctgtgtgtgagtagagagtgacaaggcgttcgatcgggaaaccgaaggaaatacatcagacaaattctaagctgagacaaatagacagacggatgcgagagataagaagaagaagacatgaacgaacccatggcttccatgagttttcctacggcttcctgttctctaaacgagagcctggtcgaacacatgtgaacttcgctcattcctgtacccagccaatgttcaagaaatattagtcatcgccaacgagaacgcagcaaaagaagggagacagagggaaaaaggagaagagatgaatgatgatggagatgatcctcacctggtacaggtagctctatcgacaatggctcatgaactatattctcgtccaaagcgtatagcttatcgtccctatagcaattctcaatccaatgatgggtcgcgaatcttgcttctttactttctgatgtcgattccgagtttaagggactcaagcgtgtcggtcttccactaaatttaaatttgatttgttaagcagtacatgtttacaatggtcagtatgatcatgatgaaaggaagggggaggtgtagtcttaacaagaacaaagagaaagcagaaaaagtagttagaggagactcacgctcgaagctttacaacaacataatttaccccaactgattctgcctcttcttcactaacaatactgcctcccaactcactgacacagtctatcatgtttctccttacaagaccctttccacatctcaacaaaaaggtgagtcctctgaatggaagcaccgacggaggtggtatagaatcttggtctaggcgggtcgatgaggatttgtcaggaacggatatggggatgagaggagcaaagggcgcagaagtagatgcttgccgatcgaacgatctataaggtgaaagagttgagcgctcggttgtagagaacaaaagagatcttgacatggacattttagataagttcgttgtcgttgttgctttgctgtttctaatcccaccttcatctgaggttttatcatttccttcttgacggtcttcaaggcgtacaatctcgtcggtgggcgcatcgttggatgttttaaccgttggcaatgcatcagactcaacacctatatcgctcaatatatcacctaccagtccctgaacgcccaggtggttgttgctggttgctcgtctgaaccgtttcacgacggcgcgttcggagtcgtcgtttgttgacttggaattaacgttttgtttggagttagcagttggaggactgagaggttgagggtagagcgtggaatctttgccacgaagggccatatcttgttgaagcacccgctctagtaacatcaacagcggagaaagacatgagatcaaattagaaacaacggtaggttagactcggaggggtagagtgtatcaaaaataaaacgaacgagtgatagtatgcctatgcagatgatccttcggatactcgattctataatcctcttctttccatctccccatggcttctaaacaatcccacacccattcctcccaaacaacatgaataggttgttgatccctttcaactactacttcttttgtctttcctgtcccagtctcgatcacttcgacgtgtttgatttttcgagcaggtttcccagatgccagagtcaaattcaagtcggtattcacccttttagcccatctgaaattgagaaggaaaatgtttagaggaaaatatttatgatccaaaaaagatcagacaccagacttgttttatccaagaaccttggagaacagtaggagaacactcactcgactttctcgccaacacctgtaggggtgactaaatgagtacatgaccgatccaacactctggagacaaaacctttctgttgtttgattgattcaatcatctcgtccctctttggacctgagcaacggaagatgaaacgataagatgaaatcgtctacggcttagtcaaagccaaaatagcacgaacggctgaacaatgagtaaggaaggtgggagagtgaacaaaccaatttcaaacccagacatgcatattcggagatctcggaagataggcaatcgatgtttggcaattgactttttatttgaagtctcatacataccggttagcttatgcttgccgctaggagggcaaaataaaatgagacgttgggacaaacggtaggtagatcgacttctcctccttctgtccagatcctgtgactatctttaatccattcagctgaaagaattggtagacctaatgacaaagccacctattgaaaacagaaaatatcagctaggtagaaccaaggagcagcctctgcacgttttgacgatcactagatgatgctagtcaccttgtacttctcagatgtgaagtcctgggagactaggtgggtgaccgtgtcggttagattcatctcagtttgagctcctaattcgtgagatttattgaatagtgttggctgtttctcgccgataatcataagagcagacttgaagtcaggctatgttttgactagcgcaaaacagtccatgcaggtctgattcggaacgaaccttgtcgggaacaccagtaaagcagattatacatcctttgaaaggtctggaaacggtgttaagcacctcggttgatacctcatcgtcctcgtccgtgtcgactacacaaggagaacaaccgggttgcaacaagacgcataaaccgatagcacaggaagattcaacaatctttctatagaaatctatatggaaacacatgtcgcaccatcgggtaacgagcatgtgtacattctataggaacttaccgtggatttgggatcgacgttttcgtttagaggatgaagcgacgggctgagaagactctgtgaattccttaggtggcggtggtctcagccttgatccaggtattttggttgactgatgacctctagccatcgttagaatgatgttatgaggatctggatctgagtaagtcttgagactagccaagcaagaggtaagagttgaaagttatttaacgaagacgcgccgacgcgtcaaacaagcaacgcgacgcgacgcgtttttctatcatagccacgtgatagaacgtacgtcatcagttgactataattaaactgagccgttctttgcgctgagtttttcgatcgcttcgctataccttgaaaccccactaccatcttcatattttcacatctgctcaacaagatgaccaagagcgttccagagactgagtccgttcacaagccaactcatgagggggagagcgaagcccataagctgtttaggggcaggaaaggacatggcaaccacaagagcggaagagaagatgaggaagtcgttccaggtattgtggtacgtgcaagggaaaggttgcctttccataagagcaaagaaagtatgagatggattgattgaccattttgtgtgatatagcatcctggagcgacaggagtgatttactgctctgaaagagcctctgcaaatggcttcaccgacacatcttcggagtggtctaatatgggtcagtaggctcatacgttgtcgatgcatgattcattcgacataccatctatttgcgtgttctacttattttctttgtgcctttcataacttcaggtcaaggagcaccagaggtagggcatatcccagatgctccagaaaggaacatgataatcgatatcaatgcgctgggtggtgacgctgtcaacgagtatgcccgtgagttcatccggctttctctatggttgagcaaaccgttgaccccttgtatcttacttcgacagccactgctggagtcaaagagctgcgaagtatgttttcagtgaacctcatttctcattgttttaactggctatctaacggaacggatcgttgcaaattaattctttctttgttaaactaggcgccgtcgccaatctttacaatgttctccatcgagaaggaaaatcttcgaagtatactcacgaaaacgtctgtatcgttcctggaggtcgatctggtatgagtcgggtggccgccgtagtcggtgatgtgttttgtggataccaacttccagagttagtttctgtccttctacacaaggcaaaagcatgattgactgataggtttgctttgactggtgttttaaaggtacactgcttacagtgattcactatcagtgttcaagcgactggtccctatccctaccgttctttcccccaaggcaagttataagaatagagtgcctctctctgcgcattagcaatgtgttttggtactaaagtctaacatcctcccatgatatccctcatagaccaagtacgagcttgacatggacgctcttgagcaagagataaaggacaaaggtctttccgtcatcgtcgcttctaatccccggaacccaactggacagaccatatctggtgaaaagctgaacagcttggttgagctgacgaggaaacagcatatcacgacgattctggatgaattttactcgttctacaattacgaagatggacaagagggacaagcactcagttcggccaaatatgttgatgacgtaaacgacgtacgtgttcaagcttcgctctggatattgaacgttccaagatgaacctgagaaggctgacttctcggtgcttactgccatgcttataggacaacgtggtgatcattgatggtctgactaaaggcttgtgagttacatcttgacattttataacacagtaccttgtgtacaactgacggttgagacacgtcttcgtctgggacagccgactgccaggatggagagtctgttgggttgttggacccaaagaactcatctctgccgtctctcaaagtggatcgttcttggatggtggggccagtcatgtgtccgtctgcctttctgaatttatttaggccgatatataaacttgactgatatgaagatttgattgtacagtttgcaggtcgcggctatctctatgctggagccttctagagtaaaacaggatatcgtacgtcactttcttcagcataaagatttctcatgtactgatttcttttctaagcctcttgttggtctaccactaatctgataggtatcgctccagaaacatttcaaggtcagcacattctcttttcttttgatgttctcaactctcctgctaatgcgcttgatataacagatgaaacgagactactgtctcaagcgtctcgaggacatgggtcttcctgtggaagtttcgccagtcgcaaccttctacctatgtgcgtagcctggcatttttaatatgcaacacaccttcagcctttctgtaaactgaaactcttgattgggacgtataacatagggttgaacttggagtctctgcccgaaccacttaacaatgggctgacattctttgaggagctcttaaaagaaaaggtccgtgtgtctgtacattctttcctatttctcagagaaatactgacactcttttgatataaacagtgtatatgtgtacctggaatcttcttgttcgttgatttcttccgatgatgtttaaccctgttttaccccccgttgaccaaaacttgatttgtttctcattttttcaaagtgatgtgaatccgagtcatcgacgagacttgttccattctccttgccatcattatgtccgcctttcattcggtccgccgttggaacaattggagaaaggaatggatgcaatcgagaggatcgttaagagaagtaaggacgagttatcctctatgggcaagtcgtaagtccatctctctcctttcatctggtcaactctatctttttcattttcctctttctctcccttatccaacaagtagcctccatagactgtcagactagaatccccttcctttaaacctttcatgtatcgataacaagaattgaaacacacagaacagagcgttgaacatttgaggttccttttgttgtcctgctagattcgctcctctcgcgtcggcgattaagaaagattgaaaagggtccggatatgatagaaaagcatgtggtttactctctactttcacccgacaatatgttggagatcctcaagagggaatcaaaggaccagaactctaggttatgcttcgtcttctcttatcttccttctttcatcattttccttcttctatctgtatcctttttcagtcagttccgtgttgttctatcaatttaacctatcttattcctgaattctgtatgttctttcatgtccatatatacaaagaaagaagattgagaagctagcatatcaagagcgagaagagtcgcatgagaaatagaaagagatctgcatgttgatttgagtctgcgacaatctgacgacgactgaggatgatgggaaggttcgattagttgtgaagaagaatagaccgtatcatgggagaagaatcagagagattaaaataggtgaaatatacagcatgcttacttctaacaacaattggataaagaaaaagaaggataaactcagagtgtcctagaatgaggtgtattccagtgatacagttatatacaagacgtatgaaatagcataacagtctactatgcagaacatacagggccgcttttcaaatcctgccgagtagttttgaagcgcaggagggaaaggagatgctaccaacggagatgatgatatcaatgggtagggccttggatctcaatcatctcgttctttatgaacccgatagctagcaggaggctgactcctacaaatgctgctgtcgtccaaatagcgtcctgtgttcccaaaaggaaacgtttaattttatttcacaaccgtttccatttcggtaaagaagggactcttttcagtgcaaagaactttcgaaaagaaaagatataaaaggaatccaagaagaggagaaaaggctaactttgtagcctgtcaagagtgttgtagttgcatccggatctgactttgtagtggccgtcacgaccgccgcgctattcgccccaagcacaagagccaagtgtcagccacgggtcctgtcaatttgtatcggatggaatcaattagagtgaaaattgcatggtcgtaacataccagatagctagcccgaaacccgcgccaatctatactcgacacatatataaatccaatttgaattaccgataagaatactttggcttgagaaaagacacgtaaaggtgagagaacaggtgaacgtacttggaaagcagtattgatgagtcccccggctagactcttagctgaagggggtacacttgacatcatcgatactgaaaccacgttctatgaatccgacggccaacgtagacagttcatgtcgatatcgcggccgtaaagcatcaaagagatgttgaggaagaagagtaagccgaattagagtcgtacaaaagcgcaagcgattgaaacgtacataaactagcgaaattccgacgacacccagcatagagcttgggaacacaccctgccagaagcttgtatcaggtttgaccaaagccgctgggagcaccgagacgaaacagattgtgaggcctataagcatgagagttttgatctttacgtaattgatcgatactgagattgtgtaggatgccaaggcgccggctacgcccataggaatgaatcggacagaaacatccagaggagacatgtggaggacattttgggataaaagagtcaagtagagaacgatgcctaaattttgggaaagtttcaattgtatgaacgcatgtaggataataagttcgttacttcttaagtatagtaagaatgaggggaggattatgcgaggacgtactctgccaccagcctaaacgttaattggtggttcgtcattatttatcaatatcatgcgataaaagataatacgggttgatggaaatccaacgtacaatagatgaaaaaaccgatggcccaagtggcggcgaacccagggcgctggatatagaatttaaatttaaaaataaaataaaacaatatgaacaatgtgcgagtcagtagtgcgcactgtagacgataggatgtatcttgaacaaacggtgcttaccttccagctgatgagaattgggtcgtatgttttgcatggttctggacgaattagtcatggggcgaatgacacagcaaagactactacgagataactgaacctacaggtgattaggaagaatcgggttttgtactttttgctcgacgaatgcaaatccaaataaacactagcaaatcaaactctcaacgatcagtccatacaactggtgtaccacgacctgaacgatagagaagcttaaaaatttactgccaaagcaacaatcaaaagtccgacaatgaatccctttccccagccgtaaaccccacctgaactcagaacgaacgtcaagagaattagtccactcgttgccacgccggcgcctatgaaatctagggctggcttgggaccgtctattgtgttcttggtgtctggaaggaaaagataggcgatcaccgatacgactgctccgataggcgctgtcagccagaactataggtaagtatttcaagaggaaaaaggatgtaagtatatgggagaaatgtgcatgtagacgaaggacgacgaacgatccatcgccaccctagggcatccgtcaatacgcctccaaaaatgaggcccaaagtgaacctgtttcccccatgaaacgagggaaaacacgaggttattctgattagataagtgtttggactaggtaatcttagatgtcaaagcacgaaccctacggcacctgcagctccaaagatcgtcaatgcagtgtttctttccctgccgacgaagtagcttgagatgatacctacggcggagggaacctgatattatccgaatatgcactgtcagaatgattattttccctgcatcaagtgatcattacgaaccgttgctgctgctcccaacccttgcatggcccggaagacgatgagctgaatttctgtctttgcgaatccgtcaatcaatgtccacgctgagagccacgacattccgccttgaacgacgaggaccaagagatataatggatgtttgccagagatgtcagcactagcgtatgcgaattccgaagacggagggtaaatagacgtatacaaacagataaagacatattttttgccccatcgatcggcaaagacaccagcgaggaggaggaaacctccgaaagtcagtcttgaaacatagcataaagaggtatgtatgatgagtcagccggtcaattcaagctaaaagaagccagacgtgtgagattagacgcacgtataggccgagatcagccattgttcatctgcctgacggatttgaagttccttcgagatcgcagtcagcgccatgttgacacctggcggaagaagcccaaaaagaaatgaagatgagaaattcaatgaaagaattcaaatgtggatatacaaaaatatactgactagtcattgatacgttatcgagcatctgactggccgagatgacgacgaggatcatgataccgcggaaactagttaggctacctgtctcttttccgtcggcagctggattatcataactcatttcctcgatcccttggttgaaggacagactgatcgtcgcctggtcgatgcttcttccatcagtagtatcattttgggtgccctgaactgaatggtaaggctcgatggggaggtccttcgctgagctggtgtcgtctgcagcaggacttgcaacggagtggacaggctgtcgatagttagatgatagagtgggaacaaaagcaatttgagaggctagcggatgaattgagtttagagccgtagacgaaggtcttcttaaggacgcagaagagttggccggggcttgctctcgttgtgaggtgaacgagctatgagagcttcgttctcgtcgagagattcggtcggccaaagtaggtggttgctctgtttcggactcggagtcttccaacgcagagctgacatctacggcagaattgataatatttgggggaaacactggggccgacatactcaccctatctgtagacaagtgtatcgatgtggtgacgatagtcgaaaggatgagcaagatgttcggacagattgatcagcacgcaaagttgcaggcgggtctaggcgaatcggaccgggcttgccgggtgataggatccatgctgactaagccgatactcctcaggctttgtgtattgagcgatctaaggaagtgagttctgaacgtcaaactgtgtatcctcgttataaggtctgcgcgcatggcagcatcacaaggagagctctgagaacaagttcaaaggctgtttacatggttctgggagggagagaaaggaagggatagaccaaagatcggcgacgaaggaggccagttcatgttaatctgcttgccgacttgctggccgatatagattctattgagggttgaagatttggcagatagcctccaaagaatcccgagatcaacctgattctgattctactgcaaagcatctaagcgaagctctctgtatcttcctgtcgaccacattctttctgttcctgctaccgctcgtggtgacgatgaggagacaggcatgagtagatatctagatgataccgtctttgactattctgttctcgcttattggcgactctggtaggcaagtgtaggcagattaggtaaacacgtgattatgtaatataatacttatgtaatcaaagcaagtcattacgtaacattgccctggccagcctgtcacgccgtcacgcggctcgtccctcttttctggaattttcagaattctctgaatttttctcttcttccctccaagagacccttcgtgagtggaaagagtccattaatttgaacagaaccagacagcatggggtacgttgctgataacaggattggtctctctttgggtcgaacaacatcttgttcttgtagagaaatatccttgaaaaatcctttgatccgcacagacgagatcacttgggaggctatttcactttttttttcaacctttttaaacagttagtttttcttttttctttctttcattttcttcatcaactcgatggctaacaagaccctttatcgtccaccagccaccaatctttacactagcaaaaatgggaggaactcgatccgagaaggaggcttacttcgttaagcttcgagagctcattgactctaaccgtgagtgacgatcgattgcttgactttttctgtagacccttcaactaaagaggttctttttttaccctatctccagcctccatcttcttggtcaacgttgataacgttggatccaaccagatgcaccagatccgacagtctctccgaggaaaggccaccatccttatgggaaagaacaccatggtccgacgagcccttcgaaccatcctcgctgactaccctcagttcgagaagctccttccccacgtcaagggaaacatcggattcgtcttcacctctggtgatcttaaggaggtccgaactgagatccttgccaacaaggttgctgcccctgcccgagctggtgctctcgctcccatgaacgtctccgttcctgccggtaacactggtatggagcccggaaaaacctctttcttccaggccttgtccatccccaccaagattgcccgaggaaccattgagatcgtttccgacgttcaggtcgtcaccgctggtacccgagtcggaacttccgaggctacccttttgaacatgttgggcatctcgcccttcacctacggaatgtccatcgtccaggtcttcgacaacggtgccatcttctcctccgagatgcttgacattgaggagcagaccctcatcgaccagttcttgaccaccatcaagaccatcgcttccatctcgttggctatcaacttccccaccatcgcctccgtcccccactccttggtcaactcttacaagaaccttatcgccatctcgctcgccaccgagttcgagttcgagggatctgccaaggtatgtttcttttgttgtcttttatattttgtctcgctactgtccttgttggctctgcctctttcctcctctcctgttccccgccaaatgattattatttttacacacactgaaaatcctgagctcgagtcttacggactcgttttgctgagcaatatcaacatgatggccttccttactaccctccttctatgtctttctcaaattgtagttggtttctgaaggaactgaatcactgacacgtttaccgattcttttttattcctatgtataccaaaggccaaggagtaccttgccaaccccgaggctttcgccgccgccgcccctgtcgctgaggccgccgcttccaccaacgaggcccccgctgccgctgccgttgaggaggagaaggaggagtctgacgacgacatgggtttcggacttttcgattaaactcctttatcccgagtttcttctgaatggctttccctgcaagggacgggtgtttcggaccaggtgattgtttatgttagtgtaggaagatgggaaaaggcttgaaggaggggaaaaaagacaggtagaattcatcagttcctacccctttttttctttttctttttttttcttttttttttcttagcttgcataacagtttatctaggatgaatgctagtttctttgtttctattgatcacgtcagaagagtcgagcgggacagaacagacgaagagttattgaggcacagacaagcagaaaactcggtttgtcttgagaaggattttaatcttaaccagtctgcaacatttgagtgaaacgacgatacattcatctgaccactgagcacgcactcatcatatgaccaagttccaaggcagctatctagtccatggcatcaaatagtacagaagttacaaagacagcgtcgttgtcgtcgtctttgacgaaattgaatcgatacggacgaatgaaaaatcatcagagcatgattcaagaacggggtatcatcattcaacgtttgtgtcattgccctacaaccatatggtctcattttcaagtcgttgttgtcgtcgtcgttgtcattgccgctgttactggaggattcgagactatcggaggaagaagaggagcggaagatgaagaattggaagtgaatgccttggtcgaggtagagagtttggaaacctcagcttgccaagctctcctatcggctgtcgtcattttcggtcccaacatggcgtctagtttcgatttaatcgattgctgtttgcaatgaagatatgtgtggatttgagccgatatgtacaatatcagcttcgttgtctttatctttaatgggacaaaaggtgcaggaagggtgaaaaaagagaaatatcgaggcaaggtggtacgaacgctatcgatgattcctttctcgtcctcatttgatccgccatttatcaaaacgagcctatcgacccaatcgtccgttccgaaaggacaacctttggcatgttcggttctgatatctacccctccacttctgcgtcggatacctatctccgcactggatggttcatgcgtcgaatgcaattcgtgtgatgaggattgagatcgagacagaggttgcgtaaaagatgaagcctcgagggagattgcaagtctccgtctgcatgatgagcatgatacgagcagcttttcggagcgagttgaacgtgataaagaagttgctgtaggtgttgatgtggatataggaatccagttaaagaacgacaaaagagtagcgggtgtgctcggtcgtagagaggatgacgatgacgacgtgttgggaagtaaagaagcaatttggtgtgaattctgagagagaacaaacgtcattgaaagtgtcttcagcatcttgtaaagattcagcagtccagggtatgtggaaccaagatgaacggcagatccaactcacgagtggatgaacgagctcgacatgctgaagatcgacgagtttatctatctcgtttgctcgacgaacgagctcgtccgtcatcatgtgcccagtcacgttaccgaaagaagtcgctacagagcgagagagggagacatcaacacaagttattctttattttatcttttagagggggaatgaggaagagggcgaaggagagtacatacgatcggtctgtgaggttctccatgggcacggcttcgtatgggcttctaaaagctctcggcgcatgcgctctttcaatcttgatgctatttcttcacagcgtggtggtgatatgagaccaacagagtcaggaagaaagcaatgaaatgcaacagagagaggcagaaaacctcatacctggtttgtcgccgagccctttgaaggagctaacaacccaggccgcttgacaagacgcgcatactagcctgtttctacctttgttgatccagccaaagatgcttgcatcctgaggagtgaacgccggagaagaaaatgagagcaatgtgtaggtagaaagacgggcggtgtatgctgccagagagaatggaagaaaggaggtcaaggaagattgcctgaatggtcatccgtatcatagaaagagggtcagtcgagtctgggtgacgcgaacaaaaatcacaagaaagaatagaccaatacaaactcttctaagtctatagaggacaagaatttagatcgtttggctcctcttgtagaaggcgtttgatcatctgaggcgacaagagcatcgacggctcttttgagttcttgtttcgagaacgtgagttcggatctgaacggtttatctgttatgtttgaggtgtctagttgggaagattcctctgccggttctggttcgtcgacaacgacatcttcaggaaagagcgcagagaacacgtcttctatgtctagttggagctgaagctcgagctcggtatccgaggtatcttgtgagatcgccatgggtgagtcgatgagtcgatgagtgagtgtactgagtgctgattatgatgcttgaataagagatgagactatgtgagactgagggttgatgtggctgtgtacacgtgatttgtgattaggtaatattgtacctaagttatatgaaactttacctaaggtccgcatttttttcctcatacttattctctgtggccttttttctttctctctcttttctctttttctcttcaacatctaggtcagtcgtgtctctcgcctcttgatcgggctcagatggtgtgacagatagataaaggacatggactaaccttcatggaaaacaaccatgcctctacagtcaccgctgtgccttttaatccgttcaagtcgctagacattcacccctctttactacccaagtaaaaactcatatatccaaaaatggcttccaaggacgatttccagaagggtgttgccgctccccagttgagcaagatccgaattgtatgttgtgttttttcctcttctttctctcctttgcttcccaggtcgtggagggcatagtgggaatttgattattgacgagtttcttttcctaatatttcttccctcacaacagaccttgacttcccgaaacgtcaagaaccttgagaagttctccaacgatctcatcaaccgagctaaggacaaggagctccgagtgaagggacccgtccgaatgcccaccaaggtccttaagatcaccacccgaaagacgtcagtttttttgtttattcattttacctcgcacatgctttctgacgcaagattcgcccttcactcgcatacagcccctgtggagagggatccaagacctgggaccacttcgagatgaagatccacaagcgactcattgacttgaacgcttcctctgagatcgtcaagcagatcacctccatctctttggagcccggagtcgaggtcgaggtcaccatcaactctgcttaagcgtctcttgtgctagatactgttcgaattgatgacttggggaaacttttgttgaaagggtatctcgtggagaatcgttcaaatatatcttggagattgtttctgttggaattaaagattggggcaatgtgggcgtgtatatatcatgcatgttcacactctattgtgtttttgggcctcacagagaagaccgttgtagttgtccgtgttgatcttgaaagaacccgtacaggagaaaggttaaaagatcaagggaaagttgagcggatatcagatcagaggaagatccactgacagtcaacgagccactgagcgtttatcttgtgaacccctcttccagactaccaaacagaaactactctgtgcagaaatagaccaatccatctcgtctgccgttctagttcaatctagacaagaacgacacgggcctatcatgtgcctcaactaacccatcatggcatgtacgtgtgtgaagtctagcgtacaaagtctggatacacctccctctgactttaaccctaacactcgtcgttcgttcaacaagcgcgtcaaacctatgaggatacatcctggttttcatccataccttacatcattcgtcgcccgtggctcacgactcgattccaagcagctacgctcgacaaaggccttctaggtctacaagttctcgttcatccattcacctttcgaaagaagaaatcaaccaataaaagggaatgtcatcccggacactccgagctagaccagcaaacagaacatcctactctatcctcaatgacccgttagccatccatctatcttcctcctcctcttcgtcatcctcgacaagatcatctctctctgcttcttcatcaagatcctcggctcgatcggaatcaagatccaggtcagcctcaggctcaagatctggatcgtcttcgacctcttcagaaatacacgtccaacaaccttcattctcagcatcgacaccaaacgcagagataatatggtcaacagccgagaatgcagaagcagagtcgtccaaatcgaaatctagatcaaaaccgaggtcaaaaacgcgaaaaagctcgaaacggctaagaaaggaggatacgaagcagaacgccagttctggcttgaagaaacgacgatccagaacctttgaggatcctgcttcagatagcgagagtgaggggtttgctccttctgacgaagaagacgaggaggaggaagaagaaaatggggatgaacagatggacaatgacgataggtcgtccgacatggaaggacgatacgacgcgagcggacaggacacaccaggtgcaagaggtagagggacgaccagacggaaaggaggccgaggaggttcagtgggttcaacgcgatctttatcgttctctatctcgtccaacaaacagagatcatcagcgtcaacagccacaataacatcagcctcaaaaacacacaccaccaggcccaactcagcactatcaagagcgccctcaaaacctactcgacgaacaatctctttaccgactcatacgtccaaagctcaagctcgtcggaaggaaacaaagctccctccgacaagtaaaaacacgacccatgaagctaccatgtcagatgctatgcctcctctcttcccacattatacctcctaccttgccgcgccgcctgggttgaatcggcgaagcgagatcgtacgaaaggtaggaggtcgtcggatcactacggacagtcacgggaacgagcgagaagagttcatcagggggaaagagagtgaggaagaagaggaagggagaaaacgaccgatgggccctggtgaaacggcgaggagagtaaggatcttcacgagagcagcttgggggatgacgccctgggaaggatgggcaggagaaggttggagacctaattctgctagaggagataaagacaaaaacggatgggagggagtcgagagacattggagaggaatcgaattgctagatgagaggtatgttcccttctcgcacgtatcttccattctctttgtaaagaaaagcagtataatgatcttcgttcatatatctggtatggccgtagacaaggagcaaagtttttaccgaagccaacaaacgcaagttctcagaaactctacgctgggattttaacagatgataaggctcaagaggaatactctataccagtctatggggctacgtctttaggttcgtccatgtgtcgtcttgattgacagacagagatatatgcataaagcacataagactgaagattctcttgtgcgtatatgtttgtatttggattggttatgacaaatacagaagacataggggttgagaagaaagggtgtatattcaatcctggcggaccagtctgggatttagattggtgtcctatgactgaagaggaatccgaaagtgagaggatgtgtttgctgtccttctacgctctcgttaacagctgccttgtgtccaattttaaattttgacgaccttatcctcctttcttgtgcctcagaacgaggcttcaagctctatctagctgtatcagtccatcaatctcttgacgacagtctccctatcggacaggcaaaaccttcgaacactcctggatccatccaaatttggagtatctctccaccttctcgtccctcacattcatccgaggccgtctcagttgacccttcagcgatggatgtgtcaagcgaatcgacaccgactgccacaggtgtcgatgaggcagcagaaccgtctgtagaggtcgatcttgcaacccaggcaagcactaagggaggagcagaagaggaagaagaaaaaacagaagagcctagtccaccgagagacggattcgtgaagagcgaagatgaagaagaagaggaatgctatacccttcgatcggtcaactcggacgaagagcgcgaatcatccgttcgaacaaaacgttctgctctgaagagcgcagcctgggcaccgttaacacctgggtacacacctaaaaggatccgagatatcatctttaataaaactccggcttcaaaagaggataaggaggaggtactgattgatctcgaggggtgggagatggaaatgaagttggagatggtggtttgtatcgacggagggaacgcgtggaaagttcagtggtgtccgagtgattcagctgataaggtacatctttgcgttcttcccttccccgttacacatacaccttagtcttatccttcttttctttcaataccaaaaagttgagcaccagaaacggatccaattccaccgcagatactataccaaagttgggcgtcttagcggctacattcgaggacggctccgccaaggtgctctccattccagatccagatgcggttcgtggccaggcggatgtgatatctgagaacaaagagaaaccgttatatggtctgtcctttcttctatgataacctgatagcttaagatggccttttcaaataaccattgacatctacctctttgttgtacggttatcgataaacagtcaagctaaaaccgtcgacagtattggacattgatgatgggatgtgttggtgtctagactggggcagcgatcgaatgttggccgtaggcacgactcatggtttgtttttttcctctctcttccttgtttatttttgtgaagctgactagggtgaagttgtttggtctaggaaaaatcttggtctgggatgtaaaggaagctgctttaaccgaggacgaccttcgtatgatctttaactttccttcgattgttctatgacgaaaagaacatgaaaagtgttaattttcctcttctgtcttttgttgacaaacctagctatcccactccactctattcaagctcactctgctccgataagatctctgtcatacctgcgtgcgcctcaagctgacgcacaaggaatttatcaatatgattgggagcaatctcaaatcctgtcagtgtcaatgaacgggcggatcgtcttgacagatttaagagagtcaggaggaagtgctggtggtggaggaagctcccttacgctgcgtatggttcgaggtatggtgatttactttgattctctactgtatacaagtaaatgaggtttttgattgcgtccgagctgatcaagttgctcataatcctttcgacagatatgaccttagctactacagcagtttccattcaaaacggttcaggacttattggcgatggagattttgccgtacagatgattaggggtcgacccagaaacacgtccacatttagaaaagtttctgctcaggaaggagctatctgggttcgtcaactctttcttgtttcttcttcttatttaactaaagaacgaagagaaataactcgctctccttctattttcgatacgaaggccctgtcgacgtctgattatcatcctaacattgcctccgcgtcggcagatggatctctcgttgtctcaaatactctaagggggacgactcataaaaaagttgactgggtatgtccgtctcgatgaatttctgttcacaatgcatacacccttcgccttcggtctctgattgtcacccgggtccgagacgttcctcaggtatcgctcatggaggtcatttataggatggatatgaacgaagctacaggggagatgaggatgctagacaacatattacctcaggtttgtgtctccttataagtctttatactatctctctctatgttattcactatttcctgcgttgtctttcaactctattcgaaacacagaacgtatcgttcactcgaacacacgacagcaaagcctctgttctaccttcgctatctgtctcctcaaaaccatcatccataacgaatactgtccgacctatcacatccgcttggcgacctgagatagctgttctctcaacctcgtggaattcaggatctggggtaggcagatcacctttgttggctagtgggatggcatgtgggttggccagggttgatgtaatgatcgaaggaagatggaatagagctcgatttagaagggcggcggatatcgctgcattgagagaatgtgtggacggagagacttaagagaaggcacgcgtagcgcagaaggtgggatacgcgatcatgaagtgaaggaagacgatcgagtattgttgagttgttgctctcgcgtgttggtgtatcagtgtgttagtacgattacgaatgatcatgtaaaattcgcacgatctcgggaagctatcaacaaatcaaggcaaaataaaacaaacatcccgagtatctaacgtttaagacacatcccaacatctgatcttctcaacatgagatatacaatacatctttgagaacgctggctcttggcttgttaggtgaccaaataaacaaacattaatctttgttgccaccaacatcgtcgtcgttgtcatcgttcaagagccaaccctcctcctttagccagttttcgacttgttctctctccaccttgacttgtttctgtccttctttttctcccttctttttttccttgttgacttctccaaccaaattgcctagaacccaactgggcaatggcgcaaacggctcactttcgtcgacttgagcgtctgtggccagcttggtagttctagatgcagcagagggcgagactaatgttgtcagacaggcgtaacataatttgtcttccaacggcatcgtcggcgtttttcctggtgtcgtcgtctcgtgttctgaatgagtttgagaaggcgaggtcggcggggaagattgactggaaagtgaggtaatggatgtagtggctagccattctagaggactttgatcagccggaagttcacaaatcggacaaactcggccagcccagggattttctctagggcaactagatggtctggcctgagatgaatcgtgcgagggaggaagatatccgggaaagactagtttggaggcggttcgggcgatggtggagacggttgaggggtgcgtcgtgttgagtgtctgaatgaattctgcagtaaacaagattcggaacgcaacgaaagttagttgagtaaaacggagacgatcgatgagagcagactgaagaggaagaggataaatttggaagatagatgaagaatatacaaaccctgagtgagtgcctcaatactactcttcccaccttttccgtcctcgccaatccctaccccgctatcccagtcaagatcccaactgggcaaacctctctctctggcgtaccatgcaagctccttctttccaagcccaccgagtggcctgataacattgacaccctgtgcttcaaatgagctcgataccaacaaaggaagcgagtatcctcttccggaagcaagcgcagagacgacgagagaagccgatcgagttgacgtcagacctgtgagaagtagcgggggcgttggtgttggagatggggcagtagagagagagtaggccatccgtgtgaggagagaagaaagtagctggaatcggagagacggatgtgacgatacaggaagttgagctagtaagctgtggtaggaagaagttgggttcgcgttgggaagatgcgtcgtcttaaggactatcgaaatgacatgagagcagagagaagtccgaagaaaatcagaatttcttctcgtacgcaatggacacaagacagaagaagaatcttacctcgtccaggcaacacgttcactccgatcgtgccattcagtccacctttatcattgatgagctctccatccttgtcaaatgcctcttccaccttgaccttccaagtctcccattcatatttctctgctagcgctttgatactagtccatcttttgtctgctctggtctgttcctcatgcccaaagtcgacaaagcccacgacaatccggccccaccgagctcgacccgttcgagacttcgtcgaggtagactgacagaatgctcggtggaagagttcaagcatcgatatcgaggctgaaccaccagagcaggcgagtaggatagaaggcgtaggcgtgtctggctttcgagataaaggaggtaggtgaggaaagagaagtcgggtgaatttggcaacgacaagaagcgccagacattctctgagtaggtgagggaaaaggaaaggggatgaatacactttatagttgagcaagcgaatgcgtgtggaggactatgaggaggaagagcctgatcttacctgcagtaggtatagtgaccaagaaccatgctacccttcctatccttacatctgatgcatattctagagtcaattgtctttttctctattagaagtaatcataagcagttattatcagctctttgattgggccagaagagacaaagaagaatacgaactgggcatcaaagtctcctccttcggctctccatcaataggtactgcatccgggtttccacaagacatctgtatcgaaaatatatgttgggttgcgtcggccgtagtagtgaatacaactgtaaataaagtgtgtatgctgcctgtttggcagttggtctgttcaaatgtttcctactcaaagtggaggtaaaggatggtcacacaaagccgtaactatggtcacggaagcgtttttgaatgatatatgccagaattacttatctagacatagcgcgcataagtactatgccgtttgagtcacgtgtttgtcaatacattggtccggcgatataacgccacccgggtgatttgagtttcagggtctcctacttccgcttcccgcttggcccgaagataaatatcttctgtagactttcttcacaccgggatagaatccccgtatttactgttaaatcacttacttgccgattttgattaatcgcactgtgtgtatggggatcttctccgttaaacaccaagcgagggcggatatcgtgcgggtatgaaagggatcggagggaggggatctacattgtgtttacgcggactcaatgctcgttccaactgtgttcttccgagcatttagcctcatcatgatttgatttcgcacatggtcgacgatggtttttgtccaaccactttttgttgtctttaatttcttggtctagatgttcaatctctcgtgaagatcgatccttgggcccgatctgttattcgcaacctaatcaacgtacataatccgttccatggccttctggattgtctgttgactcgtttcgtgcacatatcctgtcgaatcttcacttgatcactaacgactcatactcgctctccttctgaattatgttcatggctaataagacattaccaacaaagcactcgggtccctccccatattgttgacatgctaataggttcgggtccggaactgctcccacttgagattgttctctgatacctatacattcaggtccaaacaagccaggtctgcctgtacgcctgtctttgttctggtctcgagaagcctcataatcgcaggagatcgcagtgcgtcctccttctgttcgcgtccttctgagtttgtgtacgcgttcttgttcagcttggttgtcctttgtttgttgttctccagaccaacttcttccttgcgcgttcttcagaattgtataaaagatggaatgcacaaaaggtcgaaggggtttgtagaagacaaaaaacgtctcgtctcaatctgttcatctttcatatcttgcgacctctatcctatattcttgatcttcagtcatcatgcgattctcttcttctactcttgcttcggtcgtcctgctctctgcagctgcttctgctcagaaccactccagtgttctagagaagcgagacactgctgctcaacctcaggcgtctacttacagttgcgaatgtgcgcccctttctgcattcagtcactcttgtcttatcttatcgaagcgcctacttatcttctacatcctctgtattcatctagacacatgccctacctggtcctaccaagatgatatctctcgagtggttctctccccgtcttactcatccatgtatgacacaaagaccatgctttgtggctacggctggcagtaagtctttcgagactctttccacttttgtctttcaagtcctaatctcgtccctctctgcatgaaatctaggcgcacagaggatgccggaacttgccgatacaatacggcaggacagagtgtgtataataagagcgataagacggctctaagctgtccctctacgacctgttagttgtgttcattcatattctggtgggccccatgtatgaagtggatggctgatcctaaattgcgaattttccatggtttttgctagccaacggagattgcccctcaccggtcgcattcggagatgcatctacaaagctttcatataaggagtcgacctcttcaaccgagtacttatgccagtcagtctccatcatgcctcttcctttttttttcttcatcaacttatcgactgacaatcaattctttcctccctcttccccctgtctatcgttcatctcagctacaccatgtgagttcacattctcatacttttctgaaagaacgagaagctatcagactgatatcaactatttatctgaacatcagtgacaaaacctatgctgccaaatgcttttacaataaggctaagggaggccgaaagaacaactcagagacgaaatccgaggagcaatgcccattgacagctgaacagagctgtgctctccgaaaacgatcccagaagcggaccgaaactgagaacgagaagaaactccgaagcagacagtggagctaccacaaaacccgggccatggaggctgctcgaaagaggcgttaacctgggcattcaagaacatatctgagaatacttcttaacttctcttttcaggcgatcttcaatcataacctctcatcttcaccttattgccagtacttctgcctgattatttgaaaaggtagtcgatcgctcctgctcttcttctgttcttttggatgcatcaaatatatataccaccatctataccccgctcgatacccattatcttcatttgataaccttatttcgttccttcactcatgaatcattgaaatttccttttttttctcttttttttctctttcctctcttcaaaacaaacattcaatacacataccctactacgatacccttctgatctatgaatcctcacataccaaaagtgcagaaaagccacggtgtcgaatattttgaatcttttgacacgaatatttcagactgacttcacaatatatatctgctttctcgttatctaatctccaaccctaactccccatatagtcgtctcaaagaaaccttctcaactcgtttcccccctaacagtcacctttctaccttccgcttggccttccttccatctccccaaatgttcaaattatcatccaagaagcctataaccaatcaacaacatgatctatccaatgttcttagggatcgctcaaatatcaagttgggagcgatactgaatccgttagaaggcgtccaaggggatcttagcgcaatcgcggtcgatcctttgggtggttggctggctgttggtgagttctaagatctcgatttgctgctgcttaggagtatattcaacgaatgcgtatgctgttcaaaaggcaagtaaggtactctccagagattcaagtgagattactttgatgatggtcaatcgagttgcacgatcttgatagacactgcggtcaaatgaacagagctttgtaaggaggaggaagaaaatgtagaggatgagtcaagaacgaggactatgcaccagaagatccttaagaaagctttgatttgattctaactaaaatggttcactacatacaggtactttatccggtgccatctatctcactggatcttccaccgtatatgttcctttgagtatatatcatacacccccggaacccctctggaagggaataacatctgtcaagtttttgtgcttccatcctggtcatcagcgacttgtagccattggtaagatcaacgtttccttcttgatcattccatcaacagtagatcttcttgttgcttcaactttgattgagtttggctcggcatttgatacatatgtgtagactcgaaaagtcaggttcatatttgggatctgggattgattgatccgaagaccaatataccatataaagaagctaccaacagcttgtataataaagtgacgttagtcttcttttcgtctctccttgcatctattttgctaaacttcacttacccaagcttctcttcatcatctcagctccatagaccttccttcagcttccacctcacacttacctgttaccttcaaagatggagcaactggttttatcgacctatcccgatccgcctttctcgcaccttacaagatccccaatgtttgggcaaaacatgaaagtcgattacgtgcatctgggatcgaaatccccgcttcaagatcatcaaccggtccgcccatgtcaatcggggtgaatgttaatccaagagacagaaatttgatgttgatagcgtatgagggaggagtgatactttgggatcttgagaagaaggagtcaagaaacacgtttgaattgagtatcatgccaggcgcaccgggagcggctggttattcggacccagtaagtgtttcccttttcttgtcccccgtagcttggaagacatatcggactcatatagtgtatctcagaatctatttacggagagaacaccgggagtgacctgtatctgctggaagccagatggattagtcttcgctgtaggatgtaagatgtgtttcattttgtctcctgttttcaattttttcctcggtaagacagctcatcagcctcacgtacttctatatcctcacgtgacagatgacgatggatgtatagctatatggtctgtggatgactctgataaaccactctctgttcgaacggtggatgaagaagatgtcaatatcaccaacgcagaaagtgtatgtttttctttccagttcaccatacaacaaatcacgggctcgattctcacacatatgatttcgaaacattagttattcgaatccggcgccctcgaaccgggttcggtgactgagggttctctaccgaagtcgctacttcttcctcgagaacctatatttaagctttcatggacttcgttcccatcttccaccaccctcaacggtcttgttccacctccctcaccagagactatcgagttttctcaacgggaagagactattctcgtcatcctcggcggtcaatcacccagcatcaatccccaaggcgttactcttcttcagtttccagcttttcatccgccagcggctgctgtcgctcctccttccggcggattaagttcgaatgtccgagctgctttcaaagattcgttgatctctaccggaacatttgtctaccctacagagagaccatgcgaagacttttgtctagtccccagagcagatccacattacggtctaacattcgatccagtgggaattatctttatcataggttcggtgtccgatcgagcaggctggatgagtggacgagggttgaaagcctattcgttcccaccagtaagatccactaaggtggctgtgagtaagactcgaagggaacctcaagcagaagtaggagaagatgagtttgtgcctatatcggcgccacccaagacgctcgttcaggtcaacgcggagccatcggtattttcacctcaagcttggggatttgcgttatctggcgatactgagaaccaatcagatagtgatatagaagacaagggcaaagggtgggcacagccatttgtaggaagttctggatttggagagtggagcttgtcggcgaggctgtggtgtggggtggactcgataggaggaagttggttgaagcctataacgtcagagggactgagaagaattggcggaggggaaggaagagagaggcttaacgatggaaacccaaggctctggcttaatggtggaaaagcacacggaaaggtcgatggggataacttcaaaggactcaaagtgagtgaatctcttctataatctggacatcgagtgtttttgtctcctatcagggttttctagattgacgcaagagttaatttcacagcttgaaccacatcgccttttggtaacattccacctcaaccatctcgtcaggttctttgatatttcttcccaacttctccttttcccttctcctctaacaaacgagtatccagaccctctttcaaatcttaccatcgacctgccttccatcctgcgaaaccctacgatatctcacacacccattgcacagtcatatgcacgcgatccaaataaagtttctgttcaaactgttgaatttgcatcgacgaccttggaggtggctgtcattcttagtacaggggcgataatctacttcaagtatggtccggcgcccataccctcgagtccatcttcatcctccggacctgaattcaccgatctacgacatttgtcatcgccgacgcctcatctcgatggcttccagcctcaattcatcttggacgtcaatagggggccggtaggagcatgcgcggtttcagatgctgggttccttgctgtcggattcttgcaaaacagtctagcggtggtgaatctgagagaaccagaaataattctaggggatggattcagtgagcaaggtgaaacgaccaagactgaaggatcgatcgttgggtcacttcgttggactgtggttaatttgggagcaggtaagctttataattttgtacctctctactagtcaaatatgccaaaagatggttgatgcggccttgtcatgcatgcacgctgggatgtatccagattctacaccagcaatccgactcattgcttctggcaacaagggtctcatccgaatcttcagccttcattatggattggctggttgggaaattgagagaaaaccggttgtgtgcacatacgaatcgttgggtacccctttgtcatgtttcgtgctcgatctaaagtctggggaggagttggcacttgatcctagacgattagaaagtgagtactgctctctttcaagttaatctacttctcgcgttacgtcgagattgacgaaccggcttctactgcgtctctttcgcagtggcgagagcgtcttctgatgcacagcaaataggaggcgcacaaaagagttctcatgcaggctctcagagtgttatgatattggcagggaagaaaggacttagatctcagttgaatttgaatggagaaagaattggaaaggttgaagttcaaaacagtttgaaagccgtctttctagtctataaacatggtacgttcagtccgtctttatcatagtgatgaatcagatggactgattctttgagaggattatctctcgttttccacgcatagggggtcaagttcttgtggcttttgccgaaaattctgatatctacgtctattcagtcccagcactggatcttattattcacatcccctcaaggtatatctactttgatcgaactcaaatatgattttaagagaacaaacaactgaacgatagttactcttgattgtacctaatcttagagagacacttggggagatctcgatggatccgttctctggtatttttttttaaattttattttgagattgtcatcattcctaaatcagtcatgtcctaactgcagacatcattggaattgatttactttgaaaggtgactatctcgattatcggtccccccttgacattcggttccatactttgttcaacaccgctaaacctcaagatccgcaaattacattagacacccttcgcccacccatccctgctcatcctgttcctgtcaaatcatcagtcatcgcttcttggctgggtacatggggaggtggaacgctgacgggagctcagatcgatgcgctcattgctggtcctaaacgaccgactgctcttcctaaaccaaattttgcttctccaccgacgactgatcttaccgatgccaccacgactacttatacgaggggaacatcaagcgggctggacggcaaaccgattcctgtgagatcaacagctcgttccagtagagctggaggaaggaacgatccattcagagaaatggctgaagcagctgaagaaagggtcggtcttcctgttgctatcttctcactatagctttggctgatacagggcttgtatgagaatctagggcaatatgttggacggcttacaggatacgatgaaggacataggaagacaggcctctgagtggcaagaacaagctcgaaggactgctgtacgatttactgggtttctcttcctcttcacatcatccctgagctaatactacctgttctgaattgaattatagatgaaagagagtgtcaagacatcggccagatcgttcttcaagttctagatcaaactccccgtctttgttcaacctttacctggggcgacttgtactctatgttaaatagaaatgataaaaacatgataataatgtattcgaccgagaaggacagatatcaagaaaaagaaaggaagaaagaagacaaaagagcatattctggtctacccaaatttctgttgctgaactcttcgttcatctcctccccaatccgaaccttccacttccacctcctgctcctacgccagacccaccttcccttcttccacctcccgatccgagactcatctctagagctctccttcccactccgttagctccaggtccattgacctcggacatctttcgctccaactcgacgactttagtcttcatacctgaagaagttccgtctatccattgtaagcttgaaagatgagcgttcaaaatctgtgagatctgcgagattggatcttcgttgactcctgcgctattgcccgaggagggagtggcggctgacgaaggagttgttgatgatgtcggaggaggaagaaggagcgaggaagaagaatcgattttggaaggaacaacggaggagattggatctagaatgttggtggaggatgaggacgcgttgccagaatgagaggaagagagcagattgacttcttcgatcatcgtggttaatgagcgagagagagtgtccagctgggagtgaagagattccgcttgggcatacctgtagaacgccgaggagatattgaaagagagcgaaaaagaaagaagcaggcctcagtttactctatcagatgcaataggcatgattaaaaaaaaaaaagagtaaaaaaaacggaaagataaaggatacggacgatttttccctctctccatcggcaggtccaaagtccaaacctccagagcttccaccacctttgacagctccaccaccggaagcatcaaagatctcattcgcttgtgcttcgtacccgtcgagcaagttacccaattcggcttgctgagactcgatgtatgtcaaggaatcagtgatcgcttggttggactgctcagcctctaaaatctgagcatacaaattcgagatctatagcaaacggcccgaatcaataagttaatctaagatgcactcgatgtttgtttactttgaataaacacggctcgaacctgatttccgttctcgatcaagacccgatcccattctttcacctctccagcctgtctagcaaactccttgacctgactatcgagttctttactccaaccattcacgatatcttccaatgtctttcctttgagcaggttcggtaccggctctgaggctttcgtggccaccgacgaaccggccgtagtagtggcagagttagtggtagcagcaggtgcagcagtggtggtaggaagagcaaatccaccagtcttgccaagcgtggccgaggcaagagcggcgatagaagcggtggtagtggtggggggagcagctgccggcgtagcgggcttagctccgaagagggaaggagcggccggagcggtactagaagatttaccgaggagtgtaatcacattccagaaacatatctgttagtacttatctttgatgtcgttgaaatgagcaggaaacatactcggccggcttagcaccaaataggcctccagcagcaggagcagcaggtttgggtgctctgaaaagtttgatatatagaaggcacgcgcattagaattgaaaaatacgactgcaatattgagacgatcaaagataaaaaaccgggacttgctctacaggcttagctccaaacaatcctccagcaggcgcagaagtcgttgctgacctggagaaaagattgacaagaaagaacaaacaaacaaacggttagcgaagagcgaaatcgccaaattttggtcaaattttgtatcgagaacagaaatctcgaacgtactcggcaggtttcgcgccaaacaatcctgctcctgcagcgggagtcgcactcttcggagctctgatcgaacgcagatattgatgaagcggttagtatgcaggcacaccgagatatgatcttgaatacgatttcacaggacagcaatcaagattgagacgtactctgcgggcttggctccaaagagcccaccaccaaaggcaggcgcaggtgccggagcggcagaagcgggagattcagccggctttgcaccaaacaatccaccagcagcgggtggcggagcgggcgcagacgtcctacgcgtatccataagatatcgaccgtcagcgcaggacacaagtgggttaccttgacaaagaaaaaaacaaggaaaagaaaaacagtgaagcgtttggaaacgtacgcaggtttagctccaaaaaggcctcctccgaaggcaggcgcaggcgcagcggtagctggactattaatcatcccaagaccatataccagcaccatagacaagccgggcaagaaagccataatttcaatatgagaggacaaagaaaacaggattgaagaggagacgtagagagaagacgaacgttgcaggtttagcaccaaacattccaccgctagcagcagccgctccctccgccggcttggcggctccaaacattccaccaccgaatgctccagaggcagcagacgctggtgcaggagcagctgtcgatccggcagcaggtgcaggtgctccaaagagagaaggcttgggtgcagctggtggtgcggctgctccgaaaagagatgaaccggcgggagcaggggcagagccagaagcgggggcagaagatggttgaccaaagagtgagggcgcgggggtgccagaaggggtagtgctcgcgggcgctctaccagttcacggttcgaatgagacattagggacgtgcaaatagatgagattgatcaggttgataagttcaagctaaaatagatgattcaaaagaaaagtaggcacatacccaaagctgaatccacctccagcaggagtagctggcttgggtgcccctccgaacagtcctcctcctccagccgcggctgctcctcctccaaatcctccaaagccacctgagctaggcgtggacgatccggctccagatgcagcacctcctccgaagagtgaagtcgaggcgggagcaggagcggcggatcctccacctccaaagaggttggaaggcggaggagcggatggagttgtagtggttgaagggttcaagttgaaagccccgaaagcaggagccttggctggcgttgaccctgtgtcggtacaagggaacaactcaagcggtgagccagaagaagatatcgaatccgagagggagcagaggtatagatgaacgagaagaggatgaatatacgtaccagatgcagcagctgattccaaggagaacaagacacgaaggaaaaacaaaacgatcaactctttggtccttattgaacacccgaacgctcagagcatctcgcgtttccactagttctaaaacatgcccgaggttatccaaaagacgagcaaagaacgtggcctctgctatctacaaagaagaaaacagtcaagatcaaacttacgagctccaaagttgaaagctgaggccgacgatgatgatcatgttccccatttgacccaaagagacaagcaagagcgaacgaaacctcagaagcaatgtcagcatgataccctatcctgctcccctacctccaagtcctgcgaaccatgagaaccatgagagcttacccatcttgtgggttatgttgggtgagcgaatgagcgttgtgggttgaccaagaagcaaatgctggtaagaacggaatccacgccatcttacgcgtaaccatgtaaagcgtgaccaggaggcctcgaagccgcagacctagctgtggctagagcgcttctatctttcatctttcgtcgttcagagcacaaggagatgaacagaaggatgtctcggttgtgtgtgtcgccagagagagggagagagagaaagagagagagagaggagcagagggaaaaaagtcgcaaggaacaaagatgtttacaaagagagattattcattcgatcgtccagattccaaccattttacataaacactccatccactcaagcatccttgggcgtcctcggggtggagaacgcgacgttgaggatgagatttgcgtatcctggtgtcattgagaaatagagatagagagagagagaacaagggtcagtaccattccttgcgcttgtcatgctggttgcgtctccattcgaagcgcccacagccagaccgtaaatgagggaagagaaagaggaagaacataccctgtccgtggaccttgtcaatagcccgctgagcaacctctctcgtgtcaaagctgacgaaagcgtaccccttcttgactccggtttccctatcctttccaatgtagaccctggcgaccctaccgtgggtacctctaatggcctgctcgaacaactctcggagatcatcctcctccacatcgtcagacacgttggtgactcgaagagtgggcagatcttctcgggaacctccaccaccaccaccaccagggtatcgagaatcggccgaaggctgaccagctcgggcaccccgcattgacctgaatagtagaaacaatcgatcagcaacgtacatacccatatgggactatctaattgaaatcaagagcgaagctagcaagactcacggaggtacgtattttccaccggtggaagcaggagcagcagcctctgctggtgtcggctcggctccgaagtcgggggtttctgtaatattcccaaaacaaaaagccagacgttgagttgtgagcgctccttgtatgttgttacgaaggggaagaaaataaactaaccgctcgtgtcgggtccaagtccctccaaggtctccttgtaaggacatttgctggtgaactgtcggaccaaacaacaacgacgagacatggtcagccacatcattcactgacatcaacccgaaagggcggaaggatgagactcacatggtcacccttgcacaatcgacagacaatcttcttggccttgagagcgttcttcgggtcatcctcggcctccttgacttcctcagtctgattggtagaaggagagattcacatatgagtacgtgtagcggaaaaagcagaacggcacttccaggtaataaggggctttagatgaacgtacagccttgccgactccgagtttgaactgcatgttctctccaacggtggtggtggcgttctgcgggcctgcagggtttcccctctcggctccaaacctgttgttcaacagaacggatttcgccgtcagctttttgaaccaacacatgccttcctcgcctgtggtttatctcggaaagatctcgagaaaagtatcaacgaaagagatcgtacttagcccaggactttcgctcggcaacgacgtgggagacctgctgcttggataacgtgcgcttgatttttcgggtgatctatatagagcggaagagtggaagggtgagaggtggaaaatgaagagtagaaaagagtggatgagcgttcttggttcggtttgatcgcataggtgtatgtatctggacttgatatcggtgggcaagatcatatttcttgcgacgttctcttctcggttctcgcttgatcctcttcttgggcgttcctccctgttaaaaatccagacaatccttccttccttcctgctttgttttccaccttcataatcgagtcgaccggcctaacaagaaaccgtgacgcatgggcacccacacacgcgtcgtgatgatgtctaatactggagtctacggaagcacgaacgagacgggacgagagaatgacacgaagaaacataaagaagaagaagaagaagaagaagaagaagaagaagacataccttgactttctttccgtcatcgttgaacttccattcgacgatcgtggtcactccgtccgaaccgacggtctcggtcttggcagggaggacctctgaacatacagatataccggttgatgacagtgttggacgagtatgaatccatacggtgtgccaggcaagctgtcagcatacatgtgtaccctcaccatgatacaccaccgagatcaacagaagcagaagagcttaccagtctcgtcgacatcgtcggcccagttggtctttgcggcactatccacccagtaaaacggtaaaaaaaaggggctcaacatgagctctacccatgaacgtacaccccgggaacccttgctggcactcacgtagacatgatgagctataggaacaagacaaagagaagaagagcaaggcaaaggtggtcggtcactcgcaaaggcgaaggaagaaaaaagatgggccaaatgagaaaagaaaaatgagaattagtgatatttgatttattcttacttaaggaaaattaatcaaatattttcttttctctcccccctgcctttttctttctcccagctcaacggctgagaggatccaacgtcgacatccatcaccccagtcagcacacagacatcttttggaagaatgaagttcgcaaggaagcaggtaggaaagatctacaagtccacgttgatggacaggctcgtccagtcggttgccagaaacaaggattctccagactggcagcgctcgcagttacgtaagttctctgctcttcctctcgctggctatccctgtgtttctttctctttttggtgcagtcggttcaaagacagatcgtctcggtagaaggtcggactagagatcaagcgttggagagagaagaggtgcggagaattcgatcgcatatgttgtgtcgcttggtcgtgtgcttgctcgtttgcattctccgtttttttccttttcgaactctcctcggttgtcttttgggattctccttggtggatgacaacgggggttgtatccatcctctcaagcaccagattagatcaggctaaccattgttacttcttttgttgactgtccgttccacagccgcccacttgcttccgccgagaccggtgccgacgactacttatcccaccgtgcctcgtcctcgtcaggcagctctcgctcagatcgccgagtcctcgccaaagaccagctttccgatcatgaccactatcttcaaactgccaccaagcctaccgccaccttctcccgatcttgtctctcacatgctcactcatatctcttcccgagaagccagaatcgggaccgcaccaaacaacaggaagcttgcctttctcggtcggcggttgctagagatgcacctccagatgtttttgttccacgtgagggatccaaagaaccacttgcctggtcaagtcgctgaaggaagggagcttgtcatcaaaacggaagacggaaagactcttggagatggatccgaggcgcaattcatgagggaggtgctcgacccgcgggtcttgggccagtatgttggaagcaaatggggtctggaaaactacatggaatggtccggcaaggtatgtcgatttttgtctgtgaggcaggttgtccatatgaaggaacaaatcaaggaaatccacctcgttccgaactgaactgatcagtcatcgtacctggtggttatatccgtcgcacctcagactccggcatcttctgcagtggccgatccgaatattcgagtcaagagaggtgtgagcaccgtccgtgggaacattatcggatctgtgttcggtggattgtctcatgcttatgtacgttgcaaccctctctcttacactcggatgtaaatctgtatagtctgatttattgatttcggaacatctcttctcatcaacatcatcatcatcatcgtagggagctccgatgacaaacaggctgttccacatccacactctaccccatctgaagcctgtgttgcctggctggcttcacggccacgtcgatgtacttcaatcgcgcgcggaacgagtcgggttgtttgtgactgaggatgccgttcagcgggagcaacagctcttggctgaacgacagacaaagaaggagcaggagatcggagtcaaaaagcaggcctacagggagcaagatacaatcagaagtcggaggaggaatccagcagaaaccgagaaggccgatggagttgtaaacgtctagaatgggatattctcttgtgttcatctcgttcttgtgcttgtttggtcaatgcaaaaaaaaagtgaacacaagataaacacgataaactcaagacagctggctcagagatagacatgcgccgtacatgcgtgcttctctttgtcatgagctatacacaaagagagaaagcaaacaaagttgatcacagaagaaaggcaggacaaatgcgggccgggtcaggattcggttcgtcccgataaataaatcagcgagcggacgaacagaacccatctctctccatacaatcatccatccggcactttcgatcgctctgaccttccaactctctcgcctacacacgctagatcatacaggatcaaaacagtattcgcgatagacagctgggatgtcgaacgaggtcttcttaatctcgggttcgtcaataaacttatccttctcttgactgagacgggttcttggcgttcaagacatcataccatggatatggtctaatcgaccagcagcttactttgtcttcttgctttctgcttgattagatctcacgttgatcattcaagagtcagtcctgaacggatcttctcttttcaaagcttcagtttatgtctctgggggtgaaccggaatctgaatagtttacatctgggaaatacaggacgaagagaagacattcggatgtgaaggaagcagcagagaaagcgctagggctgttgaaagatcaggcaagacctaaagacttcagtccgggtaagtttcgttcagtctatccgtttctctggtggtcgttctcgccttgcccaggctagtgagaacagacaccaaacattctccagtctatttctgtgttgatgtccgtcttgaagtcggctcagtcacaaatcatcatcatgtaaggctcaacgcggtcaacaggctgatcttgttcccattcatgtttgacattcatccagaatcgaccaatgcagcagacctgattgcgcctatctcattgggcatgaagacgaaaaatcccaaagtcgtcgctctctgtataggaagtattcaacggctggtctctctaggggcagtgtctgaggtacgtctcatcccttaatccatgggtttccttcgtaacgcttgttgaacagtcttaaagcgcatgcaacacagagccggttaccaagtgtaatccagagtttggcaagcgtcgtcaatcaaggtgttgatatacaactcaaagtactacaaacgatcttggtgatcttgactacggcgaagatacacggctctcttcttggcgaggtatgatctgttcgccatcgaccttttcatattgggacattactcgagacttaccttgctggaacacatgtctggtcgttttctctgatcgcataacggataaggccttcagaatctgttttgaactgagaggtagtcggatgccagtcgtctcatccacagcagccgcttccctccgccaaggcgtcatggttatctttgacaagatctcactcgaagacacctcgtctgcagcggatgaaacgacgagctcgattgagctctccgacggctccactgtacaccttcgaccggccgcgctggacgggtacaggctttttgaggatctatgtatacttacagactcggctggcgccgttgtaggattagacaaagcagagagtagagctcaaaatctcctgaacttggacagtttaccagaaccttttggactcgagttgatcgagagtattctcagcaaccatgctactgttttcaaaaaggcttgttcttctctccttgttccatcggtgacgtcgtatgccatctggaaaagactaacgctcctgtcctctgatctcttagcatcccgaacttctggttctcctgcatcatgacctttgcccacttctactcagcaacctttcacttccaacctcctccgcgccttcctcttttcctcttacgcttcgactcatccgtgtgatatatcttcttcttcgctcattcccagacaaactcgtccgagaaacagagatcctcctcagtttccttctcaagattctatccggagaatcggcctctctcggtcacatgccaggatccgctccgataagagatatgcccgaagatagcatcccgtcagggagctacgcaacacaaaagggagaacaaagtcctggttggcttagggtgcttgcgatggaatgcatcagaggactctgctcagatggagttctactccgaaagatatggatgagatattccaatggaaaatctactgaagatgccgattctgatcgcgatccaagccctctcctccagccttcagatccgtctacgatgaacacctcggatgtgacgtcttcaccatcactaccggcgtcggtaccttctccaccccaatccaatcttttccctgcattgctttctattcttcatcggatcgctagtgagaaaccaggactattggggacgtctacccaactgaatggcatcggtgtttatgcatatgaatccgtaggaggtgatggtaactctccaggaggatcacaaggtggagtcggtggaagcctcggtgcaggtggtctcggacagaacccgtacggttcgttggaaatgatttcggggatcgtagccagtggagtgagtagtgtggtagctagtctaacgacggacgcgcaagccggactgggcgagggaagtactgtcaaagttcaatggttcgtgattcttttcacttactctcgtcttgaaaaccatccattgtatgggtgttacgtttggcatggcttgggagtgacttgaaatcctgaccctgttgctgttgttccataactatgtatagcatcgaccagctagacaagatcgaaccccccgtcttgcctgatacctacctctatcttctcgccctccagtgcgtcaacatcgtgatcgaagggttctcatccgtcatcacacccgtctatgcaactgtcctaccgctcaggtcatccttggctatagcaaagggaacgcttgggctatatgaagagagcgaggaggttcaggtgactcgaaagatgatggaggctggctggccggctttgttagcagcgctcagtttctttctgggacgtaatttatcggatgaggtgagcttcgtttggatcaaagtaactcagtttcgtttccagtgattgtctgctcatccatgtcgtctactctctcttcagctgttttccgatacgctggcctctcttcatgaagcaactgtcctttgtggcctgctaggcctgacaaccgaacgggacgcgttcatcggcaccttgtctcgacttgctgtcccaccagctgtcgtctcggctcttacctcttatgaaaacgctaccactcccaaatctcaaggaggagtgctcgccggaggtgcagaggcactgggcttgatatcactcaccggcccttctgtgcaagagccaccaagtttatcgtcaagaaatttgatctgcctcaaggttctcattggcgtggccgagatgatcggaggtggtctcggaaagagctggtttgatgttcttgaagtccttcagagtgctagctttgtgttggcgcctacaaaacgacaggccaacgcatccaacaagaagcgatcaactatcattccaatctcaatcgcccatcaatcgtccaattcgaatcttagggtaacctccgccggtccttcttcttatagagactcgactcgacccagcgtgaatcctcggtcatcgtcttccatggatcgtcagagcgatctgccgtctcgacaaggatccgacttggaaagcatccagtcgtcaatcagtcatatattcgatgctaccaccttcgagttggacccggaagctttaaccgagtttgttagtgcactttgtagactgagcgaggagatgcttgggctcgttcaaccgcaaacacaaaagggcggagcctcgaaaaaaacccattccgaggagggccccgctagttcgctcccagatgtgaaggcgttaagggacgccattatgccgaagaggaggaggtcaagtgggcttcatctcctaaaagataacgtgcgtctcttatacttcatatttgcctacatccgattgttctgtgtgatctaacgtgtatgttatattgttatatgtgtatgttaatactgggcccttctgatactcgaagcgacatcgaggagaccgttctttcgcaattgataagatcgccaagatcagcagtctcaatcttcatcgcttggtagtcatcgatccgagtcaaggctggtccctcatcgttgatcaccttcttgctactctatgtgaagctactgcttcgtccaccatccgtctccaagccgctgaagtgctggatgaatttttagtcaattctattcgggtttcaaacgaaagcgttgattccggcatccaccctctggtagtctcttcccttgcggctcaagtggagaggacatcctccggtcagtttataccagtggagatagatatccgacgactcggcctggaggctctgcatcaaattcttcagtctgcaggacatgcattggtagatgggtgggaaatggtgtttgtttgtctgagaagcgtatgtaggagggttggagagcagtacagccagctggagacattagcggaggacgggaagggtgtgagagaagtctcaacgtctagtcctattctgtcgcatcgcaagaatatgagtggagtctcaatcaggggcaatgcatcactgatccgagcagctttccaatctgtcagtaaccattccaatctttgttgaatttttttcccttattccaagcgcttcatcgacatgcggcatcttatcttctctctgctgatattcgcgcatcatgtttcttgtcctggtaggtcatcttggtgaccactgactttttatcgtcattctcagtggatcatcttcgacaatgcgttcttaccctggccgatttttcccgtcaggttgacgatgtcaacatttcactttcctctattggttccctctggaacgtctctgattttatccaatctaaacggccagaacagacggaccggacgttcgacgatctttggttctttagtgtccgagaacttctcacatgctgtatcgacagtcgggcagaagtgcggtcgagcgctactcagaccttgttccggtcaatggagctctacggatctacgctagatgcaaagctctgggagtcttgtatctgggagatcatattccctttacttgactccttaagtgctttcgctgagtccgaagtggacgataacacagatgcctcaagatggtcagattcacgagttctgacattatcgtccgtagggtctctgttctccaagttcttcctttccgatctgtcggctgtgaaggattcaataaaggtctggaggcgtcttctggatgtcatcgttgcatctttcaaatcacccgagtcccatgtgtcaactgctgccgtccaagctctcaaagaagttttgtccacttgggtctctcatctggaggaggacaacacgtcaaaccattacgaaccgtacatgactgacacttgggctgcttgggaaacgatgggaacgcagatcgtcttgatatctcttgatgacacacccgtcatcaagttcacccaagcaagtcttctggcgttcatcggagctcttctccctttacttgttttgtcgccgtcactgtggtcgattgatcgtctttccaatctatccactacccttcggagcgtgatgacctacccttgctacgacgatactcggtcagatcttgacaaccccactcctcttcaagcactgatctttgaagccttgaaacaattgaatatcgagattcctggctcgtcggctctgcttcttcaagaatcaagcagtcttatcacacttgcttttgcatcgtcgcagacagatcggcaggggcaatcgccgagacgaattacctatgtcgcagtctccaaagaggcgatgacgatggctcttcagatgtttgaatcccatcaaactgatcctgagctctattcgagcggtgctgtcagccaattgatcaaagcctatggtctgcctgtacgtgattcacttacacttgacgcatatatgtgtccgattttgagctaatgaactccttatacactcgtgtcacaggccaagctgaaagtatgtcacctctgtcctttcaaatatttccacggggatgactgttaatttaagtttgcttgttcgtgctgtatagtatgattgccctccttcatataaattcgaagaacagccaccactttggaaaacggtgggcttggttctttcttctgtcattcacgatcagcgctgatcgaatttcgattcacaggctaccacactagccctccaagtcattagaatcacgacatctgttttgacagattcaaatttaagtacgtttgatgtatttgtttgtcttttagtgacttcatctgtagctattgcgtagtggctgacaaatttgatctccagttgtggccaaacaagctcgtgaagacttgtggaacgaaattatcgattatttcgtaggagttctccttgttgatccgtaagctgcttcctacattcaaattagagcagtgcgtcactggtgtaacattgacttgtctgtttcatgatcattctccaatattcagtcgtgccacggaagatattccgatggatgcgcaaactgccgacgaaacgcatgatttgaaatatcttgccgctctcgaaaaggacattgtccctgttctcggatgggctgatattccagacctattaatcgtccggctcgctaatgccctgtcgactgcaagccaattctactacttcgattctgattcaagtgagacctctttgtgtcgaccgagaccgacatccttcgacccaagaatatatcagagtcacgatggagatggagatggagaagttcatggaatcacagcggaaatcatcggtcatcccaaagaaaggttttccagatggtgtttcgacgtcatgtttatgctagtcgataaagttgaccagagtcagtcttgatcgtacaaattacttaaactcaattttcgaagatatgaaaaactaaactggatgtttgatctagacaccgatctccgtcagagggtagccaaactagtttttcctttgctaatgtaccgctgtcagactgttctctcaacttatctggctgatcagcctctgcgtgggggtatgcctttcccaaggtaaatacaatcgaatttctatatcattcgcctcgtgggaagcgctaatttttctttgcccttgaccttggctagattgagagaagaagaactagtgtatgtgttgaaaaaacttttggagttgagtatgtatgaaggctctgtgataacgagtggttcgtattctttcatttcatcacaattcacatacctatcagaactaacacccgcttgttttcctcttcttcttttttttttcttatgtcgaacctatttgcagatgatatcacgtctatgtatcaacactcgccaagagctcatctcttcattctctatccgcttctactggatatcgcacttctaccccgacgaactcaagcgggtttagacgagggttatctgcctataggatatggctctggtgttgaagatgagatcatcggtgggaagcttgatgctcgtgcattggcaggagaatgtcttcagttggtcggagcggagtggaagaagggtggggctcgtgcgtgacatgtgctcgagcacaaatatggattgagggaagaagaaatctattctctcggtaatgtacttatttatgtgcattaaattggattataggttattgtgaatcaacagcaaagacaaatagtttttatgctagagagtggatgatcggacaaatgtaggttgatgtatgtctgggaaatccagagtatgatgcagttatgagacgaagaatgacaacaagacgatagtgcaaaaagtatgcaaaagaaaatagggaaatgagaatgggggaccagaaatcatagatggcactccaatcaggaataattaaggtatcattggcctgatgaaacttgatccattgggttttctgactggaacattacttgctcccccacgtcgagcaggagctgacgtttctgaacgggatttagtaggaggcttactgtagccagacgatgctgatgcggtcgcgcgagaacctgtaccgcggccggctgactggtcatatgcgaattgctgtatgtcgagcggtttacttcaacaaaggaaaaaaaattacaaaagaaaaagaaaaaagtaagtctccaatatagctgaagaatattgaaacaggttttgagaaccacatacgagatagtacgtggcgtcgagcgtgacggaggggcaacagcagggacagtagaagaaacagaaggaggaatatggacagatgtgtttgcagcacgggaaagtcgttttagtgtcggcaggaacatctttccatacatgttgaaacgctcttgggttacaccttcgatgtcaagaaactcttgttcatctggaaaaagtagaatgagataacgattagaggaagcatcttcatgattataatgatgaaattgcgcgctcacttaaaggaagactcaaagccatcatctcgatgatctcatcatcgaatacatcggtgattttcagcttccgctgatctgcgatctgtgaagaaaataagcacgtaattgttgagaactcttcagaagatttcctaggcacatgatattgcaattgagataactacttactcggaaccgaaccgcaataagatcagcgtagaatgattctgaagagttttgttgaggtgcgggatggcctccaaagatatcgtcatttgaagcgttcgtggcactctgctgacgactcagtggcgctctaacagaattcaaagacgatgctttggtgaagagaggttggtcctcatggatttccatgtctctaaactggtcttcttcctggtcgtcgtcaaacaccactgacgaatctgtcagatttttaccggccttgccatatttaggtttggccttggtcggtttagaggccttcatttttcggggggtattttggcggaaagccatctgaacgcgacagtttgtgttagcactgaatatcgatactagctattagcagaagagcctccacctacttgaatttgccttcctttgaacaaaaactctgtatgtgctttgcccagctatacagaaagcagatcataagagtttagccctgtgattcactgcactactgaaaatgaagggttgagacaacaaaagacctacttggatataagcgctcgagaagccactgccgttagaaatataagtttcggaaaacccttgttcgataagcaaattctcaaacaatcgctcagcatccgagatatcataagatttcccagcgccatgttcaggtatatcagcgatatcaatatcgttgacctttgcatttgatccgcgaaagattccaacagcttgtttcatagtgatccgacggcctgattcgacaacgttctggacaagacgaagagccttcaaggcatccgatgtctatatataagagaattagaaaacacaccagccataaacatcaagagtgatgaaacttaacgcaccacgtctcggacgtctattgtaccagtatcgacggcgacacatacatcacatgtttgttgactaaatgagaatcgcaactttttgtcagcatcgtcaactactgaaaagttcatcgatcgagtctcaccaattggcagcatcgaagtcttcgccgaagaaggcctaagcaatgatggtagcgtacataatcagccactgcaatgtcatgggagttgcgccgcacttctttgttaaaagataaaactaaccaaaatctgtcttcgcctacagtctgtcttgttcgtgcagaaccggagaacacctctgacgttatcattctgccgttctttctgagcccaattgagatttttatctcgcgcgatagagttaaagatggacttggtgtctgaacggtaaaataatgaagaagctgagtcagaatcaacagaaaagaagatgaagaatgcacaagtgtgaccaacctccccacgagtaaactgtgattcggaaagaaatagcaacgtcatagattgaattattgatcgttcaatcgaccaatatcataaaagggcagggggcgtctagctgggcaagattcagaattagaagagacgtacatagcacacaatccgaaggctggccatctctgccagctcgtccggtctcttgatagtaaccctcaagtgatcttggtagagcgaagtgaataacgaagcgcactaaaaacatccagaaattcgaaaaacaatgcagatgatcaggaaggttcgatcgatgtatcaatttgtaagacaaggcctaccgtctgccttgtcaattcccattccgaatgcaacctaacccaaagatgtttttcctcgattagactagagacgaaagaagtaagagaagacaaattgaaacatacggtagcaactatgacctgaatctccccactttgccaatttatctgggtaatttctcgatcgtccttcgtcattccagcatggtaatgagccgcgttgatcgcgtactgatctctcaagtcctttgctaccttctcacatccatctctactggacgcgtatacaattccactacttccagcatgttgttctcggatgaacgtggcaatttcttccgtgacctttttggtcttgggccggacttcgtatattaagttggcccgattgaacgatgatgttatcgtaacacagttttctaaacgaagtgatcggatgatgtcgtcacggacttgaaaatttgctgtcgcggtcaaggccatcaagggggtcccaggatactctgtcttcaaagcgcccaaatctcggtctgtggcaaaaaggatggaaggaagattgtgagcagatgtacatatatcgagcaaaacgatcaaggaaagtcgcttacaatctggtcggaactacaaatgattgattgttgtacatatcgctcgggtgtcagtacaatagtcaaacaagcgctattgaacctatgttcattcaaaaaaggcaattcacttacatcgtgaccccactgtacggaggcatcaggttaatcgaaaagagggatgcttgagcgaatttctcaacagactttaagtaggtttgaagaaagatgaacgtaccgagctaacacaatgagcctcatcgataacaaatcgtgccaatttacctctgcggtatatacttctcaacaaactctgaaattgagcgctctttcccagcatttctggagtcacataaacaatccccccatctatgctctccattccgctctcgcctccattcaaaaaagtgattgctctttttttctcagccgcggggagatcgcccgtaaaagcgatggcagggatccctatcgcatgcaaatgggcgacctgatcttgtattagtgaaatcaaaggagagaccacgatggtgacgccggaagtcttgccgagagtgacttgagacggtagttgataacataaagatttccctcctccagtaggcatcaatacgaagacgtctttcccggccagtgttccgttgatggcttcaagctgtttatctcggaatgccttgaggcggaatcgtttggcaaggacagaaagagcctcaacagaccatggaaaactgtgttctgccctagatgatccaggtagagtcttggcaagcgcgagtcgagcagaacgagcggaagatggcgacggtctgatacgggatgaaggaggagggcatgggacaatatccccgtaagctggtgggggagtcatctgaggcacaaaattcaatgtcgtttggactgtagctggcttggttgaggggaggggtgggtcgaccgactggatgtcatcgctgaaggtgtaatcgtccagatcgaatcctgcgcatagctcgctataatcctctacaattactggccccttgccctttcctttgctattgatagccgatccttccaaactagcgcctggtcctctttggaatgatattgtctgcggacgttcaacgatctccagctcttggatctcctcttcctctcgttgcctttccatcatcgggctctcctcttcgtattcgtccacgtcatagaccgcttctatgtgatcgagcatagctaactcggaggcttgttcctctttttcatcgtcactcacgagacatatatctgccccattgtccaaatttactgctcttgtgctttgttggttccggtgggattgttgagtacgagaaagttgtgatgaagacgtatgtacacgacgagggcttggagctgaacgatggcttatctgagggggatcgatatgcagagcagtagagctagctggaagaggaacgctgggaagacgagatgaactgctagtaggagtgcttggcccaagtggtgttaaaagtggtgtcgacgactcgcgttttccttctcgagaagcaatgatggcttttacatcgaataggttttgtcgcaaagcgcatctttttgccgaatcaaatataagtatgtaaatatcaaaatgaacaacacaaatagctttgaatattctcgtgaaactatgtacgtactcctcatcctccagagcctcctgttgatcaacagacattgaactcgatttttgctccgacatgacgtccaacaacctggtcattatttccatctgttggttcttcagcatttgcaagtccaacggttgccagcccggtattgacggaacgacagggggggcagatgagcgaggggccgctttagagccgaaaggtgcagggtcggagaaaggagcagtatgaatatttgaggaagacagagctttagtagaaggtgggatgactggtttaaattcggacttttggtagaagacacagataagtataaccacgaacatcagtcctgtaaaaaataagtagatttttgtatgagcaggagacaagaaaagatgagactgttacacacatcatccatttctgtcatggctttgacgaggatttcctcttggtcttcatcataaccataagcagatgagggagctgaagaccgatcctgcttcttcttggtctttacataccgtccactgcgcggaagaggagacgattgagtgcctaagtgaaatcagaattttcatcagattcaatactgcatgaaaacaagtctcgaaatgactacacttactaggtatttcaatcttcatcttcctagttgatgcccgaacgggttcctgtttgaccattgaatcgccatctgattaacgacggatggacacaactcaaaccggtaagagctccatacgtatatgcttttttgaaagacaggaatgacggcaaacagacctaaggaaacaacacctggaggcttctgtgaagacatcgaaaagtcttcgagtttgttagatctctgtgaaggggttgatttttgagagacttcgaaaacaaagtgaaacatctagtcaattgctatcgatcatgataataaaaaacgtgacaacgatagcaatgatgatatacctgtatatgcgactgttttgggttttttggaaccagaagttggagaatcgttcttaatggccgtaggactcggtctctttctgttcgtgctatcgatcgcagatgcaagggcgatctgtcggggtgttgatatggaaggtttggattcgattgaggctagacaggcgcgagggagaagcatacacatgaaatgaacacagctcgaaaggatcgaattaagagcgaacgaaccaggcttacgtttcttttcaagaggttttcccctattggccatacttgttttggatgtggttgctctgacaacagatgtcatagacgatcccaaagagagagccatttcttgctccaaaacctgacggatctttgatgtagacgacgtcggtcggacagaggacgacttgagcctgttgagagtctcatcgagattatttcttggggtcgtcatttcccaggatcttcaatctcgactgagacagatactctggatacagagatactgttgagacagaagagaagtgtaagagtgagtgtgagtgtgagtcgatggtaggtttaatggaaccgggtggcaatgaacggcagacggatggaaagtcggaacgcgtcgcgtggcgcgttagctgtgcagcattatatcacgtgctgccatgaccgccacattcttcgaccatctctccctatccgcttcacctctcaagcaaagccggtcgaatgatgaggaagcacgttaagattgacaaccatcactgtcttctgattggatatataacacacatatactcagagcaacgcaagggtataaagctaccatggcgttgatcactgatctatcgttcgtctctactttatttagattatgttctttcaaatctgattgctgatccgttcttctggttacccgtttgtcttgtttcatcctcgtttagctacgttctccatacattgaagctatcctatctcagatccacaacggactctgtctctgctggtattatcgatctcgatgagacctcctcaggcgatggtccgtgggttcgagcgagcggaggacgagactctgaacggcaagtcgttcgacacatgatgcggcttgatgacaatctttaccgatgttcataaacgatatattgttcaatttactgacacttcaaccatctgcttcggacctttcaactctagatggcctgagatgaataccatacattctcctgtccctgttctttcatctccacctcccaaccggtccgctctcggtcgaaatgcgcgctcaaatcgacgttctatcaatcagcaacccccaacttcgccctcagctccgaaccgggcatccttcaaaggtgacgcccatcctagtgggacctctctcaactatagccgaacgatttcgagcgagaaccaaagaattatcggagcaggcatgcgagtctctggcgccgtacggcatcggcccagacctctgcccttccgcgcgacgagaacaacaatggactcgagcgaaggtgtcaagggcaaacaagcctttttagaaagcataaagtcaggtgctcgaccagggaatagaaaacgatcagacagtgccccattaccaggtccaacatcacccgatatatcgatatccgacacagaacggaccgagaccgaagactcgatgtcaataacaagtggcgccggacctccattcgaacgacgaagacaacgacaagtcaacaatctaggagagtctggtcaagaggaggaagacgaagaggatgaagaatttttggccaatcggttggatgaagacgacgagaagtatgatggatttgacgaaaacctcgatgggatgcctccccgattgggagatgaaccaggaggcgacgggagtgacgaagaactcgggatcgaaagagagcaagaggatcttctggaaggtttcagagaagatgtcctggctggggaaatgctgaaggaagaaagccaacggggggcgtttttggaaatcagagaggaagagaatgacttagaggacaaagtggatggttcttcctacaggtgaggtctttgtgctcctctcggtccgacactgggtaaaactgatgaaactattctcctttaggccttcccctgctaagagaacgcccagtccaccaccatcgtttgcgcccatagatcttccgaaattgctttccgcgtccaaaccatctggtctctccctattgatcaaatccaattcaaccggtgcacccacgcccttctcggcatatgctcgaattgtcccaccccccaacactacaaatgttcccgtcttcaacctatctctatatttccctcattcttctcagccgttgaagcccatcaagaccaaagtcagaaaggattcaacggtagaagagattgttggattgggcttgttcttgtatggagaggagggtaggaaaccagaattgagtgctggatttgagacggaaggaagagacagagatatcaggcttagtacagttggttgggggttgcgtattgtggaggatgatggggaggttgacgaggacttcccaggtgagaatcactttctactttgtccgtctcaagatcgtttggatatcaattgaaccaacatttgccttttttattatcatctactctgctgtcttcaattacaagctcttgaccgagaagccaatgttgccaagttctctttctcagagtttgctatcacagttgctacagctactcaaggcacgttctgaaaaggttatatttctttaccttagtgactgctgagctaacaacatttctcaacagtcaatcagaatttgctcaagactcctctccctcctcggccgacggcaacaaaggcacgtggaaactcgatcagcgctcaaacacaacagccaactgctcctggcggtttagtcaagcaggagtcattcgtgtctgaaggtcggtcggatcatggcatgccattgagaccctcagttcctggtattcctgttctcttgaaagtcaccgttgtcaatgctgccgatattaggttcactacaactctcagcgtgtaggtcttttccttccctctttcctcgttgttcttgtgaattgtgtttccgacggcttatctcgagaattgcgaacttggtttcctcagaacatcggcgacatatctggcagatgtcgtagacctcgtttatgtaaagaaacggatgccagacagaccaaaagactgggtgctttgtctatcagatctgagtttgattttaccgttagatcggacagttgaaagtttgatgggagttactagtctctgtatggtgaagagaagctgggctgtcagtcaccatatcaaaggaggcgtggaaaagggaggagatccaaatggtttgtcttcatgttcttgctttctgagtagaataaaggtctctcttttttgatcatgttaatggcgctcgactatagcatctgtctttaaggatcttcaagagccagcgccatctacccttttctctgcttttgataccacgtacaaggtaagcttctatcttttcgttctctttgtacaaagcggcatctttctgatttccttcactggccttatcttggcagaaatacacagtacaaaggaaagccaacattggtcgacagttcgtcctttatctttcgaatctatcttgttctatgctcataattctgtcaatttgaatagcgagcgaatcctagctatcgacggagattacatccacatcgtttgtcctttctcttttctccataccacgtattttgttaaaacaccggctgattgattgattcaaaatctatctcttgtgctcttgacagatgccaccagaagggaagacacatggttttactacctcttctgtccgaacggcttcctactacatgtcgaatatcataggagtcaaacaatcgagaaagacaccctctatcttcaagttactggtcacgaaggaaggtggccttcaaaaaacctatgagttcgaggcggagagccagagagtagcgacagagattgttgggctgatcagagatctgtatgtgaccctcttttcacacttctgttttcggtttcttccgctctataaatccttcggtaaacctaaggaacgaggtggctcatctgtcatatttttacacttcgatgattagaatgagattgtatgttccagagaggaggcaggctgatacgttacttgtacgtaccgtacctttaccttcttatcgaaatctaaagtcctcatctaactcggtattaaatcggtttacatctttgggtttgtatcgattcgactgatagcgtcaccctccatcgcctagtcgaatcctaagtcgccgtcgaccaccagggacgtgacttttctttgcttggtcttctcttcttattcttgacgtatttctacgttcatatgttttttcttcttctgaatccataccatacccaaaccttgtcaacttttgtccaactgtccgccccaatatatgtgttcttctcatgtctcagaatccatctcaggttttgatttcggatcacagttgagttcatctgaaagaaatcatctcatgtgtgaagtaagaaataaaaggggcttcaaggagaaaaaataaactagtaatcatcctcccacgtctttcttctccctgtcccggctccagttcctgaggtaccccctccattatcaccgccggcgcctacgtcgttcagatcatccattaaatcttcctctttattctgaccgtcaggattattcgggttggtagaactgttggaccatgtcagttcgtctttgacatgctgctcatcaagaatatagtatatgtcatcagtttatccacaaggggaagacgaagtattcccagaagagaggatacaaagagagaacccactttcttcagataagcgtcgctgattccaattctcctatcgagctcccagacttttgagctccatgcctccgtctctttcgtcaatctgtcgatcatctggattgtgttttgcgaggtgaacgtctcaggaggagataaaaatgacactttcggtgatgtgcgtgtacctgacgcagggtggatctgagcgtaaatgagtcgattggagcactttgtatttacgcaaaaatgaggttgagacgaggagagggcatcaggttagcatgcgctccgtgattcttttcgtagaagtataggaagaggaaaacgaaccatgttcagaatttccgtttccaacatcttttctgtctcgcttgtatcaggatatccgagaattgtggccatatccgacaaggtgagagccgagtacgtgcgttttaatcgtaagatccgtttcgacaggacacttccctgcagtttcttgagtaggccgtagttcttgtcctgtaaattcaattaatccccatgagaagaagaatgagtcttgttgtaatttgattgatgaaggatgtgtcgattaggaagaagagccaaccttcttgaaggcttggatatcaagatctttgaagtcatcgacggatgtctggtcattttgactgataactttagggaacattttggcaagttttgtgtaggcttctgcatgcattttgaccgaccggtacagacagacggacgtgtactttggcagacttcgagcctataaaccgagttaatggagatcaggatgtatgccagatgttgagatatggcaagcctcagtaaggtctcaagttcggcactgatatgttgagaagttcagtcagacagacctttccatccctcagcagttggatcaacatgtgttttttgtaggcagctagttggaaggcgtgcgtgtttatagcaggagttgttgctacctatttggatgaagaggcgacgaacgagggcgatgaggaacccgatttgaatctcgcagattgatcgaccaaagcaagagtagaaacaaacaatttcaaaagctccgagggcttcgtcccactgttccagcacacctagacacataccgcccataaaatgatagcgcatatggtctagcggttgaagatagtattttttctttatatacaattagatgagaagcaaattctacagtcagcaaaaggcttatggtagatatctctagctacaacaacagcatgaatcgatactaacactttgaatttcttcgatgggttgacgatagaactctaaaccggtcgaatactgcttagatgcgacacaagcctaatgaatagcagcagaaggccacacaccgatagaggccagtaagaaggaaagcgcacgattcaagtctaaaataaaaaatgagcgactgacctccatgaagggtgcatgtactcccgtcagatccaccgggctctcccgccaaagaaggagaatatttcggagaggttcaatcgcggcttgcgtctaacccggcaagtgataatcaatgatcagtgtacttgacccaaaacagaggaaaagagtcacctcttcaatgggaaatacttacaaggcgtaaatgtttggagagggcaacaaacgagttggcaaatcggttgactaaagattaagaaggaaccacaacgagagagtgtaagatgagcgcgctgtctggaaccagcatgtctcgcttctccgatacggcttgaaatcaaagaacagagcactcacctggcaagctgtcgtcgtattcgagacctgttggatctagatgcagacagaactgttcggcggaggtccagagtagtagaagatcgtcgtgatttgagttctggtaatcaatgcacatccgagcgtttctggtagacagtgtcacaaagatagtgagaatgaccaaagctatcctcgatcagctaaagccagaagcacacacgcatacacatatgcatcgtctgacacacttacaagatcaacaacccggccaaagaaacccggcagaaatcgaatttctctaacggatctattctaacagccccttgtgatataaatgagctatagatggtatcactctgttcagatttgacaactctgagaagagcctgacggagatcggatctggcctgttcagagttgataggatcgatcgattggattagctgtatcaaagaggccaggtcgggtggactatcggcagcttccttcgctactgctgatgtggacgggacatgagctgatatcggtgtatgctgagacatgatgtgtggatgacgaggctgaagcagaggcagagatggtgagaaaggccgttctatctcatctgtacctgatggaagtgatagtgtggctgcgatggatgattacgatccgtggttacggtcataacactctcctgctctctctcttccatctctatttcccttcctctctattgatcaaccaactcgatcttcccttgatactatcttcatccatctactgtcgtccatccttttcaaagccatgtcctccaatgacagtaacacgagcccgctgccatcgagagagattgcagagggtaagcttatctttcgtctgtttcaatcaaagcctcaagctaaatccacatatgtctttcttccttctatctttccgtataatgcttgcgaactttctcagggatgtatatcgatcgaaagaaccacatcatcgaacaggaagtccgagcagccgagatcatgatcgttcgtgaagtccttgaggagtgcgcagcgaccgagggggttaactctaaggagaactgtagccatcttgttcgacagtaccttaggatgctgaagactcatcaggtaggtcggccatcaggatcctctcatatccatcatttactatttcgttctgacaaatctctttccggatgcttctttcgttgtctgttcgattccacaacctcagtcctccggtcaccggaagttcgagagagagaagtactacgactacggaactcctgtctctgcgtttgaagcctcgcttagccctggccaaaaactctaccttggaaaggaaggaattgccgcctcagccaaagctgccgacgaagcgtctgcctaaatacaagctaatcaagtcgagttccagttccaagtcgaagaaggcgaccattcatcttgttgtttttgtgttatcgtttgtatatctttatcttttcttttcttctc

SEQ ID NO: 2245 - DNA, 1565 bp, Xanthophyllomyces dendrorhous
cttttcttttcttctctttgctacttttagttgtgtgtttctcagagtagagaagagagaaaggagctctctttgtattccttcattctttttctgtctctccttgattcattcgttgttgatctgtacttggaagaagattgtaatgctcggtaccgtcgaaacgatgccaccagatcaagttgtacgataatgatatacagaggcacaagccttgccgaccgaccctgtggctcgatcccatcctgttccatcccagtgtgagatgtatatcaacccatcatttgcgaaacatctgcggtacaacgtttccaaccatccagatatagagcagaaaaaggtagaaagagaaagaattagtcttggtgaaaacaatagatagaaggtgattcgatgaatggacgcaccggctggagggtactttgtctgagcgaaggtcaacaatctgagttgatgtaaacgaaaatgaaaggagtgggaagttaggccgtgtcgaagcagaagacgcaaagtggaggtggtgagaaagaggaagcgaaagaaactgaccgttttacgctctgaatgtactttcgactgacttcatcgttcaacacatgagctacggaatcagaagaaatcttttctcgagcggatcgttcgtgaattctgttgaatcaagtcacatttgaattttgttcagcggcaccaaacggatgtacgagaaggtctccaccaagctgagattgaacagaaaaacacacccaaccatggtgactccgatgggccaagcagcggttccgatggataacctgaggtaactatcattcgcccgttgatattgacgtgactgcatgtggtgaacgatttctgacaatcgacccaacacatctgccgggagatcctgtttttttgttttgttttttttatttaatttacatgaatcatatgttcagaagaaccatccaaggcagtcactcgaacttatagtacagtgagttaagagtgaataagtactgactcttgatcgtagagatttgaaaagtggtttcaggtaatcagcagattggacttggaccgctgccgctcgcattccttgagttgattgccggatagactctagagtgaccgcgataaacaaaggtagtgtactctgttatttcccgtctattgagtaatctagttgagaaacgatgaaacgacgaaccaggtcggtcggccatagtctgctcccagtccttgagtgttctctacagtttgaagtcaagcacgaatcactcaaatatttcagtaataacacttgaactcaagttcagaagactcgagcataatacaatgatataaagaaccggaactcaccttgagagcatagtatattaacgggtagagcttgtccgggtccgtcttgattaggcttagatctaacacgccgccttcgcccattcccataccctcccctgaaggtgcgtctactccagtcgaaccattccctccactagccttgtttgcctttttcatctcctccttttcatgtgaaccggcctgcatctcttccaacgccttcttgaaatcattcaatccggcat

SEQ ID NO: 2246 - DNA, 8487 bp, Xanthophyllomyces dendrorhous
cggagccgcctcgctcgtccatcaattctaacgctcgaagtcggagccgtcgatccttgtcggattcaccgaataaccggatcggctgaccttttgctcgcaaacgacggacacactccacaggagatatattgaacgcttcaggccgagaggtattggtggacgtagcatctacagtcgagggcgattgagatccgctcgggacaggggtgtttgacccagaggcagggtccggagtctgaggtttacttcctcctagtcgagactgagtagagcatggaaacggtgaagatacatcagctttcaatcctacacatgcgtcagcccacgctcgagtctgatcaaccgatggaagggatcagacccagccagaaagctaagtattcagacaaacttttgagaacgcgttctttctagccaactcagccgcctccttcttcgccttagattcctccttcctcttccgatctttctctgcctcctctgccaatcggatcttctctagctcccctttggtcaagtactttttgcgttgtggtccagttgccgctgagttggaggacgtggtcgcggatccggcggtatcgtccacggcctttcgcttgagaccagctatttcttgagcgaggatgtccatgggttattactcaagttcaggttttacgggctagaggctgtaatagggtaatgcagaagataatgggatagcgaggcgggggtaacagagtatagaaagatgttgctgatggaatgatgggcgtcgaatgttaaacagacgcgaacttttttaccttctacttattttctcaactccattcactccagcatcataacccacgactctcgtagaccatggctcttcctgaagatcttgcctttctttctttatgtccgatagacagtgattcagacgaagaaggaggaggactcttcactcaggtcgttagttctagagaggaacgaatacaacgggcaattgaggaaggtaaacggacctatggccgagctcaggcagagacccagtatggtgtgagtctttcgtgcttccgtttctgattgtcttcttctgcttgactctgcactccgttcctgtctttacaccttgagagcttagtggtttgcttccaaggacatcactgctaagaaactgaacgagccgaaacatgtgcagcgctatcaaggtcagtccttcttgaagtgctttcatgggtaatacaggaattgccttgactgataagagccattttctcacttcattttcttagaatcccatgctcagttcttgtaccttcgtcagcattatagagaatgtctggtaatctgccagctattactcgcaatagaaggctatgataacagggagacaattgatatcgcccttcgatgcactcttcagcttcaagatcgggaaaggggtgagaccttagcgcggaattgtcggtcgatggtgcgtatttcctcgctttcatccatatagcatatctgtatatgagacatatacctcaggatctgtgctgaaggacctatttgagcttgatggatcagtggatcacgactcctccgttagccatgtcttccgcgcttatattcttgatgtgtgggctgtacgccggtaagctcccttattttcttcgtcttcgctcctctccgtatacgaacataaatttagcaagcgattctgactggcttgttcgttttctatctttctggatggttcctcacaccttagaggcgctcaaagcgctagtatcagccatgaccgttcgaaaccttcaatatccatatgtacaaactttgaccgactgtcttgaacgctggtctgtatctccctcttcttcgcatatacaacgcgaagcaacctctcgactccttctcgatgttcgagcgttaggacctgcttcaaagtccgcagctcagtcattcgctagaccgctgttcgaacctcgacagacatatagaacagcagcgtcgcaatcgacaaactcgtgtgatcagacgcctgacccagaagttgaaccactgaacagtagtagtgctgagggaagtcgtacaatactagacaatcatgtgtttctgactccgccggagatcgatcggataggaaaagagctggatctaggagcgagaacgatgggacgactgcaggctttatgggtcaagattgaggctcttgttgggttggccaataaagggttagttgttcaagaggagcagggagaggaagaactagtgggtgttaggaatatataaagaattgttttccatatcagacaggctcgaccgtgcggatgaaaatcgacctagagggtcgtcacatcatgacatggtgtgggtcgaagtttgaagtgcgctgcctacatatatgtctatcgaacaactttgtaggataataatagaatcaatccctcagatcaccaccagccgccctcccgacatctctaaataacagagtccgctcctttaccttccgtgattctctggcctctgtctctgcaggagtctcgtcatccaacggtcttagctctgacaagtagatatctcctatgaactctgttagtccttgttcaccaacctcgttctcggccctagaaccccaagcccaaactgtatctacgtcctcgccttcttcgcccgctcctgtccctgctcctcctcgaagagagcgttgggtcgatgccccacttgtaccaatcggttgggtttttgatttttctagataattctgacggaccaacaaggaaagaagggtgtcaagagtgtatgtaggagcatgagaagccgtgggcaggacggtggttgaatgaaagtcgagtcttttgagatacgccctgagttggtctgtttagttgtataagagaacacagtatgagaggaacaagaatgtttatacaaccggcacgtcaatcatcagatactcagctcaagaacaagaaaagaaatagagaatgcctaccgtctggtagtctccgaccgttcaccaggatgagcgccagtatgacatatagtatgcccatcattgagagatcatcgccaaacttaaggtctacgattgctccactttctttttcgtcctcctcaatttcacccgatcgtgagaggctggttgagttaaaagagtattctgggtggggttcaaaagcttcttgcatcaactttgggggaagtagcgaacggagcatgtatcctctgactgtacccatcggtgcggctagtcgagataacaatatagtatttgtgcattagtaaacggtcacatgatgaatgttgctcttgaataggttaagagccaagagatgagtagacaaatggacaagaaggaggtcagcgtacctctcttcttggactttgcttgcgtgctttcaacatcgcttcctggtccatcgtcatgagttctctttgtcttctttctagcctgcgaggctgctccagctatatcttccagtccaccagcgccttttcctttagcgcggatctctatcaattccattccaaacgttttacgaagtatacgttgggccgttccaaagacctcggcgaaagaccgcgaactcttaccaagaacttgagacaaggtgcaagagaggcccgttaattgggggacgcagtgagaatgtgatagagctaaaactatctcactctttttgttgatatcatctcgtttgagaacacctttgtgtatctctgagaacagagcgagtcggacgacatcattcgcatatcgtctgatattctgttttatccgttccattcacaccagggttcccattgatgatcagttaaacttgttttctggtccttcacttgttgaaccagacgaaggggtagaagtgagacttacggcatcgtctactgctttcactcccgatgctcttgctctttcatcttcgtcttgatcgtctccctcatcaggctcatttccttcttcccctatcctaccgtcttgctgatcatggccatcattgtcatccccgtcgtcactgttgtcgtccctttcgtcgtctgatacgatgtctgctgccggccgctttcctttactagaggacgatccagaaggacgtttatatgtttgtgatcttgatgtctgtcttgccatcttcaatcgggtacacgccagtagaatgaggctgggtcaagatggttatatgcagatgactatatgcggtcgacgcgtcgagacgcgtcgatgtcacgcgtcgcgttgatcacttaatcaaatactatcttgatcgtatatctatcatataagtaatgtaaccctaacacgccaccccgacttgtctacacacccattggacgaagaactcgctaggcgtcacactcacgcacactcacactcaaccgaccatgcctccaagaacttgccagctgtgtcagacggcgagagcgatcctcaaacgaccaaagacctcgcagcaggtctgcaaggcatgcttcttctatgtgttcgaagaagagattcataggacgatcgttcaggccaaattattcaatagaggcgacaaggtcgccattggagccagtggtggaaaaggttggttctcaggacttctctaccactcttcttcatacctttggctgcgttagagtatctctctagagacatgtaggctgaatgttctgagttcgtttgctcttgaatttgctcacttttctcctcgttgtcaatcaaagactccacggtgctagcgcacgttatgaagactttgaacgaccgatatgattacggacttgacctgttcctcctttcgatagacgagggtatcaccggttacagagatgattctttaaaggttcgtcataagctttgttctttcttcttttgaagaacacctctcgatccaaattctgggcatagaagctatacgattggctgaccttacacatccttccgtatttcttccccgtttctaacaaatcctaacagacggtcaagagaaatcaacagcagtatgatcttccactcaaaatcttatcctacgatgaactctacggttggacgatggatcggattgtgtctacaataggaaaaaagaacaactgttcgtgcgctgtctactcgtagttggcttggcgtattcttagagttaaacttggttaacttccttttggacataatgtgtcgcattttgcacatatatcaggtacattttgtggagtattcagacggcaggcgctggatcgaggagccgctcagctgggtgtcgatcatatcgtgaccggacataatgcggatgatattgcagagaccgtcttgatgaacagtctgtcccccttcttctttctcttctggtcgtctgaaaatatgacggctcatactcttttccttgcgtctgcggccttgaagtcatgagaggagatatcgctcgtctaggaagatgtacggatattgtcactaaaggagaagataccatcaaaagaagcaagccgttcaagtatacatatgaaaaagaaatcgtcatgtaagtcgctttttcttctcggtcgaaactcgtacgaacggctgatatcctacttgatgatgattgccatgaaaataacaggtatgcgtactttaaaagattagactatttctcgacagagtgtatctattcgccagaaggtcggtttaagctcttttttgttatggctcgattcttttcgactgctagcaggtcactaacgaaatcgctttcttgtatctgctcggtcaaaagcctatcgaggtcatgctcggacgttcctcaaagatctcgaggccgttcgtccgagttcaatcatcgatatcatcaagagtggggaagagcttgtgctcgatacagagatcaggaagggaatgaagctccaacgtaaggctcgttatgaaatcattgtcacctttgacgaaaccttgtctgatacaaagtctttatgtgttacttgatacaactagaaacctgccttcggtgcggttatatatcgtcgaacgatctgtgcaaagcctgcgcgcttctagagggtctcgagtctgggttgtctaacggagcaatgcacgcttcgcaggacgtcaagaaagtctccaattcgaccgacgctgcttcatcatccggcgagacggtagccatcatcggcgaggcccccaaaggtcaacgagtaatcccgttctttgagaggagaccgaccaaaccggcagtcggaattgaggttgaaggcttggaacagagcgtgaaagatcttcgagtgaatgaaggactgaggacgtcagcgttggaattggagccaggctcgaacgcggtaggccgagctgtagaaagtatataaaacccgttacaattgtctgtacatccgtaaaacaggcaacgcaaatcaaaccagacaaagcaagagcaaaagcaagagtgaggagaacgcgagaaacgacaatagaaagaggcgcgtaaggagggatggagaggtcgaacggagttttgatgcgctgtcggtccaaaaagcgagcaactccatcatcgccttccttcacccccatacgcatcccatccacgatcaaccgtctcctctttgttctgtgaattactactcaagaacatatgtttcgtccttcgccgggtcctacgctgggtgctcccaccagacagccttctcatagccaacctcatcagccaatttatccacaaccgacatcataccaacctcacacctccggctcacataacggttatgcctcaaactcatctgatccggatccctcttccaacagcaacattcttaacgagctagacaaagccgtccctctcaagtcgttcgacgcgttcccaaagattcaatcgagctatcagcctcagacactccgaggagggttgatcacatttgctgtggcatggacaatctttttgcttgtgttgaacgatttgggagagtatctctacggacagagcaactattctttcaacgtagacggtgagatcggaactcaggtccaattgaatgtcgacttgacagtggcaatgccttgtcattgtaagttcttctgtttttgttcgttttcatagagctgacggaagaagactctgttctgaaaatcccggtatctcgctatagctgaccgagctggttttgattttattctctcccgtctttctctccttcctcggcccttttattaaccgcttgtagtcctctcggttgacatcagagatgccgtcggagatagagtgtacttgaccgacgacctccagaaagacggcgtgagtagacctttgcctgtgcccgaaggaacctcatctcatctccttcttttctcttttttatgattcggtttgtcttccgacttctcgcaacttccctttcctcctctccgatctagacggtgttcgaaccggccggagtccaaactttcaagcgatcctctgatgcttcctccggggtatcttccacatctgcttccgagatcttgtcccaaaccgccaaacgccgttcttctgggctcagatcgctcttctcgttcgggtctcgaaagcgcaaacacccgcagtacagaaagaccaggacaatcattcaggatggaccggcttgtagaatttatggaagcatgctcgtcaagaaggtcactgcaaatctgcatgtaaccactttgggacatggatatatgagttgggagcataccgatcatagctgtacgtatcgttgacctctattctccccctatagtaggcaaaggaggaggacccttctgtcttacatacggaccaggaccacgctgatagtgaacctttcttttttgttgggagaacatagtgatgaatctttcgcacgtaattcatgaatggtcttttggagagtacttcccaagcatttctcaaccgctagatatgaccatggagattagtgacgaacgtaagcaagcgcttttttccctcttaatttccgtttctgagctctgatgttctgtcccatgtttgtgattgccttcaactagcattctcgatcttccaatacttcctcaccgttgttcctactcggtacatcaatgcttccggccgaaaagtcgacacgaaccagtactctgtcacggattatgtccgggtggtagatcatggaaagggtgttcctggtatcttcttcaagtatgacctggaaccgttggcgttgactattcacgaacgaacgacaacgttctaccagttcctcattcgacttgtcggtgtcatcggttcgtccctttttcctaactccccccccccaccccatctccttttctctttatccccaacagcatctgatatggctacttatgttcgatatgattgaaacgtctggaaaatttaccaaattaggaggagtctggacatgcacatcctttgctctccgagcgattgctcgattcgaacgagtcgtgaacaaggcgaaaaaaggaaagggaagagaacgatcttcgtccgaagggttcttgggcaacaaagctagcaagtcggctggattcaaggcgttctgagagatgagcagatgagccacgaggacggtcagtgcaaactc

SEQ ID NO: 2247 - DNA, 562 bp, Xanthophyllomyces dendrorhous
agtggcaactgctgggatagaagtaggagtgggagtggacctgggagtggaactggaactggaactggaactggaactggaactggaactggaactggaactggaactggtgaaaggaacaacagaagggacgagagatgtacaggaaccgatagatgtaccgcacaggacagtcagagccgtgactgtggatgtagtcgtttgcaaagagaccgatagacccatgtcgtcgtcgtcctctccattctcttctctgtcgtcaccctcttcgtattcagatggcggctctgcatccgaagatatatagatcggtccctcagctacaccgtcctccgtcctgtccagtgcgttcactctctcctccgtgtctgccttctccaccgtctttgccttcttcttgctgtcccgacgcctagctaccggatactcggcacagacccaggtaggatggagctcgtccgtcgagtcgtccgactgtgaggccaagtcggactggtggctgatgttcggatacacgaccggaggcgacagagaacgtctcgtggctgacttgcgagccacc

SEQ ID NO: 2248 - DNA, 10059 bp, Xanthophyllomyces dendrorhous
atcactcgacattcttcggaacatggtagcttcccagatgttcatcacccccatcgtaaagacgatatcgccagctggtgcagcaggatgaatgacctatcgagacatacaccccacgctatgagaacaagttgagcgtgtggtcgaagtagccacacagtgccctgtttgcccagtcacccaatcttcctttgtgttcacgacccttcgcctacccgagacttacccgaggtcataaaacagcaactgccaagtgtcttctgagctacagttttgccaaacctggtcgctcactacagaacgacatcctttctttcggtgttccttctcttttccctccgaactaccacacagacacgaccagaatcaccatgcttcctgctgccatcctacccgctttctgggcatcgttgtcctttcttcactcggtagaggcagctcccgtgaaggttctccttaccgagagcacggctcctgacaatgctaccgtcgcaagtaacaccacgctcggtcctctgttcaacaccacgatgttcgctcccggaacagagccaggcatgtactcgtccaacttttcccgactcgtcatgttcggcgactcgctcagcgacaacggaaatggctcccgagtgctctcgaactgaacgaaaccggatcccagggtaggtccttcgtctggtttctcgtctagcttctcgtctgtttttttgtctagtttctcgtctggtttctcgtctgtctcccttcctgtgggtcacacgatcgctgggtctgatgggtctgcttgtgttccgacctgacgaaacagatctactggaactaccggtggtcgaacggaccgatctgggtggaagacctggcagagcgtatgtcttgactcgtctgtttctctctgcatctgacacgacgtccgacgtgggctatcgcggttgttccttgtcttttcttggctgacgtcgccatggtcttcctggtgtttcttcggtgactgtgtgatatctctttgggtcgtcccaggactgaacatcaccttggttgactacggtatgtgcatgctcactctgttgtgtgtgctctcgacaagcgtgtgtcctgactcgatggcatccgaacgttgtcattctctctgtgtcgatcttgtcaccagctgtcggaggggccacggtgaacaacacccggacgcctgctttcctcaacggcaccgtgctcactcctatcccgtcggctctcgagcagatcgagacgttcgtgaagaaggcgaactcttcgcttggccacaacacgttggaggacactctgtttgccatctggatcggggcaaacgacatcatctcgacgcttgagaacccggccgcggtcaacggagcagagatcgttgatgatatctttgtcggtgtggagatgctgaaggctgttggtatgttgtggtgtctccttgttgtctttctctctttctctctttctctccctactcttttcttttctcttcttctcttttcttttctttcttgttttctttacaatcttgactggctcgctctttgccttggctctagagcaacacaccatcgtgcagagtaccgcagaagactgacctgcatcgacgtgccttgccttgacttgacttgactctctaggtgctaaacacatcctccttaacaccatgcctgacatcggacgaactcctctcagtgttcttgtcggatcggatgcggcggccttgctgactagaaactctgtcagctaccgcaacgctctgttctctgccatcgacgcccaatcgctcaccgctcagaacgtgtcgtcggtgaacgtgacgaccgagtctacggccgtgccctctgctcagtttgctgtcgtggatgcgttccttggaatggacgtcatctttcggcagcctgaggcatacgggttcgcagaagagacgctgaacgtcaactgcgcacggggcttcagctcgaccgaaaatcttttcagcataccccagggtatctgtgctgatccggactcgtacttcttctgggatctggtgcgtctcctcttgtgttcttttgttgacgttgttggcagacggttgagctgacggagccgtcggcgtggcatctttgactctgtgtgttgtgttgtctgtctcagcttcatcctacccgggttgtgcattcattgtttgcacaaatcgctgcctcgtctctgctcaaaacaggatggatctcccgaagatgagtggcctgtgctccgaggtctatctagccgagaaagagaatgtgtacatgtgtacagacggatgaaatttgtcacggccttgattgatatcatgctatatagtcatcttggcaaagagttcattaaaaattgtgattcaacttaggaatgttgatcgtttgtggtttttaaggattgttggtttcgctcatcacgcattgattgtttgagcgacaacatctctgctggaaagccagcgaatctgagttgggctcgatagacaaatctgatgaagctgccgaatctatcaaggcttgttgaggctgaaaatgaaacatatttcacagtctatggttattgcaacctcgaaagtagaaagacgaaacaggaatggactcactgaggcaaagggacactattttcaaattcaaagttttgtcatagagtcgaatatctacaacgatgcatgatataaagagttgccggcatatatcttcttatcgggtgatatagttagatttatgagcaacgagcaaatgtcttgtgaaaaggttctgcaaataaatttaatagtcgctgcgtccatggggcggggaggcggatttgcacaaaaagaagatcggtttatgcaaccctaacaactcaaatgcctcacgaagattcagattactataaagaaatactcgccgcttccgagatcggatatgccgaacctaacgtatgaaataagcaagagcgaagggcgagaagactcgcaccagaacaacgacaaaatgtgccgtgcccaggaggttcatttcatattgctcgcaggtgcttgaatgcaagaaaataaggtgttgaagatatcttgtttgtgtataatataattattttatagaataaggtggaaggtaccgcgatagcagctccgaagtagatagacgaaaatagagtacaaagccagaacaaatatagcactgtgggcgatgatgagatcaggaaggatatattggcgctgagaacagcaaaaaaaagtagcgttatattgttaagatgatgcaagtgatagtctgttcaccattttccaagtcccttgagaccaccacggttgagaggaagaggggctggggctcctttgatggggctcagtactgtcggaatctcacctccctcggtctgaagcgatacagaagtcatagaacgaaccagaaccaaaacagaaacatgagtgacaggaacagactaaaaagagtagagtagattgagtaagaagctacatcacttacgttggcaaaatcccaatcaagggcgggcttgatcttcatccctaacttccgtttcttcttcttctcctctataatcggtaaggtagttcctatagcttcggcatcgggctcgtcttcaacaaccggcttgcgcttctttgacatatttgaggatgagacttccgatgttttgattactttcttcttagttggaacagggagaggtgatgatttctgtcgcggatcaatatgacggagttgaaaaatagaacgcaaagacaacaaatgatacgtcaatcgcttactactcacatgattcccaatatgccaagatgaaatccaattctccttacctcttcttcgtcatccactatcggcttcttgactttggccaaaggttttgtctttgatgctataggcagtttcccaccaatgtctttatcggatgcagtatcctaacagacgagaccagaatcagggatgcataagccgaccttacagagttatttctacggaagtaccgcaaaacagggctcgcctgaatattcgcaggaaagaaatatgtccgaattgaaattgcacgcgtacctttttcttgggccggcctctcttgagcttgacaggttcaagggaggctggtgcagcgttatctccgtcttcgtccacatggctcatctccgcctggacgtcttccacagaatcatcatcttgctcctccggttcgagcgatgcggcctttcttattttggcttttgcccgggctttagtagtaggtttcgacggtagagccttttctgatttgggtattgatgtagaggcacccgaaaaagcgcctgaatcgggtgcagggttcgaagaatgtatcgaccgagctgatagggacgtcgtcaaggccgataaggatgattctaatgtggcgatcgttttcttaaaagttatcgagaaacagagagtataagcttccaaaggatctcaagggtagtatcatgccaaaaggaatggagcgttaccttcaatgagcgaacctccttctctttcatgattaactgggcttcaacgcgtttggtttcttccacctgtatctccacctcttcttccagtccttccagttcctttcgaaggtccgtttctgttgtactgctattatttcgcatgagaaggacctataaatgatcaatggtcatgcgaaagaagaggtctgtttcagctcgagggcactttacttgtgaaattcaactgtaaaattaaccaagtaattgaagaagtacgtaccctgtccttttctcttcgttctctctccctgactccgtccaaagcggcgcgcagcgtgtcgacttcatcaagtaattctcgttcgcggtcttcccaaccttcctcttttgacttcagtcgttctcgttccctctctctaatcttctcctccttgattagagcagccttctcgtccttaaggttagtctccctagcttcgagattagcgatccgagtctgtaaagatgcgatttctgtcgtttgcgaaccagtcgtcttaagtaaagcactatgggctttccgaagagtctggatggggtcagatgcaaattgatgagcatgtttcgggcaagattgaaccataggttgtaagtcttcgcggatcaagatggaaaagacgtgtcaactgacctcgagatcagctctttcagctaacagaagttctccctctccttttgagcgatctgacctagcacgttctagatcctccaacgatgtctccaattgttctctgagactctgagcttcaagtcgcgtctcgtccaagaggaccaataatgcttcgtggtcctcctgatatatgcagacgcatatgttgtttaaattagttttcagataatggacaaagcaagggcgtcggcaataatttgttgacgaagagcttaccagctggagattgtgtgtggccaccagggaatctagctctctctcgagagaggtctctcttgccttgaaacgcgtcagcttatgatccctcatgactgagcagacatggaaagtgccgacggcccaatagaatcagatcaatgggcctcatggcaatcgaagaaaatatgctggatccgaatagatacacatacttgttacactttctgctttgttcagctggcctttaaatgataagaatttcaggtactgctcgtgaagagtaaggtcgctgcgtgatttgaggagagcctccgagatagcagactgaactcattgtttccaacgaggagtcgacatattattaggcaagttgacacagttagcataagattctgaaaggtcgaagaaggacagaagtgctttgctggtgttaagtgaggcggaagaaggtgattccatgacgcgtacctctgccttgactcgatcaacctcttgtcgataggatatcaactgcttggctcccccctcactcgccttgcatttgtccttccactcagcaatctcacccacagcgtcagctagttgtgttctcagcccagccaattcacctcgatgctttcgttctgtcgcggttttctgggagactaaatccctgatctgttgctccaagctgcccaagcgagctttctgaggagctggtgtcacaggaagatcgaccgatagcgatgtaggaccaagtggagtaggtgatgctggcagaggaactggtgggggaagcatgtcttgtatggagacaacaaccagtacgattagatggtcgtttgagtatagacaaggccgaattataagcggcaagttatcacgtcaaaacagacgcgtcgatctgattgatttctcgccctgcctcttgttcctttgcgagaaattgtacctttggccgagaagctctggctcgaaagtatgatctcaaacaagaagagccttactacataggtcgaaaagcgagaaagttgaaacattggagtacctaacgggttacctcctatcggagagaccgggtcatgtaaagaaaaaaatgaccgtagggtgaattgaacacccgtcgtccgcgactttgcgtttcggctgaagaaccacaagcggaagtactaaccactatactatacgatcctgacgaacttcgtatggcttgttgtaatatgtttcaaaatctgagaaaaaaatttgagctttggcagtcttcgacgaaatcttagtgatcttaacatcatttgggctgtactttatgatcttcccctcgaggcagcaccctcagatcttgcgcagagtctaaagatttctctccaaagagctgtaaaacctgctagctctcctctgcatttctggcttcccaatccaggtttaccgaaatatctgggaggtgtgtatatggttccgagaaacctgtgaggttttgattgagaacaactcaaaacagaaagtacacttttcacttttggatttttataaacctctacaacccatcgcaactcagttgttggacatgcaggatcttcatatcattcatcttacacccacatgaacttgataaaatcattctggacacgtatattatctcaactcaaccatacgacctcagctctgcgacatcacactttgctttttctgttccccgcttctcttaatccggtttaattcactggaaggatggataaatcgagatgcatgcatatggtacaaagggtattcaaaatcagaatctcatcgtccctcttctcttcttcatccactctttacgaatatggagcgagaccgttgtaatccacaccagccttgacggtgctatataaggatggtgcaaaaatatgatcagtccaaattcgttattttttatcatgacgcctcctttacggagaaatgacaaaaggtctcactagtttccatagcaggcgtggtcgtaatcgatctcgtcaattctagccttgagcgcggtcagcacggtatcgaatgagcaaaggccgtcggctgagtatccgcatccggcgtaggtgttgtggaggggcagcacagcatcgttgctatcattgatcggaaggtcacgagagcccatcttagtggcagaatctttaggggtttgaatgaatctgtttaaaccctaaacaaagagcttacaggatgaatctgatctgtttcgagggggttagatcagaacactccaagacttgaatgttgaggtgggtgctaaacggaacgacctggctagacttgaagtgctttccatctggccttttggtcaaaggcaaaggaccaccggggaatagggccgtcaggttgaaagcagtaacaatgtcgaggaagacgccatcgtgagtagcgtcggcgtaaatggactggtggagggggaaagtctccgggttgaggtcgagggtggtgttgatggcggtgttggctgtagcaagcgaggcagacgaggcttcaaatcgggcaacagtttcttgcaggtaacctaaaccctgagcggcagcaatgggggaaccagcaccgtcgtcgtaatagactagatgaaagcatttaagttctacttatcagtcatggtacattggctctagatttgcgaaagaaagttcgctcacaagacatatcgtagtaatagtcgtagtttttgaagtcctcaacagtgaagagcttgcagaactgagagtagcccagagcttgagtctcgtaggagcataatgataacatagagacgatatgggtaggcgtgacggccaagccggtgatcagtttctgaatccgggtagcggtggaggcgaaggcgatatcagcaaacttggcagcggcgttagttccaagatcgctgtacttgtcgatttgggcattcgggcaggcctagcgagtaaatattcagatgaacgttagcgatcaaagtttaggcagtatagtccgaagggattgaaacgactcacgtattttggagcgccagtattgttgaagccagaggcctcgacagcaatctcgatgttgacctgctttaggtactcgggaacaccgaaaaatccggcggcaaagctagcacagagtttcatgtcaacattccgttaccagcctgaatcctgtgatctgcggggatagatcttcaaactcacttgtttgcggtgttgaccatcctgtccttggactcggttctaaatacgggtaagacgccctgttcggtgaagttgttgagcagatgtccgtactgctgcctcatggcaacaccgagctcgaagccctgaagtcgaccgaagggggtaaggacttctgcaccaagcttgtaggtccaggtgttaaggaacccaagatcaccagtggcggagaaaccaccgtgagcggtcagattggccagagtagaggcgaaggtaggagagagggccttagaggttgggtacctggcaccgtgtcggtagagaaggtgaacctgagtgaccgagcagctctcgggcatcaacggattggcctctggaagaccgtatacgctggactggacagagtaccagggagagacgttgccccaagacttaaaaatgttaaactcggtcgcctcatccacatctgaaggcttatcagctacgagagggtagtactgggtctttccagtattataagcgtatgcagctgctgtctgaatggcggcgggttcgaccccagtagcagtagagccagggtagccgatgacaggttcagaagggaagagagtgggattgacagtggctgtttatatcaaaagaaggatctgtcagcggtgatgcatagaatccaacgaggttagttagaagacttcaccagaaggaggagggaagacatccgaggtgtgggaaccaacaaaggatgcagcgatagtggcactagcggccacggagccaggagcaacagacgccctctggcctaagggcccagcgacagcaaagataggaagcagagaagcgagaacgacggcgttcattgtctttttctctttttggtttcaaagacgattggcagtatatgtcaatgtatgttgaaagagaccaagtaggtcaggacaagacgacccgtcattaaagcatgcggctcaactgaaaaaatctaaagggtcaatattcgggtgtccgatgtgataatgcaagttaaacaacgttcgtcctggtgagcgtagaagatccagagaataagaccggtcagtcatcgaacagatggcgaggtgacgagatgacgaggcctaaaatggtaagatgcttcggagggacgatgagttggagagattttatgatccgagctaagcagcgaacgtgttcttgaaaccctcaaggactccccttctacgtttcatcgtagatcctgacgaaattgtataaccatgtcgctcggaagaagaagaaaaaagtaggagagaaagcagcacgttcgtattcgaagtcaaggtcggtagatttgtataagttgaaggtcatgatttgtcgcaaacgaatcagaagggtaagtagagatgacacgtgtcgttaagtgttagtccgtcaagactagtttttcagaccggcattttaggtaagtgttttagatacttccatctcggatgccaaacggaacaaaatatgaatactggaagcatcttatgaataaattgttctcatgtgaaacaaaaaagctgaactgaccgtagggtgaattgaacacccgtcgtccgcgactttgc

SEQ ID NO: 2249 - DNA, 30078 bp, Xanthophyllomyces dendrorhous
gtactaaccactatactatacgatcctgatatcggtaatgtggcagatattgaaaaataacatcaacatactctcacacaatgaagataacttctgaagtacaagggtgaaacatgaacgtttcgttctggcacttgtttccaatcaagtcctcactggttttccaaaaccatatatacacaccacccagatgttttagtaaaatggattgagaaaccagtaaaacagaagggaacccgccagaaagtgtatagctcttcgcagagattcttggtctctttatctcttttatgcttgctctcagacctggtggaacagagatgtgaacacatcgcgcagcatgctgctcctaacccttcaccaggaggagaatgagcgagcaagaatgccggggttcaacgctgtcgctggtgatgttgaggctgccatgactgctacgctggccgctgaggctgacattgatgctggcagaaactaaacccatgaccaatgggatcttggcggtttgtgatctgaggacacccaagtctaaaaggaccatgtatcgaccaccatcggctgaggttattctcaccatgctttttgcagattggatataacatgggataaaatacataaacacaagtgttggaaactcggacagtggcttcctaactaccccaaacagaagatttcgtcatgaaagagaagatttgattcatctctacagttcctcgtccgttcttattcagatacttctgaacaacagccgagagtgtcttgaatgtatgcttgttttgagcagcgaatgcctggacctcttctgctcattgaatgcgcatatgtttgattagagaactgaactgtcagcagactgcatcatgtggtactaagcataacgtcaactcaccaaacttgtctgaggcctttacagcagcgactgctttatcggtatcaaacagagacttgtaatatagcagttggttgtataacgcggcatccgtgtacttgagatccgagtcaaagcgtccatgtttttgttagggtcccagcttttcttaaatcagacgatgtgacaaaaagaagctcacctccaagtgcatctgccctctacaattaggcatcagacactgcttcgcatacacgccgatcgcacgagtagatgccaagcaggcttgatcgtcgcagaccataacagcctggtagtatctactgatgtggtctcgaatttgtatctcgagctgaactgcaagcgatggaagagcgtagcgctttgagcattcactacagtggataccagtcgaccgaatatgagagttctaatgggaaaaaagaaaaagaaagaaaaccccacaaattgcgttaagattatcgcaaaactgagctgttggtgtaaaattgatcaacaaaaggaacttacgatgtcatcctgaagcccaccaaatttggcaacattttggcaatcgaaacaacggacttcaaaaggtaaagcactttgaaatctgtctttatcagagactttggagcccagggtataaaagtctcgctcgatgtcaccaacagtcttgacagcgaatcgctgagggtctaggcctgatggtattcaaaacagacggataatgatggaaagtaatgagtcagctttcagcttgaatggctatgatagctaaataagaccagctcacctaaacattcggctagacgagctcggtcggttccctctatcgattcacaaagacgttcgacaggaggtagaacttgtaatgataagtaataatcgaaatctatgtccgaaaggaaaagggaattagttgaaaaattaagtcagttctcaacaaggcctaagttttgatcaatacacgtatgtatatgttcatggatgtaagcactaaccaagcttgagatcggttgctttccgaagttcatccggatgataggctcggtctgcttgggcagatctagcagtcttgtcatctttgcctacgcaaaagacgtactgcatgacatcccccgcccgagcatttcctccacgcgccttcattcttaacgctacttgaacctgaggttggtttttggcgtcaggatagtcttcaggattctttccaagtcgctgtttgaacatacgaaagtcacatgtgtcaggccaattgtctcaatttgttaatgaaaatgacggttcgaaccttgttgatgacaaagtcctcgatatctactttgtcctctctgacatttcggccaacgctagtaagatagtcgtgaatcttgttgatacacacttcagtaggctctccagaaagaattcgatcaaggacatatctacgagataggatgtagacatcagcttatatacttgtaaggcagtataagaagtaagcggtaccgaggcttactgggaaacatcttttgaaagcttgcagaattctctacgtttcatatccagtcctttgacctcagtcgacacagatccatcggcctcgaccttgatagcggcatacttcttcttttgtagaagtagtaatctttggaagacgccatctaaatcaatttcgagaagcttatacttgtcgttcacttgctttttgaaaaggttcgcagttttcatcgcctcatcaaagtctgtgacgttggagttgacgaatacggaatctgtatctccgtagacaaccttagaagcagatataatcagaatgacaagtgaggttaagaagtcccgaaactatattgcttacttcaagctggatgctttcggcgagctcctttgtattggtcagaatctcacgacccttgaatgttgttagcgcagccaaaggccgagcatagaatcgggaatactcaaacccgagacaaccgtacatggagttggcggtgagctttagcgctttctgtcgaatatcatactacgaacgttgtgacgtgctagttaatatctagcctttagtgtcgaactgacgaaccgattgacttacctgcatcatcaacatgggtgaaatctttcctttcatcaagctcttgacctcccttcgccgattaaccagttgagcaatgagacggggcagcaccccctgccctaactcgctggagggcacttctggaatcttctcctcgccgtcctcctaagagttatttcaaggtttacagaagccgatgatcagtctgctatctagcgagcacagtgatgagtgaaaatgagatagtagacaagctcacgtcttcttcggtggtcacagacaccgttgtgaaatcgatgttgtactcttgaatgatactagggtacagactgttgaaatccatgaccaaaacgtatttgtcccatagacctctcttaggttcaaacaccaaacctcctttgaacttgtccctctttcctcctctcctactcgcgactgtggaagcagcttcatccccatcttcggcttcggccttgagaagagctgccttatttttgcctatgaacttgtctgggcaaatgtatttgagcttgtggaactcatggagaagaatgaactcgtttcgttcagctcggcctccgttcagggtacgattcctgtatgtcgtatacatagtaaagcgaaagttatttggtttataatctgtccttcagcgaatgcaacgagaagtcagatcactcaccaagagtttccggatagagtagtgagctgcctggtgagaggaagaatttgcaccttcgcggtgatggccatttggaagaaagcatcagcttcacaatggcggacaaagcgaagaagccgatcaggagaggccacggcatcgtcaaagaatgtgtgagtatcgtctgggtcgatgtcttcccgattaatcttaagctgggttgcacacatctctgtcagagaccaagttgtcgatgcaatcattgtctaccatacacagacggaaaatcatatcaagaaagcctagattaggtctgaaactgcctcggtcagagtatatttttcagatctcgcgaacatacctttgctccatcgcttgatagatcgcaaaccaaccgaccggctaacaagcctaaggtaaatttgttggtcgtagggggttgtcctctccgcttaaacctacccactcgagaccagtcgggagacttgtgcttgctcattcgctgcagcaggacctctaaagagacatttaagaaatcgtgccccacgataacatctgggtcatgtcgagagatattacctgtcatgaagaatagccaatatcattgacggtacgcagaaggaaggagaacaacatttagaaggattgtggtgataggggctgaagacaagaaatagactgactgaggaggttgttgaggagcaagctttcatctttcacaggaacgatctttgagccctcgctcctgcacttgttgacaaatccgggtgggaaatcgcccaaaggacggacgatagtgtgtattgagctgggctgcttctcaggaggggttggatcaccaatgttcgctattaaaaacaaatgcataaattaaggtagttttagagaagtgattagtgccatgttaggaatggaattctatgttgacgtctgattcttacccccattccatacccgagctgcaacgcagaccacctctcgggtgttttctttgtgattaacaatcgtcctggccgtcaaactcatgattgtcaaaggaggcatctctttaagatcgtctccatcagcgagaggtcggatgtccttgggatcagaagccgtcacctcaagtttgcaccaggatacctatgtgagaatgtgagaagggacgttaagaacagctacgatgagaacaggccatgtgcagtgcgttcaacgtacaccttttccgcttatttcagcgttcttgatttccagccagcaaggacccataattttgcgcttcagtacgaagatttcgaaagcactggtattcgttccaaggacgtgaccaaacgtgtttccactcaggttggtaggcaaagcgggctctgaggaaggggtcatataaagtgatgaacatttgtctccatcgtaatagcaaatcaagggaaagacataccgtcaaacccatatatcacttttaaccaatcgttttctccggatggaacgccctcgaccccaaaagaatagtttcttttgacccatttggccatgaatgatgtaataccatgttccctccttttttggtcaaactcccgttttacatcgtttttctccggcacaaggtctgtttcgttaccttgaactatatatcatggatacaacaaggaatgtttcttgtcagccaatgttgatagtagtccccagtagtgcgtagaagagattagcctagagagataactcacggaatgttcttctccgaggtgcgataaacaagtttctttccagaccgttgatctttagacaacaactaacccatttaccctgtcttccaagcgcagccttatcccatacttttccaaacaaatacaggtgtttgattgtacctgcatcagatcttacttcttgttcgtgaaaatctaaccagaacatgtggagtgtcgatccatcttgttcgaaagcctctaccgtggtctgaaaagtcttcttagcggatgaggctgaggccttagaccctttagtcttgggttcgggaacaaattctgcctgggccggagacgaaggtggctgatggtcggaagatggaacgacagtggtagtaagagattctgagagcgctagccactcgggctttgtaggttcttcgtctggatcgatgtgagttgggagaggtcgaaggacattgggcttcttgacagctaccgaagtagcattcacaaacttccgcgaagggatggagtttgctgctgctgctggaaggttgaccaatgttgacgatcctaaagctatatccggcttgacatttcgtctgactttgactgccagatcgtcttcatctcctgaaagatcaggtacttttccatccttcaaagtcacatccggatcctcatcgtcgtcttgatcagatccccattcgggagatcccatgaattgcatgccaaactctgggtcctccatatctatatcctcttctaccttgatcttcttctcgccaaaggcagactgagcgtctagcgactcccagtcgagcgatcctcgttcatcatctgctggagtgtgccccttggaggatcgtgttgtaccaggagataacatcttcctcttgcgagaggacatatgagaagcaggaatgggaggtcgaggagtgggtttgacgtcttctgcaaagctggagagcaagttggccatgaagcctgactctttggcttcagatatcaccggtcggtaggcgttcgcggaaggaggaggaaccggacgaggagcctgtttgggagcctttactttgttcttgatcttcgcagctcgcttggcatctaatcgagatagaacatagtgaatagaacgaaagcgaactgtcagcttgatactctaaacctgacgaggtagacatccggctaacaacagttccgtaccctttctttctcttctatcctcttcgtctgcctcttcatcatcatcgcttctaccccaaacttctcgaccatcatctatgtagccactaccatcgtcatcttcaatgaagtcattctcattgagcctgtctctgacaatctggtcatattcctccacatcgacttcatcgtatagtttgtttgagcttgctgatgcctggtagattgatgacgattgtaacagagtaaagttgatgtcagtgacaagccggatcaggaacaagcctaagactgaaaaggttgttcaatatctcattctatactcctgaggggctcaaagacaaatgatgacccaattgccatgctcttaatgaatctacagttagacagcaaaacagaagacggacctgccattgtttcgctctggatacacctgctctggccgccctcagatctgctagtttggcgtctcttgcctggcgggaggacatggttagaattcgatagctgtattagctgtgttaaggaggaacaatcgagcttctacaagtcagagaatggatggtagattgtttgaaggcagagacaacgatcactgaatgggttaattgttatgttggccgaatagaaaatcaagacgcgtcagaattgaatgacgcgacaagtgtggatccaatgtgatggtattaggtaagcacatgttccaaccctaacctgattcattctactacatgttcgccttcaatcagatctttcagggataagttcgcacgtccgtccagcaagcctcatccacttagaataaacaagatgtccgggttctctccagcgccttcaccagctgcctcgtcagcatacacctctccaacatccagttatattgctctaccaaacctgaccaaaccagctactggtaaaggctctcgaggtccgtacaagcgacgattaaaagagggaggtgacgtcaagcgaaacatcaccacggtccgtcaaggatctatcacttctcttaccggagatcatccatcaactggagtcagagcaactagcgtggcaagtagtagaggaacctcggtaaagcccggggcgagcttgattcctggcgaagacggagaagatgctgacggtgatgaggggacgtgggaagatgacttgcagattgacgtgggaggaggaggagagacagctgtggtgagaagacgactgaacagagtcaaggaagaacaaatgtatgtatgattggattagttctcagcaataataaacgcgaaattttgtctgatcagttcacctggtgtgaaagcaaataggttcttgactcagtatatggatgcagatcagagggaacggttcgatgcctggaagatggctagttttccgaaagcacagatgaaaaaggttggtccttctttcaacgttggttttcatatgtttgtatggtgtctgtcctgtggatggggttcaagtttatttataattaagtttgatcgctcagcttatacaacaatcgacaggaaacaccatgaacgacgacactattctcatcgtcggaggagtcagcaaagtttttgtcggattgatcatagccaaaggtaacattcaccgaatgctatccatcttttgcatctgaaaattttcgactcattcaaatttgccttggttcattacacaaaccagctcgacaggttcaggagcagtggggtcaaactggaccactatctccagcacatcttcgcgaggcacataggctgttcgtcaacgaatccaagtttggaggaaaacgaccgggagcagggaagaagacgagtttgtttgttcgctaatgaactacagactttgatccacaatcttctcaccatactcgtaatggaatgcctcgctgttgcaaccaacatttccttccgccactcgatgtggtcactttaaaaaggtcttccgactgatttggatcgctcatcagacggaacatgggacaactgtcctcatacaccccttcactttccatatcttagcagtacctggtttcacgacatagttacgtgaatggacatatttgcgatcgatgcactttgctctagtcgaacatgaccgacattcgattttgttcatctacatactgaatgctctcagatctcttctgattattgtatgttagcttctgtgggatacgttggtcagaccgggatgagtttgctgtatgtagtgttcggggcaagattataggcgcgacgattagtaagctaagcagccgatttctaatcttatctgctattgagatggagaacaaaccccttcttcgacacgcaacacctagcacccaccttcacgtctttccatatctagctcaacatgtattactctgttccaggatcttataatcagtgtaagaaattctgtctatcgttttcaggttttgtttacgtcaatctgaaagatatgagactgactgtcatcgttacctcgtgattatcagaccgatttagtgggtcgccatcttcgattggaagcagaggttctacctacgtcaacgatcttagtccaacctgctcaagaacataccaggctataccatcagatagaagaaatgatgttttgatgagaagagaatgtatgtgtcttgcttttcaacggtctctagcttgagatagtccgcttaatatgtcatcttgaacacaacagctggagaaactcaggtggctacccctcccaaggataggtattgcctcagcttccttgatgtatcttctgcttcatcatctcctacaatggatgtgttctatgatgcagcctccacagtatctgccagctcgattgactatgttcccgaccgcttctcgtttgcagatcaaagtatgtcactccaaacaaccgatttcaaaaggcatgattctaactgtgtcacgtcttctgcatcatagtacttttaaagcaaaatcatttagtcggatctgacctggaatcgaaaaggcaaccagaagccggccgaattcgactgaataatgaagtggttgaacaagacaccatccaatcgctatccgattctcaatcagacctcaagaggttcagggccactgtacaaagagaatcaagtcagccgaatcatcaccgtatattgtctcagctttgatatagatatatgatatatgtctctaacgaactatctgcttgattattagagccatcgtctatcacctcaagtttcgttttgcctatcactccagcaaaggctcgtcggcatcgatcgcacgacacccattcgatcatccccagtccagactcccagcctcattttatcttcagttcaacatcatcaacaccagacatctacgtttcgacaactactcctctgcttaacacgtccttatcgttcgacctcggactgtatgagccgatagcaggttatctctcctacgcaccttgcattcacccacctcttccttgcgtttctaagcaattgccttcctctggttcatccgataaggcattcagctcagcaacggcgatccggactgatctcaccgcaaaccaagccggaccgggcatctgtccgtctcagctaagcgtatcaagttcagcatcatcctcggtccgccgagtgacccatcacagactcaaaggccgctcccgacgaacgccagacagaaaggactgcccctctcgttcggtctcggtcgtcaacccttccgatgaacataccaatcatcacttagcaaaccttagcttaggtcttttatccgactcttcaggtatgtctcttcctataacatctaaatgtaatcgtgatgtcgagacagcaccaatttataactcaatcgtgaggacaccgctttttcatcagcatcgatgacccgcaaggcatcgatctccgcgtcttgttcttgctcgcctaggaaaccttacgcaactaaacgggacgagaagaaatggtctggaaagagatatcggtcgggcatatcgaagactctccgcgatcgactcaagaaacgagcaaggaggatgaaatcttccaaagcccagatccggtagagcaccgctctgtaaatgaaacacatatgatagcaagatcgagatttggtgattgtatacttgtatgatgagattcgtattgatgaattgtttatacttgagtcgatctttctccagacgtgctaaggctttctttcttaagcttcaggtttcatctacaaacactcatatacgttcatataaggaagcctgagaagcaagggcgaataatgttgttacataagaggttatgagatgggaataagagagttaagatgaaggcagaaaacgatcgaaagaaaaaactaaaagagggaaaagtcgaatagggggacaaacaaagaggaaagttctgttttcttttttttgttctttgggaatatgcaaaacgaaagaaacgaaattaaaagtgaaaagaaagaaaaagcagagtcaagactaacacgcctttttctatttgaagctgactatatatgtgtgattttgacagacaaaaacctcaacaaaacacgctagaacacagagaagcggaagaaggcgtcgaacaacgatctcccggaaaaggagttaacaaaggagggcagactatgatcaaactaaaagcaggacctagcaacggacggcctccaatcaagcacccctcgggaccaagagagaagcacacaaggagagagaggacacgatattagggttttctgttgatttaaatctgtcactgtcagtgatctagctctcaagaaaacatatcaaagatgcatgatgtacgaacctgaattcagccaacacagtatagatctggttgaacgcagtgtaaatctcgctcctaacttttgcaccagtcaagacgatttttccagaaacgaaaataagcaagacgactttcggcttgatcattctgtagatcaatccagggaacagctatgatcgaatcaagtcaaagaggcaatgtacaccgttctgtcaatataaaaatttcctgagacaacttgacagaaagctcggaaagacaagacgcgtacctcgggctcgtaagaactgaaagatccgtgggagtacgccagaccttccagtcgaataggaaatttgacatcacaagagccgacgatgttctggatcttgaattcttgaaactttgcgtcaaacccgagcttttggatgattcgagcgtatctgaacaaggattagagaaataaaatagaaaaaattcaagcatgaaagttagttgagtttgatcaagttggcatcgatcaagtatctataaaacaaaagcatacgcactttcgagaagccagcctagaatcatcctcagattttgcaccagtaaccaccatcttaccagaggcaaagattagagcggtcgttttgggatctcgaattctcatgatgacagccgcaaaacgcttttggttgatgacagaaggaactggcatgtgtcaggacgcgttcatccccgagtcctatttgtcagtcggtctttatggagaagaccaataacaaacctttggattgtattctgcattcctcgcgtgcaaagcaatcgtcttcaggtccagcctacaatcaagattcacagttgccacaatattcctagagtagagaacgggagggatgacagagaaaacagaggcacaaaaaaacagcaagcaaacgtgatgtcagtgaaatactttaggcaaatagacaatcaagatatatcaattggcgttgtcggcttccaatcgagttcttcgctatctgatctgttggtcatgagctgtcctcaggaaacgctgagccttgagaccggggggactgccagacgtttaatgtaactccttcttccatccgcattgcatacagagtggttcgctcctgatatatcgttgatatcggaccaatccctttggctgaaagtgacaggcttgagtgtatgaaaagcgatctacgtactgcaaggtaggcacgattcccgccacagctgtgatcctgccagatcggtccggtccagaaagcatcgtgggataatcaacacatgtataggtaagaagaaccgaagacgacagcggatcgttcgaaaggcagaccaagtaacgtgaatcattttttttggcaaagcaagaaccataaaatatcagaacatcgatctagccgcatgtacattcgaggcgaaagatagaaaacttccgctcgtgttgtgcacccaagaagccattgtggctttcggtcagcagagcggaaaaaaatcttaaaaacacaactcactcgggtactgagggcacactggtagttgctcctccaaccgcaggtgtcatcggtcctggtccaggagtcggagccgagatgggaagggagagtgccggattatgatgcggggtggcagatgcaaagggagaagggactgaagggtaaccagccggggtggcggcagagtagagacctcccgctgtgttcgggagcgggggcagtctcggcgtagccgatgaggatgatccggggaggttgagagacatctggatgggtggattgagttgattgagttgattgaaactgtgtatctgaccaagatcgaactggtaagagtattgaggagaaggagcggatgatggtctgagtgataaagagttgaaggtgaaaacgtggagagttttagacgattcgagaaatcaatagaaattttcttcaatttttgtaatgtttgatccaagaaatcattaggaaaagtgtattgagcttccaacctccgacctctaacttccaaccttcagccttcaaccccgactgtcctccgtcctttctctggtatccgtcgttaacatcaacacaagggttgcatctccgatggctcttgctcactggaggtccctttcgatgtctccatctcagctctcactggctcatgtcttgaaatctggtgcgcactccctgtgcttcttctatcttgtccaccgacgtcattcatatttactgatatctccaccacaggccaatccttcagatggaccctcacaagattggccccgccggagaaagtatctcaagatatcgacttggctaccgaagaatactctctctgtctttccgacagacttgttgttcttcggcagacggcaacccagctgtactatcaagcgatctttccggcctcctccgcatccgccgccttcactacagacccaaagctagaccggacgacgatcgagtggatcaaaaaatattttcaactcgacgtcgaccttgttcaacttgagtccgactgggctgctcgagatcaagtctacagtaaaggaaaacaggttgggactctcttgcccggtgtgagagttctgaaccaagacccgtgggaatgtctgtttggctttatctgttcatcgaacaacaatattgcccgaatcacatccatggttcaatcggccgcacatcatttctctccgcctctgctgacttatcaaccacctccatccagccaggtcacaggtggtgctattgctgctgctgccagtgatatgaccgtctccgctaacccaaaggcataccacccgtttccacctccttcttcatttactgatgcgtcgacggtgccaacgcttctgtcattaggatttggttaccgttcaaaattcattcatcaaactgcgcgccttcttgtagaatcccattcggacccacagaagtacctggagagtctccgagcgttacctacggataaagctcgggaggctcttctcgagttcacgggtgtcggcccgaaagtggcggattgtgtgctgttgatgagtttgggaaagaaagaggtggtcccgttggatgtccacgtagttgggtttgcggagagactatacggcttgcggacaggtggaaaagggaagggaatgacaaagtcggtctatggtatcacacaaagtaaacttcgagaagtttggggggattgggctggttggacacaggccgtaagtcaactcaccttaaatttcttctttcccatcgtctttctttgtctttttgctcttacttatgggatagatctctgtttctgtcttcgtcttaggtcctattcgcttctgatctcccgtttttgatgtcatccatcgcaaaccctacgacaagacctatcaaacctgtcaagattaaagtccttcctaaaatcgaatcatcggagagttctatcattacaagttttagcgttgaagccaagggagagctgactctggaaggagtgttggcatctgaacggatcaataaacgtgagaccgttgaaaggattggtcaaggagagagcaaaccgtcaagtctggagctcgaagcagagagtatgggtgatcgaatcaagcgaagacgaagaggggagctttgacgtccactttcgatcatttgtgtaatggaacaaacaatagaaaacaccatctatagatcatttgctagagctagcttgtattgtattatcattatcaacattgttatcattatcatcatcaccactgtcatcattgtcgtgttgtatggtatctgtttgccttctatgtatgtgtttttctccatccaggatgttcatggtgcacgtcctcacttccaactgggccccgaagtattttgaagctgacccgagtcggagaaactctgctggatttacgggttgtcttgtgttaggttccattgaaccgagattggatcccagagacaacctttaggcaaacacctcgggtgaataccccgagcaccaacttcgtagggcaatatgatcctgactgcacagtttatcgaggcagattggagtgcaggttggaaagactaaacaagaaaacgagaagaggccgcaggaaaagacaaggaagtggcaacaaggggaaggaagatgagagggtttgcctaagccttcatgattttagcccatgggtcttcaaagaaagattctttttttttaatttaaaataaataaaaaagccattgaagaagatggaggtttagcgaaacgctaaacacgacaagaaacagcagctgtggctaacctttgttgaagccctctgtctggaagttacctaagtttcctccggttcctcttctgcctcggcctcctcgagaaggaccagagtgatgcccaccgctgtgggcacctctgtgtccttgattactagggtgtccctccattcgttgtctcttatgagcaaatgtgtcagctgatcctcctaatggatgggaatttcctctgtgagcgcctcggccgcctctactagaaccaccggatggcccacctcgatgacctcgttggcctctgcctgctctaccgtcgaattgatgtgatgagaaaccaccaggaccagggttgaagccgttagaacctgtggcaaagccagtcggtctatttggcaggttggatgctggctgctgtgtagggttcgatacctttgagaacgacgagaaacccatcagggcttccatagcaggatccatctgagaagaatgatgttcaaacaatttggaggcgaggcgaatgagggaacagtgtctagagaaaggtaagtgatgtctgtggcggaaaccagatcatgtgatatcatgctgtaactcacgtgaattgaccaggctgtacattcaccgggtatcatcggatatggagagaaatcaccagagcaagggcgaccgggaaaacacgcggggaggaattttgtagtgaaaactagggtaagactatacgaatcgactagaaatatctctagtcaagcgaatcactacgaatgcgctgtagtattcatattagaaaattgtctaactgccatagacttttctctagacccgggttaagcctgtttctcatctttcctctacacgcacgctcacatcaacacccgacactcttctcatcaacatactcttgcaccgaccatcccgtcggacttccatcttctggtcctaattccacctcactagatcccttttcactctgtactatctgaccggccaagtatttgttccatctgttcattttatcctcgaaaataccacttgaaatatgactcaggattcagtccctgtgccctccgcgttggagtccatcaccacactttcggctaaattgttcgctccggacgaatccgagctcgcaaagtggaagcgattgttcgagagctacgcctcaatcgagaaggaaggagtcaagtgagagcaatccttcttttcttttcttttcttttcttttcttttcttttcttttcttttcttttctttgaatctttcatacaccttcctcttgccctgtgtcccgtttttggtttgggcgtggaatgggaaggaaaattaaagcgccccgggcaccttcgcaacgtcggcaaataaagccggacataattctttcctcatttgacccatctatcttggcctccttgcagttttgcttctttgtactttgctcatctcagaccaaactgttcctcgtcatttcagatacctcgatcaggaatcttttatatctgccatcgagccaagcgacaatgactcgggcaagatccgaagagaacagtacggagtttgttcgtatttgtttttactttgatatctttcactttctttcctcagtacaaggaatgagatcaaaacaagccaagactaacgttctgtgacgtcgtgtgcgcatacgcacttccttttccattctcagtgttcagagtggcagactccagcaagcggggtcttgtctcgtttgacgactttgtcgtttttgagagtttactcaaggttcgtccgtctgtttctttcgttcagacatgtccttgcctttgtgatactcagcaatttccgccttccgtgcattctggaattcaaatagcaacctgatgccgactacaaaatcgcgttcacctactttgatacgtccgtccattcttccatactctctatttgtcttacgtactgagtccttctgttgcttatgcatatccactgatacgctttctcactttgtcaatcccccaacagcgatggcaatggctccatcacattcgacgaattcaaggctgtgttctccgaaaacattggtccagacgctatccccttcaactttgatagcgactgggtcagactatacattggcaaggcaaatgtgctaggctgtaagtccatcaatcaagttacctgtattactctttatctactttcctatgtgctgacaagaaggctatcgccggatcgccggacagacaatgaatttactcaagtgcgtatattggctcttgaatgacgtagtatgttatcgctcaggtattgacatatatctggaacaaaagttgatgaaaggtctacagggagaacgattacggcaagcatttcgatactttgataaaggtggagacggccacatctctccagaagaattcaaacgaatcatcatcgtccgttccctctcttttgttcttcttgtgattggtcgtttgggtttcaatctaatcgcgtgtcaatcatatctttgtgctcggattcgctcttacatcaggaggttgcccgacacaagctttccgactcagttctcgatcgactccccactctctgcctgctctcccctggacaaaaaatctcctatgccgaagtcgtcgcatttcacaatgtgctccgggacatgacgctcatcgagaaaatcatccggaacgcagttagcaagagtaaggacggcaggatcaacgtcgacgatttccttgacacagcaggtatgtctgtttcgcgtctcttttcttattttgactttctccatagggctgacaggctcccaacctgtgatccaaagcggccgagagtaggtacaccatgttctcgcccttagaggctaacttggtctggcactttgcctccagaggtagaggtcctcagacacgcttggtcctggatgactttagggcactgcttgatgagaaggttaactccgtcttgactgtctgtgtgttctgtcttgattgtggaaacaatagttaactctcctttctcccctgttcctccccctccttttctccgcaatcctcatccggtttgaaaaccgcagtgggtaccccctacggcaatagaggagtcgactctgcttaaagagaatgcggcggcatcgacaaagtcggcgctttctcaattggcagagaaagtgtatgcatttattcaaggcggtattggaggtggcgcaggagcattcgttgtttagttagtcaagggtccttgttttcctcgcgcgcgttgtctcttgagactgcaaaagaaatcgactgacttgaaatcacgaacattgattttttcaaaaaatagcccaatgtaagacttaggtcctttcatcgctaatgcaggtcttgctggtatcataatttgacttccgatgatgttcgatagcgatatggttaaaactcgattgcagaaccaacgatctaccgtcgtaggcgaggttctttacaagaactggctcgactgtgtgcaaaagatcttccgaaacgaaggtggcgttagagggttttacaaagggcttttaccccagatgatcgttaggcgctctctctactcttttgaaactctatttatctgtatgtttctgcaatattgaacgctaacggactttggtttatcgtgcatgtttgaaatcagggagtcgcacctgaaaaagctatcaaggtctgccactagctccttctctcacgatcactcttacagccttcctaaactgacagagttattcgcttcgttcaaccacatcaatctatctctcagcttactgtgaacgacatcgtccgtagacgatttactgatccagagaccggtcgaatcagtgtttgggccgaggtcctcgccggtggatccgccggtggttgtcaggtcatcgtgacgaatcctctggagatcacaaaggtccgttcattccttactccctcgttttgtttttcttttcttcgatcaagcggaccgtgttttgaagcattttgagtcatttgatattttattcaactgtaaactctagatccgacttcaaatgcagggtgagatgctgaaggaaacaggagcggcttcgagaggagcgatgcacgtgatccgacagcttggcctcgtcggtctgtataaaggagcaggagcttgcgcattgagagatgtacctttctccatgatctacgtaagtttcctctacgaagttcgttttttgtctcccgtttgcatcagactaacttgtttcttgttttcttctcgttgccatagtttacgtcttatgctcatctcaaggtttgttgtcctttcaaagagatctttgcttttcagcaactggaaatagtagctgatccgaaatcaacgtaaatttcgctgtctatcatgttcaatagaaagacgtgtttggtgagggaaagaacggaaagcagcttacgaattttgagacattgcttgctgctggaatcggaggtatgccggcggcctatcttacgacccccgccgatgtggtgaaaactcgacgtacgtttttatcgtttgttctctcaattttgttcttaactaatcccggcgagcttgttcattgggcatggattggtgcttcgcagtacaaagcgaagccaaagcgggacatacccattaccgaggtttgatcgacgccttcgttacgattcaaaaggaagaaggggccaaggctttgttcaagggaggtgtagcccgaatgatccgaagttctcctcagtacgctccttctcagtctatggtcagctactcttaagaattaacatgtttatgacacttgtatttgaactttgttgactatgatctcaatagattcgctgttacattagcggtgtatgagtggttgaagaaatctttcccagtttgtctctttcttcttcctcagttaagttaggtttgcactgtttccctcagctgattggtctgcatctgctcctcctgtatagtacccttatgccgagaagccttatggcgcggcgtccatcccgtcacccattcgaggtggttcatcgttgtctcatggattcctgacctcgaggatggatgacttgacccgaatccgagcgagaaatgcactgaagatccttttggactgtcatgaagactttggacgaacagtttaccagccaaaaggcggtaagagtgtgtttgccgggctaccagtcggtaaatccgtctaagtcgttcggcttgcctgctagaaggcatgggtatatgtgttcctgattgggtctcttgggggaagaagatcctttgttttcttctacaactggtcgtgtctgtcttttttttcgctctctaatatctgtcacctctagtcattgttgttgtttttgttatagttcgttcttttgggaagattggattcttattcttattcttacatcgattcactgttgaatcacataccattcgttctatgtctcaacctggctacataccttttcttcttcaaaattccttcgtcatcgttctatcttttctatcacatgcaaggctttgagttcccttggactaacatattggaagaacccctttccttttgatgttatactgtcgtttgtttactcgcttgaaaaagctaagttcttgagtgcatgcctatcactcgctgatgtaacccgtacatacataaatacaaatctatttgcaccttcctcgaatttgtctactctcatccttctgctgaccattccccttgatgagcattgttgagtcatgtgtcttgatctcattatatctgaccaacctactgaatagtaaaaagccagatccatgcttctctgaaagtaaactatcaaaaggaagagataggaaaagaagaagccatggggaacttctggtgtattctcgatctatcctccagttcgttcggcaatgactcctttaccctgccgtcagacttgtctttctcttcttcgtttgctcatttatcgaactcgctaacttgaccttgaagacttactagcatcactatcacgaattttcagcgttttttttcctttctgatcatagcgcgccatgttccatcatagtcgtcccaaagaccctcaacaagaagtccaccggtcctcattgtcgcgtgttctacattcagatctatacctagctcggcatcgaccctgcccaacccggacatctaccgcgccggaatttttatctgcaccactgtcatcgctacgtggtggtgacacgactctggctgaaaccacatcggtttgtgagtatgatatcggtcagatcgagactgtcattctgaattcagatgataccccgattacatctgactacgctcaacaccaacaccatcatcagcgtcacccacctcaacatcatccacattctcaaccgcatcctaatcgtccagaaatttctagaagagcgactctcgctcatccattccgatggacaagacactcaaagacatcctcctcctcttcctcctcatctacttcttcctccgtcgatatcaacaggaaaccagcgaatggaggtctcaaaattaaacttaaattcaagaggatgaagggacatgggatgcatgccatatatgagcttttcggaggatccaagatacggacaatggttaacgtggattcagaggagactcagagtgagaatgtttgtcagttttgtattgaacctcggtcaattgtgacggcgcaagaacatgatcaggcggtgttccatcatcttgaacccggagtttcatccaagacgacagctgtagatcctatctgggctccaggaaaggatggttcagatgactctgaagggccgttcgaccctaatattatatgctgtccgcttcctatcgatgagctcgtaccgagttcccctctgctatgttcaagtcctatggttgaaattgatatgccggaactttggtcactggatggagagactatcgaggaagaggaagagaaggaaacggaaccggacgttatcgttgagtcaggcgattcaaaaacaggagtgtggacgattgatggtgttcaaagcatacaggaccatagtgtgggttctcctgaattcatcgctcttaggtttcgtgaactgatgttcaggttcaattgctcggaggtgtttagttgacttcaactcttcggccattcaatacaacaacactgcctggaggccttctttctctgatcaaacatgcaagttcttccgctcaaactatatgcgttgatgcaacattgacgtacgatcccggccgtttatataggacactctcaactggtacggacatctgtacctccaacatatcctttcgacagccgtcaatatcttcgccccttctccggctgcattcagatccaaaacggggttcgagcttactatctatctgagggaggtggcaaacttacctctgattggcatgggtccctccgtctcggctgaatttctgtcattatcggcacaggccgatatgcaaatgaaggaagagaaggaggacaccccatcatcaaaaaatctggattcatcaacggagatatcagatgaagcaacgccggttcaagaaccaatgagaggtcaactgcacggcaatctctgcaagaaatgttcgtggtatatgggatgttcttccgagaaaggatcgacttcggagtattcgtcaaaaacgttggtgatgacgtctgtcgagctctcagcccagagtggttcagaggaggaaaatgaaagtagtgtgagtctttactagccctcgcctctgctaaaatttgttcctatatctatttagtttctctcttctctccttttgacacatttcaagagcgactctaccgtcgagggaaggaacgactcagaaaaaataatcgctcgaaggcgcatgttttcccctgtccttctttatacacccttcaagctcttccaactgttacctcaccaaggtggcagtcgtcatcaaatgtatcatcccatcttagggcttttggccaaatccttgggaggtatggcaggcaacaagacgaagagatttttcgttgggaacgtcgggttgtggtctttgagagatctttgatgcagtgtgttgatgtattacgggcgatgcttccatcttctttcttatgcccaccactgtattttcatatgctcttttgacttcgttcttttgtatgtatatatccctttgtatgatcttttggctacgtgtccgagacgaatattttccaattttcctgtgctggtatcaggtctgagtttgatcgacgagggattcaatcacgatttttaaacttgatacattccaatgaaactacgcctatgtatttcttcattcagctcgccaatcggatggatgcccgacatggccttacgtgcggacccatccgaccagaacttatgttcccggcgacatgtgttttaggcaccaagagctcttgttgtttttgaaaatgggaccgggcgatcggctgagtgtccgttcggaaggagtccatgagaattcgttgtttagataaacaggacatgaaccctcattggttatcagattaatgagccgatcttggcacgggatttatttgccggattcgcttgcttcaattctatcaatcatttcttttatttgatcatttgagctccctccggtccctttgatgggctgtatctgtcaccgccttctctctgttccgctgtctagacggcttcatgatggtctcgctttgttgagccgccgtctatccggtccggtacatcgtttgtgttcttgtttgcaaattcttcattcttgattaaccacgcgtgtgcgagtgcgtttactcgaggcctctcattggagatattctctccggaaagccagccagaagcatcggacatttcatgtctgtagatcggaagagagaagtggcttctccttctttctcctcccatgagttccctctgttgtgcttatttcggtttgtcaactgattcttcttgtcccgaatttttttccttatgctatcaccattttgttgatcttaaaaggatagactcttctcttatggatgaacatctttcttctcttttgctgttgatctgaggaggtattgaacaaacttgtatgaagttcaccatgcacttcttctcttctgtttttcttggggtcgctatcttttactcggcagtaaatgccgcgcccaatttgaatgctcttcgactgcttcaaactgactctcgatttgtaggaattatctcgtaagtagttctgctctgcttgcgtcgactgtaacaacaaagctcatgagctatcgcttgatttgggtctatggacagtccttgcacagccggtggttcgtctagaacaacggctgctgaatggttgagatcagttagttccataaattaggcctttttcttttggctcaagttctgactgatgcctttcgcaacattcagtcttttcatgatgctggatcttatgacgccgcttcaggcactggaggaatcgatgggtctctggcatatgagacagatcggtttgtctttataatcaccactctcattgtgtctcaagcgctcctttctgaaagatcctcttcacttaatcacagagctgagaatggaggaacattcgacgcggccactatcactcagtaccgatcgtttcaggtcagagaaacattgtattatgaggttttctatacaaatctgacaaacgctctatggcctgataaatatccgattagcaaccaggcgtgacgatagcagacttgatagttctcggcgcggtaacagctgtcggagtatgtgcaatctcatcctcttgttccgtgtacaaaaaaaacaatcatctagacttcttacgtgttgctcttcggtcccctgatatgtcaggcatgcgggggtcctactattcctttcagagcaggacgcatcgatgcctcagctgctggtatagaaggtgctctgcctctaccggaggaaaccctggaaacacaccagcaaaagtttgccaggatgggattctcaaagtaagtattattactcaatacgcgtctgactaattcgttattgatagacatctttgtttttggtgttgtgtacatagccgagatatgatttctttggtcgcttgtggacacacgatcggtggagtacataaggtgaacatctaaatttcaacaatttcgatccgattgattgacctgctttcaaaacggggacgaaaaggtcaatagcccaacgattaccagcgcagccaatgccgcgtaagtaatgtagtcaatgttccgctaagcctcaacgaattgatgtaaactgaatagatgagctctcaattgctgctccgctcatataccatagctttgattcaacaaggactacgttcgataactatgtagcccgggaatacatcaacggaagtttgatcaacccattggcacaacctgtggatatgaatcttttagcgacgagttcagatacaaggatctttcaaagtgatggaaatgcgaccataaagagctactctgattctagcaatttcttcatgcaggattgtgctacctcgttttcaaagatgttcgatgaaggtatggtcttctgaacttcaatatttcgatccttttcttgcgatgttagtttttgatatcaactagcttgttaaactgcgtacacatctacgtagctattcccaattcggttacattgacagacgccctcactccctatccggttgccatcggcggcctggtcgcctaccgaaacgacgctttctccgtaaccatcggaagtgtccgaatatacaacatggttggtaaatggaagtcggttgcaattaagtacaattatagagatggtacccaaggtacagctgcgattaccgcgggcaaggtcaggacgatctcgaacggtctcccaatcgagatttctgattttactgctgtgagtagatctcagtatctgatgaaagcatagaaacccccgaacttcgtagtcatcaattcacgtattgttactttcttgggcttctccgaatggtattcagcaatttgaagctatcaaagggtgtgtccgaggggcctttcatccttgctggcatgtggtatatgctaatagtcttctcgttgacttgatgatggttcagtgtctcatccctatccgccgtcttgaccctcaatgacggcacgatctattcaagcgccgaggaagccgagaagatggttatcgaggaccgaatcaatatcgttggtcgcgcactccttcgatcccatcaattctgggcgctcttcactgaaccttccgttaacttttctttctttattttcatatgtatgatagaactacggtgcggcatactcgtgccgatatacttcgccaagcggtgtcgctggattgaatgtgacgatgcaagtgcttggaccttacaacgcagctgataaggttgagttgctctatgatcttgactcggacgctactagaacgacttatggagagccaattctcgccacctacagaggatcaagagcaggtacggcgtacaatgtgagtcttccaacccctctgtgtgtgtgtgtgtgtgtgtgtgtgtagttctgatggtttgattgtttgccaaaatgggattcgcgacggatactctagttttacaacgtgtacatccttctcttgaacacttgtgcctcggggtgttgcttactgatgtcatatcttctcttgtccttcagtttcattgaggacgtagccaagagaaacatcggtagtgtcgctgctcgagtcacacgagctgatggttctgttcagaccgatactcgtcaaggtcggtgttcttctgctatttacgtgcttcactcaggacgacttgagagcctgactagaatatcgtttttcacgattctatacgctttttgatgataggtgtctggtggaagaaagcgaactttgtcgtgtgtcctgctgatgcaacagtccccacaacgacgacgccgtcgtcgtcatcggcatcatcaatactgatgcctacggctggcctgggtcgtcgagtggcccatgtagctagaaagtgtatccagaaaggatacacgaactgttttggtctatgtgtagacacaatggctgatatcgaaagctgtggaggttgtgttggtaaaggcggagtcgattgcacgacgcttgaagggatcgtagcttgtgagcaaggggtttgtgtagtcaaagatcagtttgcattgtaaataacatctagaggatctcgcttttacgttgctattgcttctctcttattcggttctttttagctactcttttatgggatccatgcctttcgctatcaacggatcatatacttgactcgtacatgatgagatacatgggatgggctaagaacttgagaatctttcgttatttcacatagccaagctggcgggtgatgaacaggaggaaggcgcagttgcaatcagtcgcgatgagcagtgccgcaaggaaggcatgtttgtttgttgttgtcgtttcggacgcgtcacgtcgcgtacgaaaaacgagtgggctttgtgatttttcttggacatcccaatctgctaaaaaaatatggaagcacctataaagagctcagcccccctctttttcttccttgttcttactccttcaccaccaccaccaccgatagtagaaactttcgctccctctcctgtatatctccaaatctctttcttcacgcaaaaagttcgattcaaccatgctcggattcactacactcctttctgctgcctcccttttggccatcggcgccaacgctgtcatcaacaccccctctagtttggtcacttgccagcctactcttctcgtgagttcatgtcttgggccttcttcggttttttcttagtttcttcacagagtccgacgcaatatagatgaccttcgcatgctgatgaacgtgcccctttccttcctcacgatttcttcattgcgcccttgatatctagtcctgggacgctaccaccgtgagttccatatccctggatttcctgcccttctaacatacaacgacctgacctgtctgacattccttttttccatcgtgaacaggccccctactacttgactgtcattcccaatggagacactaccaccactcttgccagtctcgtctctgggactgatgccctcagctacacttggaccgtaagtcttcaacttattttctctttcattttagagatgaacggcagttgctcacctgcttgactcctcaatgtatgtataattaggttaacatcgcctctggcaccgagattgcctttgccctcaagggttcgtcttattttttttttcttctcgctctttaatcggccatctgaccattcgctatcattgcttttgcagatggaactggagcgtccctgtacacttctggtgtaacgatcggcgccggaactaatacctcctgcttgaactctactaggtgagtcataggagcgaagcgattgtctcaatcgagataagtctatggctgtacgcgtgtgatgaagtttcgattgacgttcgtgtttatactcgaatcacgtagttcctctaccgctgccgttgccgcaacttccagcactgccgcaacttccagcactgccgcaacttccagcgctgccgcaactacaagtgctgcctccaccaccggagctgtggccagtgcttcatccaagggtaagcatcaactttacagctgtgcccgcggtgaggttctcttgaacaaacttagggagttcaaattgaccgttgatgtcccttctctgttctgtcgcatagctgtctctgctgcttcttctgcttgtaagtctgatagttttgctgctgagatagatctttcaaaaattaacagtttgatttgatatttcctcttgacttctcagccaccaaggccgccactgtctccgctgctgtgtcctccgcgtcagctgctgctacttctgctaagtccgctggagcgcctccggtgtctgcctctgtcgctttgagcgctcttggtttgattacctttggcttcttcgctttagcctaaggaacccgtcgacgttggcctttgagtctgtgtcaatccaacaggccagctgctctcttttattctttctcttttctctatcttcaactctacagactttctacaaggaaagcttgcattcccaggaaaacacgctcacgcgcacgcatactctcatctgcatctctttccttccctctgagccgatgtcaatggactcttctttcttcctttttgcattcgcatctgcatctttcccacaacttgtcttttacgatgttttcttcctctctttctgtctttacggtgatgctacttttccctactttacgctcctgtgtttatacttgcctaaaaggcggttgtgaacgttttatcgatcagttctcgatgaacaattttgcaacggacgtttagaagagagataaaaatgtgacaagaaagacatagacacatgcgcacgcacacacacgcacgaagagctgtgctcgaagtgtgacattattcgagccggcccgaccggaccgaggaaaagagaggcacgcgcagccggtcaagtggaaaaaaccggaacgatccggtagaagagagaagggactaaatggatacccgtgatcactgggcgtgtgtgtgtgtgtgactgggctgttttgcatcgaaataatttccgtttccgtctccagcccggcgtcgggtttgattatacttgacgaccctttcgatctctttcccctttccctccccccccac

SEQ ID NO: 2250 - DNA, 1104 bp, Xanthophyllomyces dendrorhous
acacacacacacacgcacactctcgcacaaagacaccacgttcaaacggcgtattcttcgatacgctcgctcgtacgtttgctcgcttattcgttcgtttcgcttcattcccagaacgaagatcgctcatcggcagatccgtcactcctctcatccttttttattgtttattcttctttcgtttttaacgccgtcgccccttttgctttttgtcgattcctacctgactacatctctcttccttccccttcatcgtgtctgtctccagaaaatcaaggtagtctgatctccaattttaaaggaaacaggataggctgaaaaagaaaagcaacatacacgacaacaagtaggagaagaaacgaccgattggaatctcgggttaccaatatctctcgtacattcatctcttgtccatcgcccagctcggagcaagtcagcttggacgagcccagtggaacaagaggactcgggaaacagggaaaaaaaccataaagaggtcttctaaatcatccgaagaggaggaaaacaaaatccaaaattccagacaactccatccgagtggaagcagtctttctttgggtaccatccagttgtgaagatcaaggacgatcgtcagcaaaagatccaggacaaagacattcttgatcagtccggaccagatactcacgcacgcacacctacagattgtcctactacatccttttcttcctcttctctagtctgccctgataatctgaaccgaaacagcaacttccatacacttatacacttatacacgcaatacaaaccacatctatttaattaacagtacagcagtcacccaccctcataaacatcccacactcatgctctcgccctcgccgcttcttcagccggtactctccctcgccttgccggcaatccaggatgtcaaaggcggagaaggcttgtcctcgctgtggaacgtgtttaccaaatgcaaggataatatcgaacagggtgaccggttggagaacatttcctggaggttcgtaccaagccttttttaattcgttttttcatagcgagactgttttccttctgccttcaccgttactgtagtctttcctccccctcacccccctc

SEQ ID NO: 2251 - DNA, 609 bp, Xanthophyllomyces dendrorhous
gtagaaaaatacagcaatcgcgacaaatgatgcccataagcgatgatgttattctttcttggttgataggccgaccgtgcaccatgatgttcccattgtcatgctgttagtgggctgcaggtacacatatttatccttacaacagccactcttataatgaagtcaacacgcatcacaagtactgactctatttcagtgagaattgagaccccgacgatcagccagatcgcataactcagctgcgattctaaaaaagcgctcttgtggcaaacagatggactgacccagtaccaactgctgtcagcaaccatcagacgtacgagtctgatggacgagatgtacagtaaaggctgaaaactttcgagccatccaggctttcagtgtgtgattgatagacaagatatcagcaactggcttgaatgacccattcttcatgttcagacatgctgctgacggcgacgactacgactgctctaaccgccgtcacgactatccgctcactttgccttcatcatacgttgtgatatatacaccagctggagcggcgtgtgcatcatatgcgtcagctggtccacagccagagatcactggaaaagtgtgaagcaacgt

SEQ ID NO: 2252 - DNA, 601 bp, Xanthophyllomyces dendrorhous
  misc_feature (230)..(239): n is a, c, g, or t
gtgtgttgtgcggtgctgatgtgacgacgtaaagacagtgcatacagatcgacgttcgccagaggcgatggacaaggatgtagatccagatgcagatgcggacgcagtgtagcgaggactgctctgcttgtggcatggtctgtgcttactcaaggtcagtcgatcatgttctgttgtgtgcacctcgtttcctctccctcctcccctgcccctctactctcctccccctnnnnnnnnnnctgttcaaagatgcaaccaaagttttccaacttcgcagtttcctccctacggtcctcctgcccgcaagctagagttccttccgttgtgaaggaccaccccgtgctcgcctctggcacccgagctctctcctcgttgtaacctgttcgcggcgattggtttcgaacccctttgccgcttgagcgggccgcctcggcctttcgccccttaccgggcttgatcggtcttgatggcgcggacgggtcgatgggggctcttcaggagggtcggtctgcccccttgtggggtgtgtgccgacgggtgggaacgaatgagggtatttttcttccttggatgtctgagacccttctacctgatatgcttc

SEQ ID NO: 2253 - DNA, 316 bp, Xanthophyllomyces dendrorhous
ctttcgtaaacctctctttcatggaacaaagagaggtggtcccagaatgaacgggcgacaagaagtgggaaagaacagaaggaaccatgattcggcctctcgccggaggtgagagagaagaaaaggagcgacctgagggaaccgaaggtagggttcttttctgtcccctcctccttttcttttccgagcgggcgtagcgaggaaagggaaaggcaaggagggggactctcgagactccaggagagaggagttctcatttcggggacaggtcccctaaatgaggatgtccgaatcaccctctttgctcgaggaccct

SEQ ID NO: 2254 - DNA, 587 bp, Xanthophyllomyces dendrorhous
aagaggaccgccgatgggcgaaaaggcgcctcttcttggcacccgtcggggtcgacctgcggccccagataggggtgcaaagaagcacgccattccgagaatgaaacagggtttcccgagttgtccccgacaacgacgggaattgaacccgtatttcattctcgacaagaatgcgtgtttccattgcaccacgttatctgggtgcgccgcagggaatcgaaccccgataactactgccaagaagtagcgcctttccattaggcgacggcgcaagaacaaaggaggagtcgaacctctaggagattgctttgcaagcaatcgacgcctacccgacgacgatactttgttctttgctaagttgagaaagaatcgaactttcagtgagatgatttctcgacggcgctacaagccgttacctgcccatcaggtggtcaacttcaatggctccagctgcgttcgaacgcagccaactccctccacaagagagtgctctacccctgagctactggaacagtagtgatttcttagcactctctcaagagggagtggatcggagaatcacagttatagagagagaaatgagatgc

SEQ ID NO: 2255 - DNA, 362 bp, Xanthophyllomyces dendrorhous
gaggctctgatgagttcttttctcgcacgaggcgacacagcctcttgcccacactttttcaatagccctttaaggcaataaaacctttcaagggctattgaaatcctcttctctccaagccaaaggcaggagagcttaaaggaaagcagaaggaggtgaaaccgagtgatgcttctataagtgccgaaggcacagagagaagcagagggagcgtagcgaatgatgcggatctctgaaggaaggctaaagccccgaaaacaaaactctgctttagcctgacgacccctacggagaggcaactgcctctcttataaaaatataagagaaaaagaagactcaagcggaggagtgctaaggaagct

SEQ ID NO: 2256 - DNA, 5848 bp, Xanthophyllomyces dendrorhous
  misc_feature (2043)..(2052): n is a, c, g, or t
  misc_feature (2978)..(2987): n is a, c, g, or t
tggctatagagctcgagaaaaacttctatggacgtgttcctccgagtcgacgaccccaacatctacgaccctcgtcaactggccctgccactaaacgggacgtgactgacaagaagcctacaggaatggagttaaaggatgtggagtctggagaaggcgtggatgtggaagacgagcttacaggaaaacaagtcaagttgggtaagactggaaagactagcaagaggaagaagacagatgacgatgacgagaaagagcggacgcatccggagaaaatcgaggaggatggaaagatctatgatcaaaatttgctgctggcaatacacagaacagtgatgtggaggtacgtgtcagactttcggagttgttgagctccttattatggctgtgttgatcttggtgtgatttgtttctatgaacacatgtacaggttctggaccgggggaatgcttggagtgtgttggatcgccttaacgtcgacttctcctttggtatcacggatgatcttgaactacatcaccgagtcgtacgaatactcgcatcgagaaactggagaaacggtgtccgtaccgaagtctgtgggctatgggatcgggataagctttgcgctctacctcatgcagcaggtttctagtctgttcatgaatatgtttcttcagagagggttgatcactgggtaggtgaaccttcagcatctgacacagttctcagaacaaagaccaagccttctgatagactcacacaccggcttacatctccattcgctttcaggttcatgctccgagcagcggtcatctcggtcgtctcaagaaagtccgttcggctgtccggagaagccagaatggtgcataccaatggaaagctcgtcacgcacatctcgtccgatgcctcattcatggattatgctgcccttctcacccatgagctctatctccaacctgcgcaggtcattgtcgggtatgtgtgtcttgcgtttcatccgatacccataccgttccattgtagtttatcagcctgaccgacatgcttctctttgtcaaacacgtcacagacttatcatcctgctgcacactatcgggtactcggcccttgtaggctttgcggtgcttgtcatcgggatacccttccaagcgtggctcttctcgcgaatgattggaactcgacaacggcaaatgaagatcgtcgactctcgagttaggttgctgcaggagatcctctcgggcatccgagtcatcaagttcatggcctacgaagaatactttggcagtcggatctcggactatcgacaagacgagatggaagaactaaagaagaactgtttgatgcgaggtatgttgcgcttggtgtgctcctgtcgactaggattcgaaagtgacggaagaagacctcagagaagcgattgtgtcatgctgaccagtagatctgaccacttatattcggaccggctagctataatgagtgctgtcatggcgttcattcctgtctttgccgcggtgttgtcattcgtgagtcgtcgactgaatgagatgagctactgagatctgctgctgatacgacaaacgcatatgtcatctttcaatacagatcacatattcgctctctggccatgatctgaacgcggcaatcatcttcaccgccctccagtcgttcaacaacatccggcaaccgctgcaactcattccgcttgctattcaggcggtctcagatgcatatgtcggactcggtagagtgtccctatgccttttgggagacgagatcgataacccagtacctgtatatcctgatgcggaatatgtgagtggctttctgataggccgggtgtgttgcatgtgacaaagccttgcctgtgcaccgactgaatcgttgcaacgtgtactatttgtgttcatctaggctgtctctgctcatggaagctactcttgggagagtgccgagaagccaagcgatgagcctgttagggtgactccaggaaagggcgggccgatgggaaagggcaagccaccaaagaagtcaaagaaagaaaaggcggcagagaaggaggannnnnnnnnntcgataacccagtacctgtatatcctgatgcggaatatgtgagtggctttctgataggccgggtgtgttgcatgtgacaaagccttgcctgtgcaccgactgaatcgttgcaacgtgtactatttgtgttcatctaggctgtctctgctcatggaagctactcttgggagagtgccgagaagccaagcgatgagcctgttagggtgactccaggaaagggcgggccgatgggaaagggcaagccaccaaagaagtcaaagaaagaaaaggcggcagagaaggaggagcgaaagagaaagaggctggagcgattgaatgcaccccctgtcgttccattcgcattgaaggacatcgatcttgatatccctcgaggcagctttgtcgtggtctgcggtcgggtcgggtctggcaagtctagtttgatgcaggcgctgctcggagagatgaagcttgtgtcgggtgaagctgtaagtagaccgattctttatgtcccttttttgtgactgtgtgactgacttagtggggatacacatgggtctgcctgtctactgcacgtagtatctcggaggcacttccgcttactgtacgtctgcactgttatcgttcaacgtgtcgagatgacattcctggtctgtcttacccctggcgagtgcttgagacagccactgacaagagacgcttcttccggggtatgttctgtttcattctgttgtatcttcggatactgtcatactatctgaacgggcgcaactagttcctcaatcgccttggatattgtgagtgatgtgtctacccagtggtcagactgagtgaaacggatacgtctggtcgctgtagaaactgtccatgcagactcaccacctcttttttcttgcactttctcgttggatattgccatggccgttttccacctgtttctggtctgnnnnnnnnnngcgaaagagaaagaggctggagcgattgaatgcaccccctgtcgttccattcgcattgaaggacatcgatcttgatatccctcgaggcagctttgtcgtggtctgcggtcgggtcgggtctggcaagtctagtttgatgcaggcgctgctcggagagatgaagcttgtgtcgggtgaagctgtaagtagaccgattctttatgtcccttttttgtgactgtgtgactgacttagtggggatacacatgggtctgcctgtctactgcacgtagtatctcggaggcacttccgcttactgtacgtctgcactgttatcgttcaacgtgtcgagatgacattcctggtctgtcttacccctggcgagtgcttgagacagccactgacaagagacgcttcttccggggtatgttctgtttcattctgttgtatcttcggatactgtcatactatctgaacgggcgcaactagttcctcaatcgccttggatattgtgagtgatgtgtctacccagtggtcagactgagtgaaacggatacgtctggtcgctgtagaaactgtccatgcagactcaccacctcttttttcttgcactttctcgttggatattgccatggccgttttccacctgtttctggtctgcatcaacgtctgatcagaaatgcgactctcaaagagaacatcctttttggctcagagatggacgataagcgtttcgacgctgctgtcaaggcctgtgcctgtgagtacagttcatcaggaacgatgtcggctcgatggcagatttaacagctctgatcgttggttctgtacgtttctgttacgtggtcatcattctcaccatgtgttccatctgcgcacggtcaaaagtggagagagatattgcgatgctcaaccatgggatctacaccgagatcggaggtaactcatgctcttgggggcacgctagtgtactagaccggcagtgtgctgacgtccatcttgtttggatcggttgtgtcatgtatgttgctggtggacatcacgattgaatcttgtagaaaaaggaatcaacatatccggtggacagaaggtgagtctgagcgataggcgcagaggatgatatctcatcgacagattcctagttatttcgatacagttggtgggttgatttgcttacaagaccaatgcactctctatcttatcttcttcctaaatcgcatcgactcatccgctcaggcccgagtgtgtctagcccgagctgtgtactgtggcaacgagatcaatttcttcgatgatccggtacgtgcttccttctcaagtcatctgtttgctcaatgtaggcgagagatgttgactgagacgtatcatggggggtctttgccttatctcattttttcggtgatgttcgaacgtgctcgccatatatccggctttgctctgatacaaacaaccttcccgcctgcagctatctgccggtgagtccaatgctgatggcctatactccgtccaagcgattgcagaccgtccttctctggctgaaactcgctgcctttgcatacgttttatcatacgtttccgtgtgtcacagttgatgctcatgtaagcaagtcgctagttgacggcctcgtcaacggaccgttgcggactaaaactcggatcttgatcacccatcacctggaggtgctttcgaaagctgatcttatcatcacggtgagtatattgcctgtctctatgtatgaccaggagtgaggccgagttacggaatgagcgtttctgacgatgacgatgtctttcggtctcgcgtttttgcttactccctctcttatcggcgtccgtttggctcgaatgctgctctggaagatggtcgatggtaaaatcgctgagaaagggacgtatcaagagctactcgcaacaagcggggcgcttgcaaaactcatggcagagcacatgtcggttgcgcatgatggtagttctgagaccgtgactgatccggatttagacatagattctgcagggctcatcgagacgcaagaggatatcgagctcaagaaggttgcgatagaggacgagctcgagaaacaaaccggtgaaggtcgaacgaacgagggtacggctgatgagttggcgaaatcacaggctcctggtgcgcttgtgacgatgaaggaagagcgtgcggtcggagcggtatcttcgaaagtttatacgaggtacataaacagtatgggatctgtctggtgggcgctcgcttgtgagtctgtgagattctgtgtagcacgtagctggcgtgttcttgaccatccgaatctgttactgatgatggctatcttcgatggctgattgatgaagtcatgtcatgcttcatattagctcaggtctgtagagtcctgttctcttgaggtgttttgtgtcggcttcctctctttttctcgtctgactgttctctcgacgatctctcgtcgcgaccactcaggcttccatcgttgggaacaccattttcctcggaaagtggtctgatagctctatcgttggatggtctcagagtgattgtacgtcaagctgtgtcgggattgtacatgtgaagacatcatactgatcaggaaatgcctcttcttaatccttctctctgcgcctgatcctcctctcagatatggggttgtatgctggggttcgcgttctatctttctttcagcttattgtttcctctcagatcaaagtcctcatatcgacctcttcatccatggtttctacccacagctcggtctggcatacactatcttgacttgtaagcattattcatcgggacttgatctcttggtatcttgatcaacgacactgaccacaccaacgaccggttgtatgacggacagtcgctggatcgttcc

SEQ ID NO: 2257 - DNA, 2158 bp, Xanthophyllomyces dendrorhous
  misc_feature (2030)..(2039): n is a, c, g, or t
atcaacgtctgatcagaaatgcgactctcaaagagaacatcctttttggctcagagatggacgataagcgtttcgacgctgctgtcaaggcctgtgcctgtgagtacagttcatcaggaacgatgtcggctcgatggcagatttaacagctctgatcgttggttctgtacgtttctgttacgtggtcatcattctcaccatgtgttccatctgcgcacggtcaaaagtggagagagatattgcgatgctcaaccatgggatctacaccgagatcggaggtaactcatgctcttgggggcacgctagtgtactagaccggcagtgtgctgacgtccatcttgtttggatcggttgtgtcatgtatgttgctggtggacatcacgattgaatcttgtagaaaaaggaatcaacatatccggtggacagaaggtgagtctgagcgataggcgcagaggatgatatctcatcgacagattcctagttatttcgatacagttggtgggttgatttgcttacaagaccaatgcactctctatcttatcttcttcctaaatcgcatcgactcatccgctcaggcccgagtgtgtctagcccgagctgtgtactgtggcaacgagatcaatttcttcgatgatccggtacgtgcttccttctcaagtcatctgtttgctcaatgtaggcgagagatgttgactgagacgtatcatggggggtctttgccttatctcattttttcggtgatgttcgaacgtgctcgccatatatccggctttgctctgatacaaacaaccttcccgcctgcagctatctgccggtgagtccaatgctgatggcctatactccgtccaagcgattgcagaccgtccttctctggctgaaactcgctgcctttgcatacgttttatcatacgtttccgtgtgtcacagttgatgctcatgtaagcaagtcgctagttgacggcctcgtcaacggaccgttgcggactaaaactcggatcttgatcacccatcacctggaggtgctttcgaaagctgatcttatcatcacggtgagtatattgcctgtctctatgtatgaccaggagtgaggccgagttacggaatgagcgtttctgacgatgacgatgtctttcggtctcgcgtttttgcttactccctctcttatcggcgtccgtttggctcgaatgctgctctggaagatggtcgatggtaaaatcgctgagaaagggacgtatcaagagctactcgcaacaagcggggcgcttgcaaaactcatggcagagcacatgtcggttgcgcatgatggtagttctgagaccgtgactgatccggatttagacatagattctgcagggctcatcgagacgcaagaggatatcgagctcaagaaggttgcgatagaggacgagctcgagaaacaaaccggtgaaggtcgaacgaacgagggtacggctgatgagttggcgaaatcacaggctcctggtgcgcttgtgacgatgaaggaagagcgtgcggtcggagcggtatcttcgaaagtttatacgaggtacataaacagtatgggatctgtctggtgggcgctcgcttgtgagtctgtgagattctgtgtagcacgtagctggcgtgttcttgaccatccgaatctgttactgatgatggctatcttcgatggctgattgatgaagtcatgtcatgcttcatattagctcaggtctgtagagtcctgttctcttgaggtgttttgtgtcggcttcctctctttttctcgtctgactgttctctcgacgatctctcgtcgcgaccactcaggcttccatcgttgggaacaccattttcctcggaaagtggtctgatagctctatcgttggatggtctcagagtgattgtacgtcaagctgtgtcgggattgtacatgtgaagacatcatactgatcaggaaatgcctcttcttaatccttctctctgcgcctgatcctcctctcagatatggggttgtatgctggggttcgcgttctatctttctttcagcnnnnnnnnnnaagtcctcatatcgacctcttcatccatggtttctacccacagctcggtctggcatacactatcttgacttgtaagcattattcatcgggacttgatctcttggtatcttgatcaacga

SEQ ID NO: 2258 - DNA, 846 bp, Xanthophyllomyces dendrorhous
  misc_feature (713)..(722): n is a, c, g, or t
  misc_feature (785)..(794): n is a, c, g, or t
gtattacaatgaaagtattcctcgccgtaatgtgaagagccatgagatgattgttcccatatcatggtttttgtccaaagtgttatgtcgttatcatcaagttcagttaactatgctactggatagacttacatcattctatacagcatataacccgtacccttcgatgaacctcgatgtcttttgaagtgcatatattcaatttgaaagttggaaggagattatgaagcccgtaacgtcagtcgtcattcttcttttcaaaaactagttttgctaatagtcggttatcaaccaaaaatatcctggttcatggttcgaattcttgagcaacgttgaaaaacacataatgagttgatttaaatgaattgctcagaaatagaaagcgtgtcgatgttttcaatctgatgaatttcgctcccagattcggtaccggctctccttttccatataaagtaaataaactgatttttggaggctattagatttcggaatgtttcttgtactgttgatcttcaacatggtagagatgaatgatgctgtttgctgccgcgctgaaaagatttgcgatgatatgcactataatgaacgtgctacaagaaatgggctcaaagattgccccatatatgttatgagacatcagaatatttgatcaaatacaggagaggtcatttgttcacactgttacaagagagcgaacacaaatgtaatccctnnnnnnnnnncaaatacaggagaggtcatttgttcacactgttacaagagagcgaacacaaatgtaatccctnnnnnnnnnntcgaaaacaccggtgcctttcatgatcagtacgcgacgcaattgaatcttga

SEQ ID NO: 2259 - DNA, 1128 bp, Xanthophyllomyces dendrorhous
  misc_feature (352)..(361): n is a, c, g, or t
tgttccctgttccctgttccctgttccctgttgtacacggctgcactctgtgctcgttccactctgttctggtcgtaccgttctgtcatgctatgtactctcataccgtgtgctctcatgtcgtgttctgtcgtgctatgttgtactctgtgtcacatcatggggtgcaccggtctgtcgggctgcatcgagtgcgctcgcatcgtgctctgttctgcgttgtcatctcgacaccgcctgtctctcgacaccgtcttctcgcacgactcggcccatcgctcatcgcccatctcggtcttccctcggcccatctcgacatgttcaccctcggcctgcttgctgtctctctccnnnnnnnnnntccctgttccctgttccctgttccctgttccctgttccctgttccctgttccctgttccctgttccctgttccctgttccctgttgtacacggctgcactctgtgctcgttccactctgttctggtcgtaccgttctgtcatgctatgtactctcataccgtgtgctctcatgtcgtgttctgtcgtgctatgttgtactctgtgtcacatcatggggtgcaccggtctgtcgggctgcatcgagtgcgctcgcatcgtgctctgttctgcgttgtcatctcgacaccgcctgtctctcgacaccgtcttctcgcacgactcggcccatcgctcatcgcccatctcggtcttccctcggcccatctcgacatgttcaccctcggcctgcttgctgtctctctccaggtgtccccaagcggtcagcgcgatagagtatacatcatatctagtacagggtgtgttacagtatatacagtccagtccagctcagcccagctcagcccagctcagcccagctcagcccagctcagcccagctcagcccagcccagtccacagacgactctgctctgtccatctatcctctgccctgctctgctcttctctgccctgctctgctcttctctgccctgctctgctcttctctgccctgctctgctcttctctgctctgtccgtctagttgccaaagccatacagcgttcggccctgtcgcttgagtgcgtacaccacgtccagtgctgtcaccgtctttcgcttcgagtgctc
